United States Patent Application Publication US 2017/0114356 A1 - sequence listing, part 56

SEQ ID NO: 75483 - DNA, 2098 bp, Zea Mays
aatgaatgccacctattcttttttctccgcagccaaaacacgcttctcccttcccatcttttcctttcctctccctcgtctcgtctcgtcttcgttcccctttcctcctgcgcaccccgtcttctcctcaccgcgtcaaaccccagcacaaatcaaccgcccgccgcctccgctcccctcccgtcccgaatcagccgctgcggtgcccaatccggccgatcccccctcctatccgccgcagaggcggcgcctctgggcctaccccgatgtatagcaacttcaaggagcaggcgatcgagtacgtcaagcaggcggtccaggaggacaatgccggcaactacgtcaaggcgttccctctctacatgaacgcgctcgagtacttcaagacccatctcaagtacgagaagaaccccaagatcaaggaggccatcaccgccaagttcaccgagtacctccgccgcgccgaggagatccgggccgtcctcgacgagggcggcgcggggccgggggccaacggaggtgacgcagccgtcgccacgcgccccaagaccaagggcaaggacggcgacgggggcaacggaggggatgactccgagcagtccaagctcagggcggggctcaactctgccatcatcaccgagaagcccaacgtcaagtggaacgacgttgctggcctcgagagcgccaagcaagctctgcaggaggccgtcatattgccggtcaagttcccacagttcttcacgggcaagcggaggccttggagggcgtttcttttatatggccctcctggaacaggaaagtcttacttggcaaaagccgtcgcaaccgaggctgattcaacatttttcagtatatcttcttcagatctggtttcaaagtggatgggtgaaagcgagaaattagtcgcaaatcttttccaaatggctcgtgaaaatgccccttccattatctttattgatgaaattgattctttatgcggtcaacgtggagaaggtaatgaaagtgaagcatctaggaggattaagactgaacttcttgtgcaaatgcagggtgttggtcataatgatgataaagttcttgttcttgctgccacgaatacgccatatgctctggaccaggttacaaaaaaaaaccacgctgtgcggcgaagatttgacaagcgtatctacattccgctacctgacacgaaagcaaggcagcatatgtttaaggtccatctcggggatacaccacacagtttaactgaaagcgatttcgagagcttggcccgtcgaacagatggattttctggttctgatgttgctgtttgtgttaaggatgtcttatttgaacctgtgcgcaaaacacaggatgccatgttcttcttcaaggcagacggtgacatgtggatgccatgtggaccaaaacaaccggggtctgtacagaccacaatgcaggagcttgcatccaagggcctcgctgcaaagattcttccaccacctatctcaaggacggattttgagaaggtcttgtcgaggcagaggccgacagttagcaagaaggatctggaggtgcatgagaggttcactaaggagttcggcgaggagggctgatacaccgcgcgcggacacacacccatgcacagctgcaccacagaaatgtatattgtttatcacttcgattgttctgcttggaagttgcattcacaggattgtacatttggtagcccaactatgagtaatcatggcagctgctttaccgtgttgggctaccgatgggcctctgttgtcaacttatttcaatttttatttatgcacatgaaaattttccgcaggtgtattattgaataataattcttaacgtggagcccttgtggttgctagtttctttttctaacgttccttagttttcacgccgagtttcttttccttcagtttggtttacttgcagggccattttattagacgctacatactgaaggtgaacttcttgttctcaggcgttttatttgaggtatctagctctggtagaatctggccatgtcagtaatggtttacatttttatagtttgtatgtatctaccacaaacttcatcagttttgaatgatctgaatctaca

SEQ ID NO: 75484 - DNA, 2088 bp, Zea Mays
gaccaaccgcctcgcctgccgttcccctccacgtctccccattcccgcctcccgagacctgaaccctgttggggacacatgggccccacaacccgcgctcacttcgtctacaatcgccgccgccgccgccgccgaggcgggcggcacgctgtcgaggaggcttccgacgaggagcagcagcagatggatagctcctcctcatcctccgacgaagaaggagatcaggaagaagatgccgaagcctccggagaggacgtcgatgacgaggaagaagaggaagcggtcgctgccgagcctgcgcccaagcagccacccgcagctgcggcggcgggggagaagaggggccgaaggaagggctcgatcaccattagcctgaagaaagtgtgcaaggcgtgcaaaaggacagggcaccaggcagggttcaagggggctgtgtacatcgactgccccatgaagccttgcttcttatgcaagatgccaggtcatacaaccttgacttgcccacatagagtaacaatggagcatggtgttatcccagcgcctaaaaggaatgcaaacacttctctggattatgtcttccagagccaagtcaagggaaagattcccatggttaagcctaagtttctgatacccaaccaactagagcatggaaacataaaatttcatcagagacgtgtgacatgcttggagtttcatccaactaagaacagtgttcttttatcaggagacaagaaaggacttctgggtatctgggattatgttaagttgcatgagaaaatcacttatgattctgtgcactcctgcattctgaatagcatgaagattgataccaccaacgatggtatgatatatacagcttcctctgatggtactatcagttgcactgatttggatactggtattggctctcccttgttaaatctcaacccaaatggttggaatggtccaagctcttggcacatgatatacgggatggacttaaacactgacaaagcctggatagacgatcaaagacgagaattggacatccaattcttatccataaaaagggtagcaaggtaaccagcctacattgtaaccctgcacgacctgaagtgcttctaagcagcggaaatgatcactatgcccgtatttgggatacaaggaagcttgaagccaactctccccttgccagccttgctcatggacgggttgttaattcaggatacttttctccacgaagcggaaataagatcttgacaacttgtcaggacaaccgaattcgtgtatgggactatattcttggtgatctgcaatccccaagtagagaaattgtgcacagtcatgatttcaatcgtcacctgactcccttcaaagctgagtgggatccaaaggattacaccgaaacagttgcagtgattggccgttacataagtgagaactacaatggtgttgctctgcatccaattgattttatagatactagttctgggaagcttctggctgaggtgatggaccctgacataataacaatcagcccagtgaacaagctacatccgcaagatgacatcctagctacaggaagctcaaggtctattttcatatggaagccaaaaattgaagatgaacttactgaagaaagagccaagcatgacaatagtagtgatgacgactcaggtggtgattctggcggaaagaacaagaaagcaaagaagactcgcttcactcatgcagtaaagggaaagggcaaatccaaagtctgatgcttggtgtacatagtcggcagcattttgacaagaaagcgtccattaaccagctcctgatgcatctccttttgtaccatcttgccaactccctcaccccccccagctaaggtgctgaagacccgtatgaaacgcatgctgatagaccccatagttgtctcctgcatcaatgctcctaaggagttagccagttaggtttcggactcttttgaatcctgacatgcttatgatcacttgtcatttgtcaacgaggccttttaacggtttaatcctgtatcaacatataaatctcctgtacagttgcctgaatgcaatttgtgcttgtaaaatgtttattggtgctctc

SEQ ID NO: 75485 - DNA, 2180 bp, Zea Mays
gaccaaccgcctcgcctgccgttcccctccacgtctccccattcccgcctcccgagacctgaaccctgttggggacacatgggccccacaacccgcgctcacttcgtctacaatcgccgccgccgccgccgccgaggcgggcggcacgctgtcgaggaggcttccgacgaggagcagcagcagatggatagctcctcctcatcctccgacgaagaaggagatcaggaagaagatgccgaagcctccggagaggacgtcgatgacgaggaagaagaggaagcggtcgctgccgagcctgcgcccaagcagccacccgcagctgcggcggcgggggagaagaggggccgaaggaagggctcgatcaccattagcctgaagaaagtgtgcaaggcgtgcaaaaggacagggcaccaggcagggttcaagggggctgtgtacatcgactgccccatgaagccttgcttcttatgcaagatgccaggtcatacaaccttgacttgcccacatagagtaacaatggagcatggtgttatcccagcgcctaaaaggaatgcaaacacttctctggattatgtcttccagagccaagtcaagggaaagattcccatggttaagcctaagtttctgatacccaaccaactagagcatggaaacataaaatttcatcagagacgtgtgacatgcttggagtttcatccaactaagaacagtgttcttttatcaggagacaagaaaggacttctgggtatctgggattatgttaagttgcatgagaaaatcacttatgattctgtgcactcctgcattctgaatagcatgaacttcctctgatggtactatcagttgcactgatttggatactggtattggctctcccttgttaaatctcaacccaaatggttggaatgtaagtttactttggtcatgttctatagatcactttgttcaaaaagaatttatgaagatgttatttcagtctctctctaccttcccccatcttgttctgtaagcatgcattcctcagatgtcattgatctgaattaatttctatccattttgagcttgtttttaatgaaccctggtccttcgttgctcacaacagggtccaagctcttggcacatgatatacgggatggacttaaacactgacaaaggtcttcttttggtggcagataactttggttttctttacttcctggatagacgatcaaagacgagaattggacatccaattcttatccataaaaagggtagcaaggtaaccagcctacattgtaaccctgcacgacctgaagtgcttctaagcagcggaaatgatcactatgcccgtatttgggatacaaggaagcttgaagccaactctccccttgccagccttgctcatggacgggttgttaattcaggatacttttctccacgaagcggaaataagatcttgacaacttgtcaggacaaccgaattcgtgattacaccgaaacagttgcagtgattggccgttacataagtgagaactacaatggtgttgctctgcatccaattgattttatagatactagttctgggaagcttctggctgaggtgatggaccctgacataataacaatcagcccagtgaacaagctacatccgcaagatgacatcctagctacaggaagctcaaggtctattttcatatggaagccaaaaattgaagatgaacttactgaagaaagagccaagcatgacaatagtagtgatgacgactcaggtggtgattctggcggaaagaacaagaaagcaaagaagactcgcttcactcatgcagtaaagggaaagggcaaatccaaagtctgatgcttggtgtacatagtcggcagcattttgacaagaaagcgtccattaaccagctcctgatgcatctccttttgtaccatcttgccaactccctcaccccccccagctaaggtgctgaagacccgtatgaaacgcatgctgatagaccccatagttgtctcctgcatcaatgctcctaaggagttagccagttaggtttcggactcttttgaatcctgacatgcttatgatcacttgtcatttgtcaacgaggccttttaacggtttaatcctgtatcaacatataaatctcctgtacagttgcctgaatgcaatttgtgcttgtaaaatgtttattggtgctctc

SEQ ID NO: 75486 - DNA, 2226 bp, Zea Mays
gaccaaccgcctcgcctgccgttcccctccacgtctccccattcccgcctcccgagacctgaaccctgttggggacacatgggccccacaacccgcgctcacttcgtctacaatcgccgccgccgccgccgccgaggcgggcggcacgctgtcgaggaggcttccgacgaggagcagcagcagatggatagctcctcctcatcctccgacgaagaaggagatcaggaagaagatgccgaagcctccggagaggacgtcgatgacgaggaagaagaggaagcggtcgctgccgagcctgcgcccaagcagccacccgcagctgcggcggcgggggagaagaggggccgaaggaagggctcgatcaccattagcctgaagaaagtgtgcaaggcgtgcaaaaggacagggcaccaggcagggttcaagggggctgtgtacatcgactgccccatgaagccttgcttcttatgcaagatgccaggtcatacaaccttgacttgcccacatagagtaacaatggagcatggtgttatcccagcgcctaaaaggaatgcaaacacttctctggattatgtcttccagagccaagtcaagggaaagattcccatggttaagcctaagtttctgatacccaaccaactagagcatggaaacataaaatttcatcagagacgtgtgacatgcttggagtttcatccaactaagaacagtgttcttttatcaggagacaagaaaggacttctgggtatctgggattatgttaagttgcatgagaaaatcacttatgattctgtgcactcctgcattctgaatagcatgaagattgataccaccaacgatggtatgatatatacagcttcctctgatggtactatcagttgcactgatttggatactggtattggctctcccttgttaaatctcaacccaaatggttggaatgtaagtttactttggtcatgttctatagatcactttgttcaaaaagaatttatgaagatgttatttcagtctctctctaccttcccccatcttgttctggtccaagctcttggcacatgatatacgggatggacttaaacactgacaaaggtcttcttttggtggcagataactttggttttctttacttcctggatagacgatcaaagacgagaattggacatccaattcttatccataaaaagggtagcaaggtaaccagcctacattgtaaccctgcacgacctgaagtgcttctaagcagcggaaatgatcactatgcccgtatttgggatacaaggaagcttgaagccaactctccccttgccagccttgctcatggacgggttgttaattcaggatacttttctccacgaagcggaaataagatcttgacaacttgtcaggacaaccgaattcgtgtatgggactatattcttggtgatctgcaatccccaagtagagaaattgtgcacagtcatgatttcaatcgtcacctgactcccttcaaagctgagtgggatccaaaggattacaccgaaacagttgcagtgattggccgttacataagtgagaactacaatggtgttgctctgcatccaattgattttatagatactagttctgggaagcttctggctgaggtgatggaccctgacataataacaatcagcccagtgaacaagctacatccgcaagatgacatcctagctacaggaagctcaaggtctattttcatatggaagccaaaaattgaagatgaacttactgaagaaagagccaagcatgacaatagtagtgatgacgactcaggtggtgattctggcggaaagaacaagaaagcaaagaagactcgcttcactcatgcagtaaagggaaagggcaaatccaaagtctgatgcttggtgtacatagtcggcagcattttgacaagaaagcgtccattaaccagctcctgatgcatctccttttgtaccatcttgccaactccctcaccccccccagctaaggtgctgaagacccgtatgaaacgcatgctgatagaccccatagttgtctcctgcatcaatgctcctaaggagttagccagttaggtttcggactcttttgaatcctgacatgcttatgatcacttgtcatttgtcaacgaggccttttaacggtttaatcctgtatcaacatataaatctcctgtacagttgcctgaatgcaatttgtgcttgtaaaatgtttattggtgctctc

SEQ ID NO: 75487 - DNA, 2114 bp, Zea Mays
cgccgaactcataaaccccaccacagcccagaccaaccgcctcgcctgccgttcccctccacgtctccccattcccgcctcccgagacctgaaccctgttggggacacatgggccccacaacccgcgctcacttcgtctacaatcgccgccgccgccgccgccgaggcgggcggcacgctgtcgaggaggcttccgacgaggagcagcagcagatggatagctcctcctcatcctccgacgaagaaggagatcaggaagaagatgccgaagcctccggagaggacgtcgatgacgaggaagaagaggaagcggtcgctgccgagcctgcgcccaagcagccacccgcagctgcggcggcgggggagaagaggggccgaaggaagggctcgatcaccattagcctgaagaaagtgtgcaaggcgtgcaaaaggacagggcaccaggcagggttcaagggggctgtgtacatcgactgccccatgaagccttgcttcttatgcaagatgccaggtcatacaaccttgacttgcccacatagagtaacaatggagcatggtgttatcccagcgcctaaaaggaatgcaaacacttctctggattatgtcttccagagccaagtcaagggaaagattcccatggttaagcctaagtttctgatacccaaccaactagagcatggaaacataaaatttcatcagagacgtgtgacatgcttggagtttcatccaactaagaacagtgttcttttatcaggagacaagaaaggacttctgggtatctgggattatgttaagttgcatgagaaaatcacttatgattctgtgcactcctgcattctgaatagcatgaagattgataccaccaacgatggtatgatatatacagcttcctctgatggtactatcagttgcactgatttggatactgggtccaagctcttggcacatgatatacgggatggacttaaacactgacaaaggtcttcttttggtggcagataactttggttttctttacttcctggatagacgatcaaagacgagaattggacatccaattcttatccataaaaagggtagcaaggtaaccagcctacattgtaaccctgcacgacctgaagtgcttctaagcagcggaaatgatcactatgcccgtatttgggatacaaggaagcttgaagccaactctccccttgccagccttgctcatggacgggttgttaattcaggatacttttctccacgaagcggaaataagatcttgacaacttgtcaggacaaccgaattcgtgtatgggactatattcttggtgatctgcaatccccaagtagagaaattgtgcacagtcatgatttcaatcgtcacctgactcccttcaaagctgagtgggatccaaaggattacaccgaaacagttgcagtgattggccgttacataagtgagaactacaatggtgttgctctgcatccaattgattttatagatactagttctgggaagcttctggctgaggtgatggaccctgacataataacaatcagcccagtgaacaagctacatccgcaagatgacatcctagctacaggaagctcaaggtctattttcatatggaagccaaaaattgaagatgaacttactgaagaaagagccaagcatgacaatagtagtgatgacgactcaggtggtgattctggcggaaagaacaagaaagcaaagaagactcgcttcactcatgcagtaaagggaaagggcaaatccaaagtctgatgcttggtgtacatagtcggcagcattttgacaagaaagcgtccattaaccagctcctgatgcatctccttttgtaccatcttgccaactccctcaccccccccagctaaggtgctgaagacccgtatgaaacgcatgctgatagaccccatagttgtctcctgcatcaatgctcctaaggagttagccagttaggtttcggactcttttgaatcctgacatgcttatgatcacttgtcatttgtcaacgaggccttttaacggtttaatcctgtatcaacatataaatctcctgtacagttgcctgaatgcaatttgtgcttgtaaaatgtttattggtgctctc

SEQ ID NO: 75488 - DNA, 447 bp, Zea Mays
gacaagtgcacacagtatttgaacaagctggcacaagctaagaaaaatcttgctcaagggagaaggtgatgatggtgacatcgagtctgtggaatttccaaagtgtgtggtggcaagtaattaggcacatggtcacatactcacattgaggagatggaggagagggagagataggacccgggagaggagacatgagaggcacatggtcattatattttgttggctgtaactgtaagcctgtaattgttggttgcaacttgtaagttgcaactgttgctaacctgacatattttgttggctccctgcaactttgtcctgaactcctgaacctgaagtcctgatctataattgttggctgcatcactgcatgtatttggttctagaactgaaactctgaaagtatggaattatggattatggaatggaatggaactattatgaacataa

SEQ ID NO: 75489 - DNA, 1482 bp, Zea Mays
aactctttactcgctcactcccccgcgccactgatctctccttccgggaccctaattccgcaggaggccgcgccgggggagtgacgccgatgcagcgccgggtgggcatggcggacggcgaggctaggtgtcggacgctcggcgccgtcatcaaggagaaggatgaggagttcgcgctcttcctcgagatgcgccgacgcgagaaggagcgcggcgctgcggccgccgcggcggaccagcttctgctctccggggacgtcgcggcggagaacgggatgctgctcctcgacccgccgccacccgctgagcccaaaccggcggcgtacaaggtggctggcggcggatttaggagggcgcctgggggagtggacgacttcctcaatgcagacgccagcgacaagaacgattacgactggtgagtgcttcggcagtagctaccaactttccactaattagctagtatcaaatttctgctttttcggttgtgggcagcatagccattggtgtgacaatgattctagccaaaccacattgtagcattgtgaacttcaattttgttctgctcttttgtcgtttaaggcttcagagaatttggtgaggtgttaagttttaaccattttaaggcttcagggaatttggtgaggttttaacagtgtaatatttagtacgggttccctaaatcttgattcctcattcccaatgctgaatgcaaagctgcaggactgacaaaactgagaactctacagcttcataagtttcaagctaaatcttcattcttcagttgccttgctagaagcggagcgatgagttccatttttctgtaattttgccttctgtgcatacagtctatctgctgtccatgcattgtctgttaagttgacggtgtaccataaagtttgtctttcgtgaaacttgatgttagttagaattcagctggtgttgctgggaaggatgggtcatggacatggtggttgttggaggcttctgacaccaccaggaactccattattctcatctctaaaagttgagccaaaaaggtccctggtgagtcaagctggaacgccaaaggctcgtccaactgccttgaaatcaaggggagaaggtgatgatggtgacatcgagtctgtggaatttccaaagtgtgtggtggcaagtaattgcacatggtcacatactcacattgaggagatggaggagagggagagataggacccgggagaggagacatgagaggcacatggtcattatattttgttggctgtaactgtaagcctgtaattgttggttgcaacttgtaagttgcaactgttgctaacctgacatattttgttggctccctgcaactttgtcctgaactcctgaacctgaagtcctgatctataattgttggctgcatcactgcatgtatttggttctagaactgaaactctgaaagtatggaattatggattatggaatggaatggaactattatgaacataa

SEQ ID NO: 75490 - DNA, 1484 bp, Zea Mays
aactctttactcgctcactcccccgcgccactgatctctccttccgggaccctaattccgcaggaggccgcgccgggggagtgacgccgatgcagcgccgggtgggcatggcggacggcgaggctaggtgtcggacgctcggcgccgtcatcaaggagaaggatgaggagttcgcgctcttcctcgagatgcgccgacgcgagaaggagcgcggcgctgcggccgccgcggcggaccagcttctgctctccggggacgtcgcggcggagaacgggatgctgctcctcgacccgccgccacccgctgagcccaaaccggcggcgtacaaggtggctggcggcggatttaggagggcgcctgggggagtggacgacttcctcaatgcagacgccagcgacaagaacgattacgactggtgagtgcttcggcagtagctaccaactttccactaattagctagtatcaaatttctgctttttcggttgtgggcagcatagccattggtgtgacaatgattctagccaaaccacattgtagcattgtgaacttcaattttgttctgctcttttgtcgtttaaggcttcagagaatttggtgaggtgttaagttttaaccattttaaggcttcagggaatttggtgaggttttaacagtgtaatatttagtacgggttccctaaatcttgattcctcattcccaatgctgaatgcaaagctgcaggactgacaaaactgagaactctacagcttcataagtttcaagctaaatcttcattcttcagttgccttgctagaagcggagcgatgagttccatttttctgtaattttgccttctgtgcatacagtctatctgctgtccatgcattgtctgttaagttgacggtgtaccataaagtttgtctttcgtgaaacttgatgttagttagaattcagctggtgttgctgggaaggatgggtcatggacatggtggttgttggaggcttctgacaccaccaggaactccattattctcatctctaaaagttgagccaaaaaggtccctggtgagtcaagctggaacgccaaaggctcgtccaactgccttgaaatcaaggggagaaggtgatgatggtgacatcgagtctgtggaatttccaaagtgtgtggtggcaagtaattaggcacatggtcacatactcacattgaggagatggaggagagggagagataggacccgggagaggagacatgagaggcacatggtcattatattttgttggctgtaactgtaagcctgtaattgttggttgcaacttgtaagttgcaactgttgctaacctgacatattttgttggctccctgcaactttgtcctgaactcctgaacctgaagtcctgatctataattgttggctgcatcactgcatgtatttggttctagaactgaaactctgaaagtatggaattatggattatggaatggaatggaactattatgaacataa

SEQ ID NO: 75491 - DNA, 987 bp, Zea Mays
acggttccaaaaagctcgcttccgttggcttcactcccaactctttactcgctcactcccccgcgccactgatctctccttccgggaccctaattccgcaggaggccgcgccgggggagtgacgccgatgcagcgccgggtgggcatggcggacggcgaggctaggtgtcggacgctcggcgccgtcatcaaggagaaggatgaggagttcgcgctcttcctcgagatgcgccgacgcgagaaggagcgcggcgctgcggccgccgcggcggaccagcttctgctctccggggacgtcgcggcggagaacgggatgctgctcctcgacccgccgccacccgctggtgggagcttcatttcggcctcttcttcggagcccaaaccggcggcgtacaaggtggctggcggcggatttaggagggcgcctgggggagtggacgacttcctcaatgcagacgccagcgacaagaacgattacgactggcttctgacaccaccaggaactccattattctcatctctaaaagttgagccaaaaaggtccctggtgagtcaagctggaacgccaaaggctcgtccaactgccttgaaatcaaggggagaaggtgatgatggtgacatcgagtctgtggaatttccaaagtgtgtggtggcaagtaattaggcacatggtcacatactcacattgaggagatggaggagagggagagataggacccgggagaggagacatgagaggcacatggtcattatattttgttggctgtaactgtaagcctgtaattgttggttgcaacttgtaagttgcaactgttgctaacctgacatattttgttggctccctgcaactttgtcctgaactcctgaacctgaagtcctgatctataattgttggctgcatcactgcatgtatttggttctagaactgaaactctgaaagtatggaattatggattatggaatggaatggaactattatgaacataa

SEQ ID NO: 75492 - DNA, 880 bp, Zea Mays
acggttccaaaaagctcgcttccgttggcttcactcccaactctttactcgctcactcccccgcgccactgatctctccttccgggaccctaattccgcaggaggccgcgccgggggagtgacgccgatgcagcgccgggtgggcatggcggacggcgaggctaggtgtcggacgctcggcgccgtcatcaaggagaaggatgaggagttcgcgctcttcctcgagatgcgccgacgcgagaaggagcgcggcgctgcggccgccgcggcggaccagcttctgctctccggggacgtcgcggcggagaacgggatgctgctcctcgacccgccgccacccgctgagcccaaaccggcggcgtacaaggtggctggcggcggatttaggagggcgcctgggggagtggacgacttcctcaatgcagacgccagcgacaagaacgattacgactggcttctgacaccaccaggaactccattattctcatctctaaaagttgagccaaaaaggtccctggtgagtcaagctggaacgccaaaggctcgtccaactgccttgaaatcaaggggagaaggtgatgatggtgacatcgagtctgtggaatttccaaagtgtgtggagacatgagaggcacatggtcattatattttgttggctgtaactgtaagcctgtaattgttggttgcaacttgtaagttgcaactgttgctaacctgacatattttgttggctccctgcaactttgtcctgaactcctgaacctgaagtcctgatctataattgttggctgcatcactgcatgtatttggttctagaactgaaactctgaaagtatggaattatggattatggaatggaatggaactattatgaacataa

SEQ ID NO: 75493 - DNA, 957 bp, Zea Mays
acggttccaaaaagctcgcttccgttggcttcactcccaactctttactcgctcactcccccgcgccactgatctctccttccgggaccctaattccgcaggaggccgcgccgggggagtgacgccgatgcagcgccgggtgggcatggcggacggcgaggctaggtgtcggacgctcggcgccgtcatcaaggagaaggatgaggagttcgcgctcttcctcgagatgcgccgacgcgagaaggagcgcggcgctgcggccgccgcggcggaccagcttctgctctccggggacgtcgcggcggagaacgggatgctgctcctcgacccgccgccacccgctgagcccaaaccggcggcgtacaaggtggctggcggcggatttaggagggcgcctgggggagtggacgacttcctcaatgcagacgccagcgacaagaacgattacgactggcttctgacaccaccaggaactccattattctcatctctaaaagttgagccaaaaaggtccctggtgagtcaagctggaacgccaaaggctcgtccaactgccttgaaatcaaggggagaaggtgatgatggtgacatcgagtctgtggaatttccaaagtgtgtggtggcaagtaattaggcacatggtcacatactcacattgaggagatggaggagagggagagataggacccgggagaggagacatgagaggcacatggtcattatattttgttggctgtaactgtaagcctgtaattgttggttgcaacttgtaagttgcaactgttgctaacctgacatattttgttggctccctgcaactttgtcctgaactcctgaacctgaagtcctgatctataattgttggctgcatcactgcatgtatttggttctagaactgaaactctgaaagtatggaattatggattatggaatggaatggaactattatgaacataa

SEQ ID NO: 75494 - DNA, 764 bp, Zea Mays
ccaactctttactcgctcactcccccgcgccactgatctctccttccgggaccctaattccgcaggaggccgcgccgggggagtgacgccgatgcagcgccgggtgggcatggcggacggcgaggctaggtgtcggacgctcggcgccgtcatcaaggagaaggatgaggagttcgcgctcttcctcgagatgcgccgacgcgagaaggagcgcggcgctgcggccgccgcggcggaccagcttctgctctccggggacgtcgcggcggagaacgggatgctgctcctcgacccgccgccacccgctggtgggagcttcatttcggcctcttcttcgggtttcctgcagccgtgagccgttcctttgcattttactcatgtgcttatgaagccctagcttatcgtggtttgaatttttggttctttgtggtcgtagagcccaaaccggcggcgtacaaggtggctggcggcggatttaggagggcgcctgggggagtggacgacttcctcaatgcagacgccagcgacaagaacgattacgactgttagaattcagctggtgttgctgggaaggatgggtcatggacatggtggttgttggaggcttctgacaccaccaggaactccattattctcatctctaaaagttgagccaaaaaggtccctggtgagtcaagctggaacgccaaaggctcgtccaactgccttgaaatcaaggggagaaggtgatgatggtgacatcgagtctgtggaatttccaaagt

SEQ ID NO: 75495 - DNA, 831 bp, Zea Mays
aactctttactcgctcactcccccgcgccactgatctctccttccgggaccctaattccgcaggaggccgcgccgggggagtgacgccgatgcagcgccgggtgggcatggcggacggcgaggctaggtgtcggacgctcggcgccgtcatcaaggagaaggatgaggagttcgcgctcttcctcgagatgcgccgacgcgagaaggagcgcggcgctgcggccgccgcggcggaccagcttctgctctccggggacgtcgcggcggagaacgggatgctgctcctcgacccgccgccacccgctggtgggagcttcatttcggcctcttcttcggagcccaaaccggcggcgtacaaggtggctggcggcggatttaggagggcgcctgggggagtggacgacttcctcaatgcagacgccagcgacaagaacgattacgactgttagaattcagctggtgttgctgggaaggatgggtcatggacatggtggttgttggaggcttctgacaccaccaggaactccattattctcatctctaaaagttgagccaaaaaggtccctggtgagtcaagctggaacgccaaaggctcgtccaactgccttgaaatcaaggcaacttgatgttgtgatggaggaggggcaaggggaggaattggaggttatgttgtcggaatcagatgacagtgagtttgatcatgatgatgagtttccaccgtcaactgatggagatgagttgtcaaaaactgaaaagacaaagagaggaggaaagaggtcaagagctggtattcagttgtccccctccaagtgcaaggcgaatagagtaaag

SEQ ID NO: 75496 - DNA, 1308 bp, Zea Mays
aactctttactcgctcactcccccgcgccactgatctctccttccgggaccctaattccgcaggaggccgcgccgggggagtgacgccgatgcagcgccgggtgggcatggcggacggcgaggctaggtgtcggacgctcggcgccgtcatcaaggagaaggatgaggagttcgcgctcttcctcgagatgcgccgacgcgagaaggagcgcggcgctgcggccgccgcggcggaccagcttctgctctccggggacgtcgcggcggagaacgggatgctgctcctcgacccgccgccacccgctgagcccaaaccggcggcgtacaaggtggctggcggcggatttaggagggcgcctgggggagtggacgacttcctcaatgcagacgccagcgacaagaacgattacgactggtgagtgcttcggcagtagctaccaactttccactaattagctagtatcaaatttctgctttttcggttgtgggcagcatagccattggtgtgacaatgattctagccaaaccacattgtagcattgtgaacttcaattttgttctgctcttttgtcgtttaaggcttcagagaatttggtgaggtgttaagttttaaccattttaaggcttcagggaatttggtgaggttttaacagtgtaatatttagtacgggttccctaaatcttgattcctcattcccaatgctgaatgcaaagctgcaggactgacaaaactgagaactctacagcttcataagtttcaagctaaatcttcattcttcagttgccttgctagaagcggagcgatgagttccatttttctgtaattttgccttctgtgcatacagtctatctgctgtccatgcattgtctgttaagttgacggtgtaccataaagtttgtctttcgtgaaacttgatgttagttagaattcagctggtgttgctgggaaggatgggtcatggacatggtggttgttggaggcttctgacaccaccaggaactccattattctcatctctaaaagttgagccaaaaaggtccctggtgagtcaagctggaacgccaaaggctcgtccaactgccttgaaatcaaggcaacttgatgttgtgatggaggaggggcaaggggaggaattggaggttatgttgtcggaatcagatgacagtgagtttgatcatgatgatgagtttccaccgtcaactgatggagatgagttgtcaaaaactgaaaagacaaagagaggaggaaagaggtcaagagctggtattcagttgtccccctccaagtgcaaggcgaatagagtaaag

SEQ ID NO: 75497 - DNA, 745 bp, Zea Mays
ccaactctttactcgctcactcccccgcgccactgatctctccttccgggaccctaattccgcaggaggccgcgccgggggagtgacgccgatgcagcgccgggtgggcatggcggacggcgaggctaggtgtcggacgctcggcgccgtcatcaaggagaaggatgaggagttcgcgctcttcctcgagatgcgccgacgcgagaaggagcgcggcgctgcggccgccgcggcggaccagcttctgctctccggggacgtcgcggcggagaacgggatgctgctcctcgacccgccgccacccgctgagcccaaaccggcggcgtacaaggtggctggcggcggatttaggagggcgcctgggggagtggacgacttcctcaatgcagacgccagcgacaagaacgattacgactggcttctgacaccaccaggaactccattattctcatctctaaaagttgagccaaaaaggtccctggtgagtcaagctggaacgccaaaggctcgtccaactgccttgaaatcaaggcaacttgatgttgtgatggaggaggggcaaggggaggaattggaggttatgttgtcggaatcagatgacagtgagtttgatcatgatgatgagtttccaccgtcaactgatggagatgagttgtcaaaaactgaaaagacaaagagaggaggaaagaggtcaagagctggtattcagttgtccccctccaagtgcaaggcgaatagagtaaag

SEQ ID NO: 75498 - DNA, 2452 bp, Zea Mays
tttttcaaggagtagactaaataacaggtgtaaactggctaaagttttagaattatgatgcacataaaatcttctaagaactaactgtaacatgttaagattctgaagcttttaggagggaaggcttacaaagtacaggaatggttcgtgtagtgctcatccttttttgcgaaatttggtaggccattgatattttagcgactgaatattagttgcaccaataataaagggctattcatgaatatgtaaaatctagacaaattgaactgaacaaagtaaacctggaacaatgccgcctaaactcgacagcctggtgtccctcaacgtgctgaatctcgcacacaaccagatctcaggtctgattttgatggcggtcacaaaactgagcagtctctatgagctaaatctatcacaattcacaaaattacctgtccggtctgatcccttcggatatcggcaagctataatagtcgcagagtctgctggacttgagcagcaacaatctcagtggacacatccctgaaagtttaaactaaaaagactgaaagcacgaagcaattagtcaagaaaaaagtgtaccactatagaatcggaccaggatggagtcttaaacttttagttaacatgtattaacgctattttttcatcctggtctactaatgcctctattttagttcaacacacattgttgtttgatcaaatgaacagtcaaaattagatgaaggcaaatatatagaaaaaatgcagcaagggaataaatgaatgcatgcatgaattaatgggccataattaaaatagtgggagtgtcgatgtattgtataccacactattcacatatactcctatgtatgtatacatgtttggtaaaaaaattactcttgaaataggtgaacatatacgtttaagaaacctattacgaaaagacggcaacgagataactggagtacaattagtttatataaatttcaagttttagtagaactcataaaggtcaaattgttcataaaatttctattttagataccaagaaagaaaatggagcaggcatgctaaattatattttgtatgtcaatttcgtattgataaattgtagaaagtgctaaaggaaataccttattcgtgtcttgtaggtggatttgcagaactagggttgtggactgctgaagggtttggtttgagcatatgacaccaaatttgtttgatgaggaatgtattaaacacacaatatttgtcatgataaaacagatgttcaaagttaaaagaaaaaagaaaagtttgaagaaccttttcgctagtgattctaatgttcttgaactttcgggagtgttgggtggtaaaacatttgtaccatacgatgaggtttattttaacagttaagtataactgaatataagcttgttctgttaaggttataaattatacctcatgtgacgcttcaacattcgtctttgaattgttttttctactggtttattaacaaaaaataaatgttattaaataggagtatataatagaagcatataatagtgagttgaatagaatgttaatggaaatatacttacctagtgtcgtcgtcgtctgaaaatgtaatagatctagcaacctgcaatataactcaatggatgtaagaaaggagttagagagttacacattaaatgaaatttaagttttttttgtgagaggaatctttcatgggaacgtgcaagtgtatgggaaaatctcataaaatcataaattgcatgaaaatgaagctttatttataaacttacctaaagaagaagtgtgcagcactattaaaaactaggaaataaatgggtgcaactcctcataaattattggtataatccaaaacaaataagtatatgagtgcacatataattagctgagttcacttaaagatgaatttgaaaatacacatttcatcatgcaattcgaatctgtacttgtataaggctgtacaaatgaagtacgtgctctggataacagtccaccttacagaaattcctgcaatgtaaaccaatcacaatgttgatcagctggataagcgggatgcaaatttacagtcactgcacattgttagacatgtgcaacactcaatctttactgatatagagtgaccaatattgcagttcacataaaaaggagcataatcatattgtatggaaaacgaagctttatttataaacttacctatggaaggagtgtatagtacaattagatactgggaagctgaatgggtgcacctcctcgtaaattattggtcatgcaatttgatctgcacttgtatgaggatgtactgatgaagtttgtagattgtagtgtggataacagaccaccttatagaaactcttgcaacgtgaactgatcacaatatcaatcagctggataagtgggttgcaaatttacaattattagtgtgcattattagacatgtacaacatttattctatac

SEQ ID NO: 75499 - DNA, 807 bp, Zea Mays
caaggattcgttcccactcttgttgtaggcatcattcgtgtagtttgcataccggaactgcaggtgaacccactcgactaaattcagtctctgttccatgtcatgtaaacgtgcaatgaaatagtagtaccagtagtattaatatggaagagcaagtagtactaaatactgatcaaaggttgtatcagtgcggtgctcagatagcatgtttggtacatctagtttttaagctggcagatttgagagcttcccatgtgaatgctagatgaaatgcaattgtctgaaagaaaccccacaggttgaaatgtaacaaacctgaaacagcagggagagaaaacgcagactatcaaaggttgtatcagtgcggtgctcagatagcatgtttggtacatctagtttttaagctggcagatttcagagcttcccatgtgaatgctagatgaaatgcaattgtctgaaagaaagcccacaggttgaaatgtaacaaacctgaaacagcagggagagaaaacgccgacctagtcgtcgttggaggggttcggatgaagatctactcctagctctatatgtagtaataatatgcctttctaaagaatttcttaacgcctgagaaagtacagttgttgtctcttctgagttgcctactggtacccataaacaatttgaagcaactaaagagcaaaataacaacatatattacaattgccaaatatgtttaccttgtattttctcaagagaagccgggtgaaggcaactcaatgtttctttttgtttttttggaactttgctttatggactttaaataag

SEQ ID NO: 75500 - DNA, 579 bp, Zea Mays
tttactcatccaaaattcattttcccttaaacttactctttaacgtgtcattaggcttgcagcttcaaatatttgttggtctctctgattacaaggcaaaactgcggagttcctcgtggtggacaagatactttgtccagactggcttaacagagaacgaagggccactgaagaaatttgaagaggctacatcccagaacaaataccaaccagattgtcagatcttccacttaagttcgccaaggtgatgcgcatccagaacaccttgggttgttgtcagttgtcacatcagttctgtaagcagcacctttgcttacccctgttgacttgcgcatctttcgtgcggaggaatggtcacacaaacagagccagccatcagcagtaggttagcttgtgtagagagggagagagagagagagagaggcctcgacacttgttcctagaaaatcgttctggaaattaaattatgtgtaaccaatgactgaaaactggagcccgctgggatatatatgtaagaacttcacgctgttgtactactcagctatgagctatccatggtgtgtcaggtgttcacgctgt

SEQ ID NO: 75501 - DNA, 1404 bp, Zea Mays
actaatcctcatctctcggtcgctaatggcgtgctgatctttccaccgtcgcatacaggcagcaggatgctctttattcccctgtgtcagcttcagcgaagctaatcccattccagtgcccgtaccgcgccgtccctatcgtgccggatcgccacccgctcgctgcgcccccacctccccccctcgccggttcgccacttcgccccacctccgcgcctcagatccatccccaatccggcaaccctagcgccgggttcctcctcctcgtctccgcccgccgccgcctccattgccagaggtgatcgagggggagagatagagcttgggtggtcggattagggagagagagagggaggggaggatgtccagaaggtcggtgaacccgagccggcgggtggcggacgggggcttgccgtccttcggcggcccgttccaccctaagtcacgctcgcctcccgtgctcaccattgccctcgtcgtcctgggtgtcatttttctcattgcctacttcaacagcagcccaggtgtaactgttacgagcaaagagaccgtgaccaggtctgaaggttctccatgtaggccctgatagttgtacagtagtttctaacttgttgaaggaaggaaaggttgaagcatggggagtggagccttatgatttggaggatactgacagtacttgcaaaagactcgtgcgcaagggctttgtccgtatgtctgatattaagttcccccttccataccgtccagattcttttaatcttgttatcgtgtcagatgctttagattatctgaccccaaggtatctgaacaaaacacttcccggtttagcaagggtttccacagatggccttgtgatttttgctggcaatcctggtcaacagaaagctaaggtctcagaactaccaaaatttggaagaccggcaaaactgcggagttcctcgtggtggacaagatactttgtccagactggcttaacagagaacgaagggccactgaagaaatttgaagaggctacatcccagaacaaataccaaccagattgtcagatcttccacttaagttcgccaaggtgatgcgcatccagaacaccttgggttgttgtcagttgtcacatcagttctgtaagcagcacctttgcttacccctgttgacttgcgcatctttcgtgcggaggaatggtcacacaaacagagccagccatcagcagtaggttagcttgtgtagagagggagagagagagagagagaggcctcgacacttgttcctagaaaatcgttctggaaattaaattatgtgtaaccaatgactgaaaactggagcccgctgggatatatatgtaagaacttcacgctgttgtactactcagctatgagctatccatggtgtgtcaggtgttcacgctgt

SEQ ID NO: 75502 - DNA, 2127 bp, Zea Mays
actaatcctcatctctcggtcgctaatggcgtgctgatctttccaccgtcgcatacaggcagcaggatgctctttattcccctgtgtcagcttcagcgaagctaatcccattccagtgcccgtaccgcgccgtccctatcgtgccggatcgccacccgctcgctgcgcccccacctccccccctcgccggttcgccacttcgccccacctccgcgcctcagatccatccccaatccggcaaccctagcgccgggttcctcctcctcgtctccgcccgccgccgcctccattgccagaggtgatcgagggggagagatagagcttgggtggtcggattagggagagagagagggaggggaggatgtccagaaggtcggtgaacccgagccggcgggtggcggacgggggcttgccgtccttcggcggcccgttccaccctaagtcacgctcgcctcccgtgctcaccattgccctcgtcgtcctgggtgtcatttttctcattgcctacttcaacagcagcccaggtgtaactgttacgagcaaagagaccgtgaccaggtctgaaggttcttgcacatcagaagttatgcgggcgcttccatatcttaagaaggcatatggcaatgccatgcaaaaggttctccatgtaggccctgatagttgtacagtagtttctaacttgttgaaggaaggaaaggttgaagcatggggagtggagccttatgatttggaggatactgacagtacttgcaaaagactcgtgcgcaagggctttgtccgtatgtctgatattaagttcccccttccataccgtccagattcttttaatcttgttatcgtgtcagatgctttagattatctgaccccaaggtatctgaacaaaacacttcccggtttagcaagggtttccacagatggccttgtgatttttgctggtatgtgttttttcttgaaatatttatcgccttctctttttatgggaaaccctcattggacctacagataccaatagttgtacctttgtgtggtaaaatatattttatataagtgaccatgtgcacttttttgctatcaccaaatggtgaaatactactgattgtttatattcttttggttgctgttatattctaaacaaaccaccttgtacttgaaatattcctgtagaataatcttagatcttgctgttgtttttccacgtgtctttctttaactttattaagaactcctaaaaaactcgacccttgtattaataactccatcttagctgtgtgtcttgaactaaatggattttcttcccaagtggaaacaaaaagggatcttatggatggaccttaaagaagtatgtgtttctatcttaagataacagatgatgcatggatgatccttaaatatgtgctaatgcaatatcagatgatacaaggaagaaccttgaaagtagtatgtgtttctatcttaagatgacagatttatatctggggtactgcaacatcagatgatactattcggtcaaaaaaaaacacaccagatgatactaacgtcttggagaccaaagtgttatcaacttttaaggtgtgttctctgaagtaggcaatcctggtcaacagaaagctaaggtctcagaactaccaaaatttggaagaccggcaaaactgcggagttcctcgtggtggacaagatactttgtccagactggcttaacagagaacgaagggccactgaagaaatttgaagaggctacatcccagaacaaataccaaccagattgtcagatcttccacttaagttcgccaaggtgatgcgcatccagaacaccttgggttgttgtcagttgtcacatcagttctgtaagcagcacctttgcttacccctgttgacttgcgcatctttcgtgcggaggaatggtcacacaaacagagccagccatcagcagtaggttagcttgtgtagagagggagagagagagagagagaggcctcgacacttgttcctagaaaatcgttctggaaattaaattatgtgtaaccaatgactgaaaactggagcccgctgggatatatatgtaagaacttcacgctgttgtactactcagctatgagctatccatggtgtgtcaggtgttcacgctgt

SEQ ID NO: 75503 - DNA, 2122 bp, Zea Mays
cgggccgcgctccactaatcctcatctctcggtcgctaatggcgtgctgatctttccaccgtcgcatacaggcagcaggatgctctttattcccctgtgtcagcttcagcgaagctaatcccattccagtgcccgtaccgcgccgtccctatcgtgccggatcgccacccgctcgctgcgcccccacctccccccctcgccggttcgccacttcgccccacctccgcgcctcagatccatccccaatccggcaaccctagcgccgggttcctcctcctcgtctccgcccgccgccgcctccattgccagaggtgatcgagggggagagatagagcttgggtggtcggattagggagagagagagggaggggaggatgtccagaaggtcggtgaacccgagccggcgggtggcggacgggggcttgccgtccttcggcggcccgttccaccctaagtcacgctcgcctcccgtgctcaccattgccctcgtcgtcctgggtgtcatttttctcattgcctacttcaacagcagcccaggtgtaactgttacgagcaaagagaccgtgaccaggtctgaaggttcttgcacatcagaagttatgcgggcgcttccatatcttaagaaggcatatggcaatgccatgcaaaaggttctccatgtaggccctgatagttgtacagtagtttctaacttgttgaaggaaggaaaggttgaagcatggggagtggagccttatgatttggaggatactgacagtacttgcaaaagactcgtgcgcaagggctttgtccgtatgtctgatattaagttcccccttccataccgtccagattcttttaatcttgttatcgtgtcagatgctttagattatctgaccccaaggtatctgaacaaaacacttcccggtttagcaagggtttccacagatggccttgtgatttttgctggtatgtgttttttcttgaaatatttatcgccttctctttttatgggaaaccctcattggacctacagataccaatagttgtacctttgtgtggtaaaatatattttatataagtgaccatgtgcacttttttgctatcaccaaatggtgaaatactactgattgtttatattcttttggttgctgttatattctaaacaaaccaccttgtacttgaaatattcctgtagaataatcttagatcttgctgttgtttttccacgtgtctttctttaactttattaagaactcctaaaaaactcgacccttgtattaataactccatcttagctgtgtgtcttgaactaaatggattttcttcccaagtggaaacaaaaagggatcttatggatggaccttaaagaagtatgtgtttctatcttaagataacagatgatgcatggatgatccttaaatatgtgctaatgcaatatcagatgatacaaggaagaaccttgaaagtagtatgtgtttctatcttaagatgacagatttatatctggggtactgcaacatcagatgatactattcggtcaaaaaaaaacacaccagatgatactaacgtcttggagaccaaagtgttatcaacttttaaggcaatcctggtcaacagaaagctaaggtctcagaactaccaaaatttggaagaccggcaaaactgcggagttcctcgtggtggacaagatactttgtccagactggcttaacagagaacgaagggccactgaagaaatttgaagaggctacatcccagaacaaataccaaccagattgtcagatcttccacttaagttcgccaaggtgatgcgcatccagaacaccttgggttgttgtcagttgtcacatcagttctgtaagcagcacctttgcttacccctgttgacttgcgcatctttcgtgcggaggaatggtcacacaaacagagccagccatcagcagtaggttagcttgtgtagagagggagagagagagagagagaggcctcgacacttgttcctagaaaatcgttctggaaattaaattatgtgtaaccaatgactgaaaactggagcccgctgggatatatatgtaagaacttcacgctgttgtactactcagctatgagctatccatggtgtgtcaggtgttcacgctgt

SEQ ID NO: 75504 - DNA, 2439 bp, Zea Mays
ctacgacgcgtcaacgaccgacatccccacgaacaaaatctcctctgaattcgggccgcgctccactaatcctcatctctcggtcgctaatggcgtgctgatctttccaccgtcgcatacaggcagcaggatgctctttattcccctgtgtcagcttcagcgaagctaatcccattccagtgcccgtaccgcgccgtccctatcgtgccggatcgccacccgctcgctgcgcccccacctccccccctcgccggttcgccacttcgccccacctccgcgcctcagatccatccccaatccggcaaccctagcgccgggttcctcctcctcgtctccgcccgccgccgcctccattgccagaggtgatcgagggggagagatagagcttgggtggtcggattagggagagagagagggaggggaggatgtccagaaggtcggtgaacccgagccggcgggtggcggacgggggcttgccgtccttcggcggcccgttccaccctaagtcacgctcgcctcccgtgctcaccattgccctcgtcgtcctgggtgtcatttttctcattgcctacttcaacagcagcccaggtgtaactgttacgagcaaagagaccgtgaccaggtctgaaggttcttgcacatcagaagttatgcgggcgcttccatatcttaagaaggcatatggcaatgccatgcaaaaggttctccatgtaggccctgatagttgtacagtagtttctaacttgttgaaggaaggaaaggttgaagcatggggagtggagccttatgatttggaggatactgacagtacttgcaaaagactcgtgcgcaagggctttgtccgtatgtctgatattaagttcccccttccataccgtccagattcttttaatcttgttatcgtgtcagatgctttagattatctgaccccaaggtatctgaacaaaacacttcccggtttagcaagggtttccacagatggccttgtgatttttgctggtatgtgttttttcttgaaatatttatcgccttctctttttatgggaaaccctcattggacctacagataccaatagttgtacctttgtgtggtaaaatatattttatataagtgaccatgtgcacttttttgctatcaccaaatggtgaaatactactgattgtttatattcttttggttgctgttatattctaaacaaaccaccttgtacttgaaatattcctgtagaataatcttagatcttgctgttgtttttccacgtgtctttctttaactttattaagaactcctaaaaaactcgacccttgtattaataactccatcttagctgtgtgtcttgaactaaatggattttcttcccaagtggaaacaaaaagggatcttatggatggaccttaaagaagtatgtgtttctatcttaagataacagatgatgcatggatgatccttaaatatgtgctaatgcaatatcagatgatacaaggaagaaccttgaaagtagtatgtgtttctatcttaagatgacagatttatatctggggtactgcaacatcagatgatactattcggtcaaaaaaaaacacaccagatgatactaacgtcttggagaccaaagtgttatcaacttttaaggtgtgttctctgaagtaggtaggtacattgattgaactcttgtggtgggtactggagctgaaacttttctgctcaaacagatctatattcttttttgagtagtcattcaaagttggcaatatgctagtaatgtccacctaggccctgaataatgctttactcctgttctttttataccattatcaaatgtttaaacataactttttgtggtatacgtggatggcttagatcatctgagaaatgtttgtttcatttcttctttacaggcaatcctggtcaacagaaagctaaggtctcagaactaccaaaatttggaagaccggcaaaactgcggagttcctcgtggtggacaagatactttgtccagactggcttaacagagaacgaagggccactgaagaaatttgaagaggctacatcccagaacaaataccaaccagattgtcagatcttccacttaagttcgccaaggtgatgcgcatccagaacaccttgggttgttgtcagttgtcacatcagttctgtaagcagcacctttgcttacccctgttgacttgcgcatctttcgtgcggaggaatggtcacacaaacagagccagccatcagcagtaggttagcttgtgtagagagggagagagagagagagagaggcctcgacacttgttcctagaaaatcgttctggaaattaaattatgtgtaaccaatgactgaaaactggagcccgctgggatatatatgtaagaacttcacgctgttgtactactcagctatgagctatccatggtgtgtcaggtgttcacgctgt

SEQ ID NO: 75505 - DNA, 782 bp, Zea Mays
agcctagaaggaaacaggaacagacagctctgaaagactgaaactcacggccatggccatcctgggtgccctcaggctcgcgccgtctccacccgccctcgccggcgccgcgccaccggcgacgtcgccgtatacggctggaggaggaccgtacgggaagcaggtgacgcgggggcaggacctcaccggcaaggacttcagcggccagacactcatcaagcaggacttcaagacgtctatactgaggcaggcgaacttcaaaggcgcgaacctgctcggcgcgagcttcttcgatgcagacctcacaagcgctgatctctctgacgctgatcttagaggcgctgatttgtcgctggcgaatttaacgaaggcaaacttatcaaatgccaacttagaaggggcacttgccactgggaacacttctttcaaaggtgccgacataactggggcagattttaccgatgtgccgctgcgagatgatcaacgggagtacctctgcaaaatcgctgacggagtaaattcaaccactggaaacccaacaaaggagactctgttctgcagctgatcgacggaaggacctgggacttgtgacttattcaacgtcttgataaacttgcatctgctgctgtaagcacgtgaggaatgtaaattgagttatagagggttcctagaaataataactggtaattacgtgtaaatcaaccaacaatataagtgtgtgctgccctttgaatgtgcaaacgattttttattacaactcaaatagttgtggttcttcaagc

SEQ ID NO: 75506 - DNA, 2608 bp, Zea Mays
ctccaagtccaaacccctctcctcccccgcgtcccgcgagctccgtcaccgccgccgctggcgagatgtcatcggtgacccgccctcagcgggaggccgactttgcacgcttcccgtcgtccacccccatcgtcatcgacaacggcgcttctaccttccgcatcgggtgggcgggcgaggcggagccgcgcctttcgttccgcaatgtcgtgcagaggccgcgccaccgcagcactggtgaaactgtctcaattgttggggacactgacccatctctaatgaaattctttgactgcacaagatcggcagttcgctctccatttgacgatgatgttgtctatcagttcgagtacatggaatatattcttgactatggctttgatcgattaggtgtcgattcagaggtgggccatccaattcttatgacagaatgtgaatgtaatccgtccttttctcgagcccgaatgtcagaactacttttcgagacatatggtgtaccatccatagcatttggcattgacaacgcgtttagttataagtacaatcagaaacttggaaactgtaacgaagacgggctggctatttcatgtgaacatggaacttgtcatgttgttccagacaggcctggcgcagtggtgagaagccttcccactgagccaaagtaccattttacattgaacagggcaagtatttcatgggaaaaggctgaagagctgaagaaggaacattgttatatagctcctgattatatggcagagttgcagatatttaaaaagctgatgagaaaatgaggtattggcagctaccatgggtccccccaccaaaggaagaaccaccatctgaggaagaacttgcaaggaaagcagctttgaaggaaaaggctggtcagcgtttgcgagacatggctgctgcaaagagatctcagaagatagtggaactagaaaaacaactttcctatctggaggaactaatggaacaacttgatgaagctgaggaagaagaagcaacagctattctaggtagctctggatatctttcccagcaggaaatcagatctgccattttaaaagcatcacaatctttaaggaaagcaaaaggggagtccaatggcaatgatgagaaaacagatgcctcagcagttgataagtatccacttgtatctgttcctgatgagacactgacgccagaacagttaaaggaaaagaagaaacagatattacttaaaaccacaacagagggcaaattgcgcgcaaagcagaaacgtgctgaagaggaggctttgcgggagaaacaagaagaaaagaggcgtgcggagaacccagagttataccttgaagagcttcgggcccgatattcagaactttctgataaatttgagcagaggaagcgacagaaagttaatggtagtcagacaaatgggaaccatagttcatctgcaggtgtaggccgtggagaaagactaaatgcagctcagaaagaaaggatgcggctgcttgcctcagctgcttttgatcggggcaaaggtgaggacacttttggaatgagagacgaggattggttagtgtacaacaagatgagcaaagacaatgatgatgacagcaatgatgatgatgaatcggaacttgttcgaatttcatcgaagctccaggagattgatcctacatttgtgtccaaatccgaagctgttcaactgactccggagccacccaaagtccggccactaaccgctgaggattacagaattgccattgggatcgagcggttccgttgccctgaagtcctcttccagccaggcatgattggaatcgaccaggccggcatcgatgagatggtcagcatctcactcaggagattaatggaggacgagtctgtgaaggagcgcctctgccagtcgatccttgtcactggcgggagctccctgttccctggcatgatccctcggctggagtctgggatacggcaatatcggccctaccttgctcccctgaagcttgtcggagcagctgaccccattttagacgcgtggaggggtgctgccgcctttgcggcatcaagcaagttcggcaaacaaacgttcagcctagctgattacggagagcatggagagaacctgtttcatcggtacaacattgtttactcactataaccggaaaatgacatagtgatcgaaccatctcagtcaggctatttatttaacagctgatacaaattgatgtagcaacaaagtttttcaaaactgcaattgatatttttatgtgattggaattggagggttcaaatggtgaaggaatttcataaacctataatatgtgtgcctttttttagtcttcccagggcacaacttgtttaagaacaggtgagctgaatcctctataaagctaaggtcactatcgactatatggatggataaaaagaacaaagttgtccatggttacttgcataggggcatttctttttcattttcttttttagtctctattttgttatatctaccattaattaaaaaaaggaacacagtcttatatagggggtatgcctttttattttatttttaaatcttctgtttcttcagggttcctaaatctattttttgttttctttaacacac

SEQ ID NO: 75507 - DNA, 2661 bp, Zea Mays
gttaccaaacgctccaagtccaaacccctctcctcccccgcgtcccgcgagctccgtcaccgccgccgctggcgagatgtcatcggtgacccgccctcagcgggaggccgactttgcacgcttcccgtcgtccacccccatcgtcatcgacaacggcgcttctaccttccgcatcgggtgggcgggcgaggcggagccgcgcctttcgttccgcaatgtcgtgcagaggccgcgccaccgcagcactggtgaaactgtctcaattgttggggacactgacccatctctaatgaaattctttgactgcacaagatcggcagttcgctctccatttgacgatgatgttgtctatcagttcgaattcttgactatggctttgatcgattaggtgtcgattcagaggtgggccatccaattcttatgacagaatgtgaatgtaatccgtccttttctcgagcccgaatgtcagaactacttttcgagacatatggtgtaccatccatagcatttggcattgacaacgcgtttagttataagtacaatcagaaacttggaaactgtaacgaagacgggctggctatttcatgtgaacatggaacttgtcatgttgttccatttttgaaaggacagcctgtgttggggggcttgctgcagaaccaatatcggtggatttcacattactgattttctgaggcagcttctctgtctaaaatatccctatcacacggcaagtatttcatgggaaaaggctgaagagctgaagaaggaacattgttatatagctcctgattatatggcagagttgcagatatttaaaaacaataaggaagaagctgatgagaaaatgaggtattggcagctaccatgggtccccccaccaaaggaagaaccaccatctgaggaagaacttgcaaggaaagcagctttgaaggaaaaggctggtcagcgtttgcgagacatggctgctgcaaagagatctcagaagatagtggaactagaaaaacaactttcctatctggaggaactaatggaacaacttgatgaagctgaggaagaagaagcaacagctattctaggtagctctggatatctttcccagcaggaaatcagatctgccattttaaaagcatcacaatctttaaggaaagcaaaaggggagtccaatggcaatgatgagaaaacagatgcctcagcagttgataagtatccacttgtatctgttcctgatgagacactgacgccagaacagttaaaggaaaagaagaaacagatattacttaaaaccacaacagagggcaaattgcgcgcaaagcagaaacgtgctgaagaggaggctttgcgggagaaacaagaagaaaagaggcggagaacccagagttataccttgaagagcttcgggcccgatattcagaactttctgataaatttgagcagaggaagcgacagaaagttaatggtagtcagacaaatgggaaccatagttcatctgcaggtgtaggccgtggagaaagactaaatgcagctcagaaagaaaggatgcggctgcttgcctcagctgcttttgatcggggcaaaggtgaggacacttttggaatgagagacgaggattggttagtgtacaacaagatgagcaaagacaatgatgatgacagcaatgatgatgatgaatcggaacttgttcgaatttcatcgaagctccaggagattgatcctacatttgtgtccaaatccgaagctgttcaactgactccggagccacccaaagtccggccactaaccgctgaggattacagaattgccattgggatcgagcggttccgttgccctgaagtcctcttccagccaggcatgattggaatcgaccaggccggcatcgatgagatggtcagcatctcactcaggagattaatggaggacgagtctgtgaaggagcgcctctgccagtcgatccttgtcactggcgggagctccctgttccctggcatgatccctcggctggagtctgggatacggcaatatcggccctaccttgctcccctgaagcttgtcggagcagctgaccccattttagacgcgtggaggggtgctgccgcctttgcggcatcaagcaagttcggcaaacaaacgttcagcctagctgattacggagagcatggagagaacctgtttcatcggtacaacattgtttactcactataaccggaaaatgacatagtgatcgaaccatctcagtcaggctatttatttaacagctgatacaaattgatgtagcaacaaagtttttcaaaactgcaattgatatttttatgtgattggaattggagggttcaaatggtgaaggaatttcataaacctataatatgtgtgcctttttttagtcttcccagggcacaacttgtttaagaacaggtgagctgaatcctctataaagctaaggtcactatcgactatatggatggataaaaagaacaaagttgtccatggttacttgcataggggcatttctttttcattttcttttttagtctctattttgttatatctaccattaattaaaaaaaggaacacagtcttatatagggggtatgcctttttattttatttttaaatcttctgtttcttcagggttcctaaatctattttttgttttctttaacacac

SEQ ID NO: 75508 - DNA, 2708 bp, Zea Mays
caaggacaaggttaccaaacgctccaagtccaaacccctctcctcccccgcgtcccgcgagctccgtcaccgccgccgctggcgagatgtcatcggtgacccgccctcagcgggaggccgactttgcacgcttcccgtcgtccacccccatcgtcatcgacaacggcgcttctaccttccgcatcgggtgggcgggcgaggcggagccgcgcctttcgttccgcaatgtcgtgcagaggccgcgccaccgcagcactggtgaaactgtctcaattgttggggacactgacccatctctaatgaaattctttgactgcacaagatcggcagttcgctctccatttgacgatgatgttgtctatcagttcgagtacatggaatatattcttgactatggctttgatcgattaggtgtcgattcagaggtgggccatccaattcttatgacagaatgtgaatgtaatccgtccttttctcgagcccgaatgtcagaactacttttcgagacatatggtgtaccatccatagcatttggcattgacaacgcgtttagttataagtacaatcagaaacttggaaactgtaacgaagacgggctggctatttcatgtgaacatggaacttgtcatgttgttccatttttgaaaggacagcctgtgttggggggcttgctgcagaaccaatatcggtggatttcacattactgattttctgaggcagcttctctgtctaaaatatccctatcacactaccattttacattgaacagggcaagtatttcatgggaaaaggctgaagagctgaagaaggaacattgttatatagctcctgattatatggcagagttgcagatatttaaaaacaataaggaagaagctgatgagaaaatgaggtattggcagctaccatgggtccccccaccaaaggaagaaccaccatctgaggaagaacttgcaaggaaagcagctttgaaggaaaaggctggtcagcgtttgcgagacatggctgctgcaaagagatctcagaagatagtggaactagaaaaacaactttcctatctggaggaactaatggaacaacttgatgaagctgaggaagaagaagcaacagctattctaggtagctctggatatctttcccagcaggaaatcagatctgccattttaaaagcatcacaatctttaaggaaagcaaaaggggagtccaatggcaatgatgagaaaacagatgcctcagcagttgataagtatccacttgtatctgttcctgatgagacactgacgccagaacagttaaaggaaaagaagaaacagatattacttaaaaccacaacagagggcaaattgcgcgcaaagcagaaacgtgctgaagaggaggctttgcgggagaaacaagaagaaaagaggcgtgcggagaacccagagttataccttgaagagcttcgggcccgatattcagaactttctgataaatttgagcagaggaagcgacagaaagttaatggtagtcagacaaatgggaaccatagttcatctgcaggtgtaggccgtggagaaagactaaatgcagctcagaaagaaaggatgcggctgcttgcctcagctgcttttgatcggggcaaaggtgaggacacttttggaatgagagacgaggattggttagtgtacaacaagatgagcaaagacaatgatgatgacagcaatgatgatgatgaatcggaacttgttcgaatttcatcgaagctccaggagattgatcctacatttgtgtccaaatccgaagctgttcaactgactccggagccacccaaagtccggccactaaccgctgaggattacagaattgccattgggatcgagcggttccgttgccctgaagtcctcttccagccaggcatgattggaatcgaccaggccggcatcgatgagatggtcagcatctcactcaggagattaatggaggacgagtctgtgaaggagcgcctctgccagtcgatccttgtcactggcgggagctccctgttccctggcatgatccctcggctggagtctgggatacggcaatatcggccctaccttgctcccctgaagcttgtcggagcagctgaccccattttagacgcgtggaggggtgctgccgcctttgcggcatcaagcaagttcggcaaacaaacgttcagcctagctgattacggagagcatggagagaacctgtttcatcggtacaacattgtttactcactataaccggaaaatgacatagtgatcgaaccatctcagtcaggctatttatttaacagctgatacaaattgatgtagcaacaaagtttttcaaaactgcaattgatatttttatgtgattggaattggagggttcaaatggtgaaggaatttcataaacctataatatgtgtgcctttttttagtcttcccagggcacaacttgtttaagaacaggtgagctgaatcctctataaagctaaggtcactatcgactatatggatggataaaaagaacaaagttgtccatggttacttgcataggggcatttctttttcattttcttttttagtctctattttgttatatctaccattaattaaaaaaaggaacacagtcttatatagggggtatgcctttttattttatttttaaatcttctgtttcttcagggttcctaaatctattttttgttttctttaacacac

SEQ ID NO: 75509 - DNA, 2691 bp, Zea Mays
gtcagcacaaggacaaggttaccaaacgctccaagtccaaacccctctcctcccccgcgtcccgcgagctccgtcaccgccgccgctggcgagatgtcatcggtgacccgccctcagcgggaggccgactttgcacgcttcccgtcgtccacccccatcgtcatcgacaacggcgcttctaccttccgcatcgggtgggcgggcgaggcggagccgcgcctttcgttccgcaatgtcgtgcagaggccgcgccaccgcagcactggtgaaactgtctcaattgttggggacactgacccatctctaatgaaattctttgactgcacaagatcggcagttcgctctccatttgacgatgatgttgtctatcagttcgagtacatggaatatattcttgactatggctttgatcgattaggtgtcgattcagaggtgggccatccaattcttatgacagaatgtgaatgtaatccgtccttttctcgagcccgaatgtcagaactacttttcgagacatatggtgtaccatccatagcatttggcattgacaacgcgtttagttataagtacaatcagaaacttggaaactgtaacgaagacgggctggctatttcatgtgaacatggaacttgtcatgttgttccatttttgaaaggacagcctgtgttggggggcttgctgcagaaccaatatcggtggatttcacattactgattttctgaggcagcttctctgtctaaaatatccctatcacacggcaagtatttcatgggaaaaggctgaagagctgaagaaggaacattgttatatagctcctgattatatggcagagttgcagatatttaaaaacaataaggaagaagctgatgagaaaatgaggtattggcagctaccatgggtccccccaccaaaggaagaaccaccatctgaggaagaacttgcaaggaaagcagctttgaaggaaaaggctggtcagcgtttgcgagacatggctgctgcaaagagatctcagaagatagtggaactagaaaaacaactttcctatctggaggaactaatggaacaacttgatgaagctgaggaagaagaagcaacagctattctaggtagctctggatatctttcccagcaggaaatcagatctgccattttaaaagcatcacaatctttaaggaaagcaaaaggggagtccaatggcaatgatgagaaaacagatgcctcagcagttgataagtatccacttgtatctgttcctgatgagacactgacgccagaacagttaaaggaaaagaagaaacagatattacttaaaaccacaacagagggcaaattgcgcgcaaagcagaaacgtgctgaagaggaggctttgcgggagaaacaagaagaaaagaggcggagaacccagagttataccttgaagagcttcgggcccgatattcagaactttctgataaatttgagcagaggaagcgacagaaagttaatggtagtcagacaaatgggaaccatagttcatctgcaggtgtaggccgtggagaaagactaaatgcagctcagaaagaaaggatgcggctgcttgcctcagctgcttttgatcggggcaaaggtgaggacacttttggaatgagagacgaggattggttagtgtacaacaagatgagcaaagacaatgatgatgacagcaatgatgatgatgaatcggaacttgttcgaatttcatcgaagctccaggagattgatcctacatttgtgtccaaatccgaagctgttcaactgactccggagccacccaaagtccggccactaaccgctgaggattacagaattgccattgggatcgagcggttccgttgccctgaagtcctcttccagccaggcatgattggaatcgaccaggccggcatcgatgagatggtcagcatctcactcaggagattaatggaggacgagtctgtgaaggagcgcctctgccagtcgatccttgtcactggcgggagctccctgttccctggcatgatccctcggctggagtctgggatacggcaatatcggccctaccttgctcccctgaagcttgtcggagcagctgaccccattttagacgcgtggaggggtgctgccgcctttgcggcatcaagcaagttcggcaaacaaacgttcagcctagctgattacggagagcatggagagaacctgtttcatcggtacaacattgtttactcactataaccggaaaatgacatagtgatcgaaccatctcagtcaggctatttatttaacagctgatacaaattgatgtagcaacaaagtttttcaaaactgcaattgatatttttatgtgattggaattggagggttcaaatggtgaaggaatttcataaacctataatatgtgtgcctttttttagtcttcccagggcacaacttgtttaagaacaggtgagctgaatcctctataaagctaaggtcactatcgactatatggatggataaaaagaacaaagttgtccatggttacttgcataggggcatttctttttcattttcttttttagtctctattttgttatatctaccattaattaaaaaaaggaacacagtcttatatagggggtatgcctttttattttatttttaaatcttctgtttcttcagggttcctaaatctattttttgttttctttaacacac

SEQ ID NO: 75510 - DNA, 3410 bp, Zea Mays
agacgactcagcagtcagcacaaggacaaggttaccaaacgctccaagtccaaacccctctcctcccccgcgtcccgcgagctccgtcaccgccgccgctggcgagatgtcatcggtgacccgccctcagcgggaggccgactttgcacgcttcccgtcgtccacccccatcgtcatcgacaacggcgcttctaccttccgcatcgggtgggcgggcgaggcggagccgcgcctttcgttccgcaatgtcgtgcagaggccgcgccaccgcagcactggtgaaactgtctcaattgttggggacactgacccatctctaatgaaattctttgactgcacaagatcggcagttcgctctccatttgacgatgatgttgtctatcagttcgagtacatggaatatgtttgttctcagacaccatccaccagtttttagttctcagtagatatatagatggttctttgttattcatatttaattttgaagatagataaaccagtgatcaatctgtttcatcacccttctgtagaacacattaaaacaactacattattgataaatcacattagacgtttaacgttttaattaggaaaaaaaccactaaagtactaccatggtttttaaagcggtaaggcgagccaaggcgttggaccaccgcctggacgccgaggcgacgcctaggcgaggtaggcgggcaaggcgcctaggtgttggacctccgcctggacgcctaggcgacgccttaagaacagggagtactacatgtgttaactgatattttttatgtccataatccattgttgaaacattatggtaaaagacattgtcaaagcaaaatagtgaaataccccctaaactgttttatattgagtaattgctccattattagccaagtgatcatccatctcatgattcggatggtcccctgtaatggcagtaaatgcaaattgtaatcttacaactcaaagatataaagaaaacatgtgatttcttatttttctggatcataatgtttacactctagggtcgtagggcatattcctttttcccttgcttttgttctttttttttcttgtctgatacagtgttatttatcgatttcagattcttgactatggctttgatcgattaggtgtcgattcagaggtgggccatccaattcttatgacagaatgtgaatgtaatccgtccttttctcgagcccgaatgtcagaactacttttcgagacatatggtgtaccatccatagcatttggcattgacaacgcgtttagttataagtacaatcagaaacttggaaactgtaacgaagacgggctggctatttcatgtgaacatggaacttgtcatgttgttccatttttgaaaggacagcctgtgttggggggcttgctgcagaaccaatatcggtggatttcacattactgattttctgaggcagcttctctgtctaaaatatccctatcacacggcaagtatttcatgggaaaaggctgaagagctgaagaaggaacattgttatatagctcctgattatatggcagagttgcagatatttaaaaacaataaggaagaagctgatgagaaaatgaggtattggcagctaccatgggtccccccaccaaaggaagaaccaccatctgaggaagaacttgcaaggaaagcagctttgaaggaaaaggctggtcagcgtttgcgagacatggctgctgcaaagagatctcagaagatagtggaactagaaaaacaactttcctatctggaggaactaatggaacaacttgatgaagctgaggaagaagaagcaacagctattctaggtagctctggatatctttcccagcaggaaatcagatctgccattttaaaagcatcacaatctttaaggaaagcaaaaggggagtccaatggcaatgatgagaaaacagatgcctcagcagttgataagtatccacttgtatctgttcctgatgagacactgacgccagaacagttaaaggaaaagaagaaacagatattacttaaaaccacaacagagggcaaattgcgcgcaaagcagaaacgtgctgaagaggaggctttgcgggagaaacaagaagaaaagaggcgtgcggagaacccagagttataccttgaagagcttcgggcccgatattcagaactttctgataaatttgagcagaggaagcgacagaaagttaatggtagtcagacaaatgggaaccatagttcatctgcaggtgtaggccgtggagaaagactaaatgcagctcagaaagaaaggatgcggctgcttgcctcagctgcttttgatcggggcaaaggtgaggacacttttggaatgagagacgaggattggttagtgtacaacaagatgagcaaagacaatgatgatgacagcaatgatgatgatgaatcggaacttgttcgaatttcatcgaagctccaggagattgatcctacatttgtgtccaaatccgaagctgttcaactgactccggagccacccaaagtccggccactaaccgctgaggattacagaattgccattgggatcgagcggttccgttgccctgaagtcctcttccagccaggcatgattggaatcgaccaggccggcatcgatgagatggtcagcatctcactcaggagattaatggaggacgagtctgtgaaggagcgcctctgccagtcgatccttgtcactggcgggagctccctgttccctggcatgatccctcggctggagtctgggatacggcaatatcggccctaccttgctcccctgaagcttgtcggagcagctgaccccattttagacgcgtggaggggtgctgccgcctttgcggcatcaagcaagttcggcaaacaaacgttcagcctagctgattacggagagcatggagagaacctgtttcatcggtacaacattgtttactcactataaccggaaaatgacatagtgatcgaaccatctcagtcaggctatttatttaacagctgatacaaattgatgtagcaacaaagtttttcaaaactgcaattgatatttttatgtgattggaattggagggttcaaatggtgaaggaatttcataaacctataatatgtgtgcctttttttagtcttcccagggcacaacttgtttaagaacaggtgagctgaatcctctataaagctaaggtcactatcgactatatggatggataaaaagaacaaagttgtccatggttacttgcataggggcatttctttttcattttcttttttagtctctattttgttatatctaccattaattaaaaaaaggaacacagtcttatatagggggtatgcctttttattttatttttaaatcttctgtttcttcagggttcctaaatctattttttgttttctttaacacac

SEQ ID NO: 75511 - DNA, 2787 bp, Zea Mays
aagcatccgaacggtcccgaagaaagacgactcagcagtcagcacaaggacaaggttaccaaacgctccaagtccaaacccctctcctcccccgcgtcccgcgagctccgtcaccgccgccgctggcgagatgtcatcggtgacccgccctcagcgggaggccgactttgcacgcttcccgtcgtccacccccatcgtcatcgacaacggcgcttctaccttccgcatcgggtgggcgggcgaggcggagccgcgcctttcgttccgcaatgtcgtgcagaggccgcgccaccgcagcactggtgaaactgtctcaattgttggggacactgacccatctctaatgaaattctttgactgcacaagatcggcagttcgctctccatttgacgatgatgttgtctatcagttcgagtacatggaatatattcttgactatggctttgatcgattaggtgtcgattcagaggtgggccatccaattcttatgacagaatgtgaatgtaatccgtccttttctcgagcccgaatgtcagaactacttttcgagacatatggtgtaccatccatagcatttggcattgacaacgcgtttagttataagtacaatcagaaacttggaaactgtaacgaagacgggctggctatttcatgtgaacatggaacttgtcatgttgttccatttttgaaaggacagcctgtgttggggggcttgctgcagaaccaatatcggtggatttcacattactgattttctgaggcagcttctctgtctaaaatatccctatcacacggcaagtatttcatgggaaaaggctgaagagctgaagaaggaacattgttatatagctcctgattatatggcagagttgcagatatttaaaggtgcatagagctttctataggatttgatgaatcgttgtgcttgtacttgtgatgaacaataaggaagaagctgatgagaaaatgaggtattggcagctaccatgggtccccccaccaaaggaagaaccaccatctgaggaagaacttgcaaggaaagcagctttgaaggaaaaggctggtcagcgtttgcgagacatggctgctgcaaagagatctcagaagatagtggaactagaaaaacaactttcctatctggaggaactaatggaacaacttgatgaagctgaggaagaagaagcaacagctattctaggtagctctggatatctttcccagcaggaaatcagatctgccattttaaaagcatcacaatctttaaggaaagcaaaaggggagtccaatggcaatgatgagaaaacagatgcctcagcagttgataagtatccacttgtatctgttcctgatgagacactgacgccagaacagttaaaggaaaagaagaaacagatattacttaaaaccacaacagagggcaaattgcgcgcaaagcagaaacgtgctgaagaggaggctttgcgggagaaacaagaagaaaagaggcgtgcggagaacccagagttataccttgaagagcttcgggcccgatattcagaactttctgataaatttgagcagaggaagcgacagaaagttaatggtagtcagacaaatgggaaccatagttcatctgcaggtgtaggccgtggagaaagactaaatgcagctcagaaagaaaggatgcggctgcttgcctcagctgcttttgatcggggcaaaggtgaggacacttttggaatgagagacgaggattggttagtgtacaacaagatgagcaaagacaatgatgatgacagcaatgatgatgatgaatcggaacttgttcgaatttcatcgaagctccaggagattgatcctacatttgtgtccaaatccgaagctgttcaactgactccggagccacccaaagtccggccactaaccgctgaggattacagaattgccattgggatcgagcggttccgttgccctgaagtcctcttccagccaggcatgattggaatcgaccaggccggcatcgatgagatggtcagcatctcactcaggagattaatggaggacgagtctgtgaaggagcgcctctgccagtcgatccttgtcactggcgggagctccctgttccctggcatgatccctcggctggagtctgggatacggcaatatcggccctaccttgctcccctgaagcttgtcggagcagctgaccccattttagacgcgtggaggggtgctgccgcctttgcggcatcaagcaagttcggcaaacaaacgttcagcctagctgattacggagagcatggagagaacctgtttcatcggtacaacattgtttactcactataaccggaaaatgacatagtgatcgaaccatctcagtcaggctatttatttaacagctgatacaaattgatgtagcaacaaagtttttcaaaactgcaattgatatttttatgtgattggaattggagggttcaaatggtgaaggaatttcataaacctataatatgtgtgcctttttttagtcttcccagggcacaacttgtttaagaacaggtgagctgaatcctctataaagctaaggtcactatcgactatatggatggataaaaagaacaaagttgtccatggttacttgcataggggcatttctttttcattttcttttttagtctctattttgttatatctaccattaattaaaaaaaggaacacagtcttatatagggggtatgcctttttattttatttttaaatcttctgtttcttcagggttcctaaatctattttttgttttctttaacacac

SEQ ID NO: 75512 - DNA, 2809 bp, Zea Mays
ctgtcgtttctcgggatcaccggcaaggcaaggcaaggcaaggcaaggcaagcgaggcgaggcgccgaggccaggtgaagcatccgaacggtcccgaagaaagacgactcagcagtcagcacaaggacaaggttaccaaacgctccaagtccaaacccctctcctcccccgcgtcccgcgagctccgtcaccgccgccgctggcgagatgtcatcggtgacccgccctcagcgggaggccgactttgcacgcttcccgtcgtccacccccatcgtcatcgacaacggcgcttctaccttccgcatcgggtgggcgggcgaggcggagccgcgcctttcgttccgcaatgtcgtgcagaggccgcgccaccgcagcactggtgaaactgtctcaattgttggggacactgacccatctctaatgaaattctttgactgcacaagatcggcagttcgctctccatttgacgatgatgttgtctatcagttcgagtacatggaatatattcttgactatggctttgatcgattaggtgtcgattcagaggtgggccatccaattcttatgacagaatgtgaatgtaatccgtccttttctcgagcccgaatgtcagaactacttttcgagacatatggtgtaccatccatagcatttggcattgacaacgcgtttagttataagtacaatcagaaacttggaaactgtaacgaagacgggctggctatttcatgtgaacatggaacttgtcatgttgttccatttttgaaaggacagcctgtgttggggggcttgctgcagaaccaatatcggtggatttcacattactgattttctgaggcagcttctctgtctaaaatatccctatcacacggcaagtatttcatgggaaaaggctgaagagctgaagaaggaacattgttatatagctcctgattatatggcagagttgcagatatttaaaaacaataaggaagaagctgatgagaaaatgaggtattggcagctaccatgggtccccccaccaaaggaagaaccaccatctgaggaagaacttgcaaggaaagcagctttgaaggaaaaggctggtcagcgtttgcgagacatggctgctgcaaagagatctcagaagatagtggaactagaaaaacaactttcctatctggaggaactaatggaacaacttgatgaagctgaggaagaagaagcaacagctattctaggtagctctggatatctttcccagcaggaaatcagatctgccattttaaaagcatcacaatctttaaggaaagcaaaaggggagtccaatggcaatgatgagaaaacagatgcctcagcagttgataagtatccacttgtatctgttcctgatgagacactgacgccagaacagttaaaggaaaagaagaaacagatattacttaaaaccacaacagagggcaaattgcgcgcaaagcagaaacgtgctgaagaggaggctttgcgggagaaacaagaagaaaagaggcgtgcggagaacccagagttataccttgaagagcttcgggcccgatattcagaactttctgataaatttgagcagaggaagcgacagaaagttaatggtagtcagacaaatgggaaccatagttcatctgcaggtgtaggccgtggagaaagactaaatgcagctcagaaagaaaggatgcggctgcttgcctcagctgcttttgatcggggcaaaggtgaggacacttttggaatgagagacgaggattggttagtgtacaacaagatgagcaaagacaatgatgatgacagcaatgatgatgatgaatcggaacttgttcgaatttcatcgaagctccaggagattgatcctacatttgtgtccaaatccgaagctgttcaactgactccggagccacccaaagtccggccactaaccgctgaggattacagaattgccattgggatcgagcggttccgttgccctgaagtcctcttccagccaggcatgattggaatcgaccaggccggcatcgatgagatggtcagcatctcactcaggagattaatggaggacgagtctgtgaaggagcgcctctgccagtcgatccttgtcactggcgggagctccctgttccctggcatgatccctcggctggagtctgggatacggcaatatcggccctaccttgctcccctgaagcttgtcggagcagctgaccccattttagacgcgtggaggggtgctgccgcctttgcggcatcaagcaagttcggcaaacaaacgttcagcctagctgattacggagagcatggagagaacctgtttcatcggtacaacattgtttactcactataaccggaaaatgacatagtgatcgaaccatctcagtcaggctatttatttaacagctgatacaaattgatgtagcaacaaagtttttcaaaactgcaattgatatttttatgtgattggaattggagggttcaaatggtgaaggaatttcataaacctataatatgtgtgcctttttttagtcttcccagggcacaacttgtttaagaacaggtgagctgaatcctctataaagctaaggtcactatcgactatatggatggataaaaagaacaaagttgtccatggttacttgcataggggcatttctttttcattttcttttttagtctctattttgttatatctaccattaattaaaaaaaggaacacagtcttatatagggggtatgcctttttattttatttttaaatcttctgtttcttcagggttcctaaatctattttttgttttctttaacacac

SEQ ID NO: 75513 - DNA, 365 bp, Zea Mays
gttgtgatggagaacccagagttataccttgaagagcttcgggcccgatattcagaactttctgataaatttgagcagaggaagcgacagaaagttaatggtagtcagacaaatgggaaccatagttcatctgcaggtgtaggccgtggagaaagactaaatgcagctcagaaagaaaggatgcggctgcttgcctcagctgcttttgatcggggcaaaggtgaggacacttttggaatgagagacgaggattggttagtgtacaacaagatgagcaaagacaatgatgatgacagcaatgatgatgatgaatcggaacttgttcgaatttcatcgaagctccaggtaccatttgatgttccacg

SEQ ID NO: 75514 - DNA, 1771 bp, Zea Mays
gaaagacgactcagcagtcagcacaaggacaaggttaccaaacgctccaagtccaaacccctctcctcccccgcgtcccgcgagctccgtcaccgccgccgctggcgagatgtcatcggtgacccgccctcagcgggaggccgactttgcacgcttcccgtcgtccacccccatcgtcatcgacaacggcgcttctaccttccgcatcgggtgggcgggcgaggcggagccgcgcctttcgttccgcaatgtcgtgcagaggccgcgccaccgcagcactggtgaaactgtctcaattgttggggacactgacccatctctaatgaaattctttgactgcacaagatcggcagttcgctctccatttgacgatgatgttgtctatcagttcgagtacatggaatatattcttgactatggctttgatcgattaggtgtcgattcagaggtgggccatccaattcttatgacagaatgtgaatgtaatccgtccttttctcgagcccgaatgtcagaactacttttcgagacatatggtgtaccatccatagcatttggcattgacaacgcgtttagttataagtacaatcagaaacttggaaactgtaacgaagacgggctggctatttcatgtgaacatggaacttgtcatgttgttccatttttgaaaggacagcctgtgttggggggcttgctgcagaaccaatatcggtggatttcacattactgattttctgaggcagcttctctgtctaaaatatccctatcacacggcaagtatttcatgggaaaaggctgaagagctgaagaaggaacattgttatatagctcctgattatatggcagagttgcagatatttaaaaacaataaggaagaagctgatgagaaaatgaggtattggcagctaccatgggtccccccaccaaaggaagaaccaccatctgaggaagaacttgcaaggaaagcagctttgaaggaaaaggctggtcagcgtttgcgagacatggctgctgcaaagagatctcagaagatagtggaactagaaaaacaactttcctatctggaggaactaatggaacaacttgatgaagctgaggaagaagaagcaacagctattctaggtagctctggatatctttcccagcaggaaatcagatctgccattttaaaagcatcacaatctttaaggaaagcaaaaggggagtccaatggcaatgatgagaaaacagatgcctcagcagttgataagtatccacttgtatctgttcctgatgagacactgacgccagaacagttaaaggaaaagaagaaacagatattacttaaaaccacaacagagggcaaattgcgcgcaaagcagaaacgtgctgaagaggaggctttgcgggagaaacaagaagaaaagaggcgtgcggagaacccagagttataccttgaagagcttcgggcccgatattcagaactttctgataaatttgagcagaggaagcgacagaaagttaatggtagtcagacaaatgggaaccatagttcatctgcaggtgtaggccgtggagaaagactaaatgcagctcagaaagaaaggatgcggctgcttgcctcagctgcttttgatcggggcaaaggtgaggacacttttggaatgagagacgaggattggttagtgtacaacaagatgagcaaagacaatgatgatgacagcaatgatgatgatgaatcggaacttgttcgaatttcatcgaagctccaggtaccatttgatgttccacg

SEQ ID NO: 75515 - DNA, 2749 bp, Zea Mays
atttaataatttgctaaatctgagttttttagtaaccagggtagatatgatagtaaagattgttcagctcgacgcaaacgacaaaaccatcttgaaaatggcagaaagaaaaaattcagaaggagccctcgaatcccggtcctaggaaccgtctgtcaacgcggtcggggtacttgagtgcctttttcttctctcacgtgcgcccctaaaccccagtgtgctgtgctaatggggatcgaacgccctgcgcttaaatcctcgggtagaactctcgcctcttccgactccgccataccaccaatagatccagctatggcggtgtagtcgaattcaatcctgtgcgagaaaacacgaaatcgccgctggctcgatattggccagggctttctccgcccaactgcatcttgcagcgactgtgctccagttcgggggaaaaaaaggaaccgtatctgcttgaatccctgcgctccggggcggggatggatcttgacctggacgactacgtggacccctacgaggaggccgaggccgaggctgccgcggcggaggacggctccgacgaccccgacgaggacgactcggatgcggagagcgactacgaggaggagtcgtttggcctcctcaagtccggcaagcaccgggtgcgcaacccggacggcaccttccgctgccccttctgccccggcaagaagaagcaggggtacaagataaaggacctcctccagcacgccgacggcatcggcgtctccagcaagcaccgccgtcacggccgcgagcgcgcgaaccaccgcgccttcgcgcgctttgtccgcaccgagccgtcatttgcggaagacctcgtcggtatcactggcattcaaggtgccattaaacccacccctgctaatagagatggcagtaccaatggcgacgggaaggccaaggctaatgtagatactgctggatccagttctgtggcggcgaaagtgggtctgccgcgggaggttgagaggttttcttggccgtgggcttgtgtccttgcggctggggcagggttcaatactgaggactttgctggtagagtagccatgtttagttcggttgaggttgtgcctttgtttgtcgatgaggtcgaagtcgcagaaacctttgcagttgtgaggtttaccaatgattggagcggattcagcgacgctcttacgctggagaaccatttcagcatcaataagctagggaagaaggaatttgagatgagagataatggtataggttccgtggagggagatggtggcgaaggtgaggtcaaggtttatgggtgggttgcccgagctgaggattatgattcgccgagtgtggtagggagattcttgagaaagcacaccgtcctgaaaacaatagacgaggtttccaagactgaattagagaaatcaggggagatggtggcaatactggcatccaagatcgaggaaaagaaccgacacttgcaggatttggaaacaaagaagaatgcgacagaactctccatctcaaggcttgaggaggacaacaggaaactacatgaggcatataatgaaggcaaaatacgataacagtgaacttgagctagcaagtatagagcagcagagggctgatgcagatgttctgaagctattggctgaccaggagagggaaaaggaagatgtacttgctagaatgcttcaactagaaaaagagctgcatgagaagcagcagcttgagctcgaagtagaacggttgaatggtacactccaagtgatgaaacatttagagggagatgatgacgggggagatatccatgagaagatggagaagctgagcgaaagatttgagcgtgaaaagaagcgtctggaggaattgagtggggatctcgtgaggaaggagcgtgaaagtaatgatgagctacaagaagcccgaaaagaactgataaagggtttggaggaagagctaaatggacggacagctatcggggtcaaaagaatgggggaactcgatgaaaagcctttccaaaatgcatgtaaaacaaaatacggaaaggatgagtacgagatcaaagcagcagagctagtcacaagttggcaggatgaactaaagaagccatcctggcatccttttaagatggttgaggttaacggagaaaataaggaaattctggatgacgatgacacaaaactgaagttcctgtggatcgagtacggcgatgatgtgtgcaatgcggtgaagaccgcactgatggagattaacgagtataaccctagcgggaggtatgttgtgccggagctctggaactttaggaaaggccggaaggcgacggtgaaggaggtgctcaagtacctgttcagtcagatggacacgacgacgaagcgcaggaggggctgaggaggtgcctgatgccgagtagtgccttctatgttgttgcatcagtcgtgtgctgctcgatccccaagtggcagtctggcataggagatgcccctcttgtgtagtgaaatctggcacgataaagtgcccgcgatccaggcttgggtatgccttatgcatcatgttcatatgcttgtgcatgtggtgctgttgccgcaggcgccctagcctaacctgtatgattgttgagatgagtagtctttcttgctgctgttactcccttcgcccctcaatgtctctgaataaatcaattcctaaagttatcataaaatcgagcttttttaatcagactttttaaagtttaactgaacttatagaaaagagtcaggatttatga

SEQ ID NO: 75516 - DNA, 1554 bp, Zea Mays
ccaggctccagcgcagagcaaatcgtaaaagcccttcataagtttcgtgatgcatgttgtctgtaggagcagaggagttcgatatccaacttttggagacccattctcgtttgctgcacgaattaaccttacgtttcttgtcatggagctcggggcttgctcaatctgagcataggttggagctcctcgcgaattgagtactcattggcagtaatggaaccacagatcaggttgagaagattgtcaaaaccctgaatgaaggaaatgttccctcttcagatgttgttgaggtcgttgtcagtcctccttatgtgttcctcccggtggtcaagagccagctgcgccaagagttccaagttgctgctcagaactgctgggtgaagaagggaggtgcattcaccggtgaaattagtgctgagatgctcgtcaaccttggcgttccctgggtcattcttggacactctgaaaggagagctctgctgggagaatcaaatgagtttgttggagacaaggttgcttttgctctgtctcagggactaaaggtcattgcatgtgttggtgagacccttgaggagagggaggctggttcaaccatggatgttgttgctgcacaaacaaaagcaattgctgagaagatcaaggactggagcaacgttgttcttgcctatgaaccagtctgggctattggaactggcaaagtcgccaccccagctcaggctcaggaagtgcacgcctccctgagggattgggtaaagatcaatgtcagccctgaggtctctgaatctacaaggatcatctatggaggttcagtaactgctgcgaactgcaaagagctggcagcacagcctgatgtcgatggtttccttgtgggcggtgcttctttgaagcccgagttcatcgacatcatcaacgccgccgccgtgtgaagtccgctgaagatgttccaacccttcaccctgttgcggtgatgtgctgaagacagatcagactatttttttgtttaaccgtgcagtgctatgtaagctactaactttgcgctggtgcggatgctgatttccctccccctagctttttgtgaggctactctacagcttgattcagcttgctaataatgtttgcctctggacatagcgatagtggtgtttgtgtagccttttttttgtgtgtgtgaattacgatggatccgtcttcgcccgacgcccttttgtggcactagtctacaacgtctacacaaatttgtgagacattgtttgggcattttagtttgtgagactagtttgggcctttgttgtgcccacagccccacattggtcgaatgctgccaagattgtactgatcgttgatgccctgtacggattaacctggtctccgaatgcaatcgttgcacggaggcaggcagccaattattgtacgatatgcgatatcctcagccataggacgctaggatccctgccaagcactcgtatttgcactatggccgcgattatttggggttcggcctattcggttctatactaaggtgttaaaaatgccacacattttatgccaactgtg

SEQ ID NO: 75517 - DNA, 1582 bp, Zea Mays
cttttttaaggtaaaacgtacaagaaaattccatgtggcagtaggggccacatgtcatcgtgaatactggccggcaggcctcatgtctcacatgagaggccacaaacctcactccgcctgtgttatcatttgcaccttctcttccttcctcttcctctgcaagaagccaaatacaatttagaagcgcccttcctcctctcccccatccgtacccaatctaatcgacacccggccgagatgggccgcaagttcttcgttggtggcaactggaaatgcaatggaaccacagatcaggttgagaagattgtcaaaaccctgaatgaaggaaatgttccctcttcagatgttgttgaggtcgttgtcagtcctccttatgtgttcctcccggtggtcaagagccagctgcgccaagagttccaagttgctgctcagaactgctgggtgaagaagggaggtgcattcaccggtgaaattagtgctgagatgctcgtcaaccttggcgttccctgggtcattcttggacactctgaaaggagagctctgctgggagaatcaaatgagggactaaaggtcattgcatgtgttggtgagacccttgaggagagggaggctggttcaaccatggatgttgttgctgcacaaacaaaagcaattgctgagaagatcaaggactggagcaacgttgttcttgcctatgaaccagtctgggctattggaactggcaaagtcgccaccccagctcaggctcaggaagtgcacgcctccctgagggattgggtaaagatcaatgtcagccctgaggtctctgaatctacaaggatcatctatggaggttcagtaactgctgcgaactgcaaagagctggcagcacagcctgatgtcgatggtttccttgtgggcggtgcttctttgaagcccgagttcatcgacatcatcaacgccgccgccgtgtgaagtccgctgaagatgttccaacccttcaccctgttgcggtgatgtgctgaagacagatcagactatttttttgtttaaccgtgcagtgctatgtaagctactaactttgcgctggtgcggatgctgatttccctccccctagctttttgtgaggctactctacagcttgattcagcttgctaataatgtttgcctctggacatagcgatagtggtgtttgtgtagccttttttttgtgtgtgtgaattacgatggatccgtcttcgcccgacgcccttttgtggcactagtctacaacgtctacacaaatttgtgagacattgtttgggcattttagtttgtgagactagtttgggcctttgttgtgcccacagccccacattggtcgaatgctgccaagattgtactgatcgttgatgccctgtacggattaacctggtctccgaatgcaatcgttgcacggaggcaggcagccaattattgtacgatatgcgatatcctcagccataggacgctaggatccctgccaagcactcgtatttgcactatggccgcgattatttggggttcggcctattcggttctatactaaggtgttaaaaatgccacacattttatgccaactgtg

SEQ ID NO: 75518 - DNA, 2574 bp, Zea Mays
gaagttttcaacaactactacccgccacccggacattcaggcaaagcccgccacggaccgcaatttaacggaaaacaccttgcatttgctctccctcgcttcgcggatccccaaaccccagagtctccgaccctcgattccgaaacctaccggatttgcggctgctggagtcgccgtcgtcgtgggaaaccgatcaggtggcaagtaaagcacaagggtggactgtgtggtgctcataaggaacaaccctcttcttttctggcgggagaataccaaatggcccagctgttgcaccatcaggattctgggttctatgacaaggaattacatgggtgccgatggggtattcttcaattctttggatttcgccgtcgccagcggtccgcaaagatgcaacctgacaagaaacatggtccggagaaaaacagtcgtggaagtagacgccgaagccgctcctatgctccattgaaaaacgaagacagtgaaattttggatgatgacaaaaatactgaggttacaaaaaaacagaaggcctcccaaaaaaattctggcaaggctagtttgaggtccttgattctaaggaaattatatggaaaggaaggtcaggaagaaaagatgcttccagttgcaccaaagctactccgcactatttcggtatgtagcatcccagatggttgtggtagtgattccagttcttcacttcttttaaagacagacgacatctccatgaagcgaaagagccaccgtagcatttcaatggacggggttcttcacaaggtcccttatgggaagaaggtgtctggagatgtgatcagtgaaggtctcccccgatcagcctctgcgacgtatgatagggatggtgtgaaaccttactttggtactgctacaaagaggcatgtaaaccaaggttttcggcgttcacgttccctcagtgaatcttgggaaagttactcacgcttacttgattccatctcaagcaatgaatctaaaagagtactgacaagctctaagtctactagggttcattccccagatggccctagtgtgattgcttcactgcaaagaacttctgaagccttcaggtcccaaggtttggataaacgtgatgaaaatcttgtaactgcagaagatgcatcggcaccacattttgaagagaaaactgacgtcgatgtagatgtggaagttgctaagggtgagagctcaagcgatacggttcctggtggctctgagaatcctcctttacctgacgagtacgttgatcacaaaagtgaagaagacacatgcactgctccttcaccttcagaagctgttgatgtttcagaagaacagacagtaagttgtgatgataacaatcaggttccctcatctgaggtcaagctgtatggcgactgttcaacatcatcaggaattgacatcccagaagaacatgcagagatttatgacgataaccaaatccactcatcaacacaggctgattcatatacttctctatcttcaaagggcatcaccatttcagaagagcacacttcaacttctcatgaaaaccaaatgcacccattccagatttcaaaacccatagaaggtaccttttgtgctccttaccccggtggcgagtttgaagcagacataagtctaagctgtgaacaagaaactgaaagcccaatgtctattcttcacgtggccttctcagatgatcctgatagtccggtgaaacacaccccgctggatgatacgttgttgaacccaagaattctccatttagataatgctgatgcttcagctggcactgctgccatacaaaaaggcgattttgacggtctccaagtagatccaaggcatgaaattgagttcaaccatgtgaaggatatattcaagaagtcaagtttcagcaatgagatactgtttgatgaatggtgttcacagaacatcacagctctccaagaggtggattgccagcactacgaggccgccgcagcatcatttgacttcacggacatgtctgctgatcagctacttctgttcgacctgacaaacgaaggtctgctggacatctacaagaaatactctgtttccgagtccagattctcctggttctcctcttttgaccgaccaaaacctgtcggaaaccgtgtcctcaaggagctgtggtctggattgagctgtcatctggatgaacggccacggtccagcatcgaagtcgacacgattttgtcgaatgacctagtagccaggagcgacccctggacgactttttcgggagatgctgatcatgtggggaacaagttggtagactttgtatttgacaagcttctgactgagctcgttcttcagcttgcagagttttgagtttcaggcatttatttttgtccttttctctgcgtttattaggagttctacattgtgcaaaggcatgggatcattctgatgtacatagtacaaaattccttttgtttttcctttgagcataaggtgatctggggattagtgttgttaggtcctcctaggataggaattcagttgatgcactggtataaatgaatggaagagagagcaacatttttactccactttttg

SEQ ID NO: 75519 - DNA, 1258 bp, Zea Mays
ctgcagtgcagcccatgcttgtgtgatgtcgcagctaagaagtattatccttctaggcagcggctcaccctcccccttcaacctggaaaaggcgggaagccagttgtcctcagtccgaaggccagcctgctagaatactgcgagaagggttctgggtcactgacagtggtcttcaaagatttagggccacaggtctactacagcacactgttcttcttcgagtacctgggtcctctcatcatctaccccatgttctactatctgcccgtctacaagtacttcgggcacgagggggagcgggccatgcaccctgtccagacctacgcaatgtactactggtgcttccactacttcaagcggatcatggagacgttcttcgtgcaccgcttcagccacgcgacgtcgccgctctcgaacgtcttcaggaactgtgcctactactggaccttcggcgcttacattgcttactactgcaaccacccgctgtacaccccagtgagtgatctgcagatgaagattgggtttggttttggggtcgtctgccaggtcgcgaacttctactgccacatcctgctgcggaacctcaggagcccaagcggcagcggcgggtaccagatcccccgcggtttcttgttcaacatcgtgacctgcgccaattacaccaccgagatctaccagtgggtcggcttcaacatcgccacacagaccgtggcaggttacgtcttccttgtcgtggcggcgggcatcatgaccaactgggcgctcggcaagcacagccgtctgaagaagctgtttgacggcaaggatgggaggcccaagtaccctcgccggtgggtgattctccctccgttcctgtgaagaggcggtggtggtggctcactgttggtggtcggcccattgtgattcgatgtctacagacagttgtactgtactaatcgtgcctgtttagcggttgaacttggattccgttgtccgaagtttctaatccgaaagatggatttcattttcttcttcttcttcttagcattatgtcactgtctcacgtcgtcctgtctcaatacagtctaaggttcatgtgatgttatccccatttgtccacgcagaagtgaagtgaatgcagtcactatttcgattcgacactttttctgctgtcgtgtcctatgaccctgcttatctcatctgaggcttgtgatgcttgaactggacgttcagtcactaaacccttatgcagtcgctatgattgatttctagatggtac

SEQ ID NO: 75520 - DNA, 2715 bp, Zea Mays
aaaataggcttttttcggtggtctctgtagaagcgccaaaatgtatgctttatttttggtggcttacttagccgccgaaaattactggttttcggcggccggcctatagccgccgaaaatgatgaacagtcttcttgtgtgtatccttcttggttcttgttattcatgacaagtgactaccccattcacataaaccttttaatttctttcgtatcaggagacaattcgacgaaactagacctcatgtgaaaagcagagcatcaacacggaaacccaaaaggctttaattcatttgtacaaaaaaaggtatccacttatgcatgttagtgttcctgtccaatatacacgttgggcaattgcgcactttaaagattaaattaattcctacaacaaatgataattgaacaaaaaataaatcatatgtggcgaaaaacatcatatctatccatgtagcagattaagtggagtgtttggtttaataaatcacttaatctaacatgaggaggtgcatcatgagtctattcgtcaaatttggtatgatgatcatattcctcatattaatactaactaactaactatgagaaatgagatgatgatggatcaactcattctattccataaaccaaacaaaaaaagtgaggagtgggaagatgatgcactaacttatttcttaaaccaaacactctacaaatctacatcaatcgctagaagaaaactcattgtttcttatagtggagaccactgtagcatggtcagtggtgagtacgaagcaaaatgattgatgaagaccgtgcaacattacagtgtatatcaattctgtttaccgaggtttcaatgataatgctctccttagttaatgtatggtattttttgacgaagtacagtcttaccatagacatagcagaagatatcttccatgtttaccttcttcttttcttagttgatggtcaatgtgacatatgtctttttccttctttttcctagcctaccatacgacattagcactggattgtgtcttatggtccttagatacaccatcatttgtcggtttttcaacatcaagaaaatctaacaagttctcaacaaatatgttttcctcttgtgtttaagagccgtgacgaaattccttttaagctataggtaatttggcaatgagatatcccttgccacagatgaatcaggcaagacacacaccattaatgagttgtatctgttgggtgtgtcctctacagctggtcaacagtgaccggattgggctaaacccaactatctatctctttaaatgggcccttgattgggagggcccacgctaacctcggttggagcccccagacacacgacgctatatataggactaaggggtcgcaggaaagactaacgctagtacctcgccccaaaaccacagtccccagaggccccatcgcctaggcgtcggagtgtttggaatcgcgacagcctacagcagctcggatcccgatgccaacaacaaagctaagaagtattatccttctaggcagcggctcaccctcccccttcaacctggaaaaggcgggaagccagttgtcctcagtccgaaggccagcctgctagaatactgcgagaagggttctgggtcactgacagtggtcttcaaagatttagggccacaggtctactacagcacactgttcttcttcgagtacctgggtcctctcatcatctaccccatgttctactatctgcccgtctacaagtacttcgggcacgagggggagcgggccatgcaccctgtccagacctacgcaatgtactactggtgcttccactacttcaagcggatcatggagacgttcttcgtgcaccgcttcagccacgcgacgtcgccgctctcgaacgtcttcaggaactgtgcctactactggaccttcggcgcttacattgcttactactgcaaccacccgctgtacaccccagtgagtgatctgcagatgaagattgggtttggttttggggtcgtctgccaggtcgcgaacttctactgccacatcctgctgcggaacctcaggagcccaagcggcagcggcgggtaccagatcccccgcggtttcttgttcaacatcgtgacctgcgccaattacaccaccgagatctaccagtgggtcggcttcaacatcgccacacagaccgtggcaggttacgtcttccttgtcgtggcggcgggcatcatgaccaactgggcgctcggcaagcacagccgtctgaagaagctgtttgacggcaaggatgggaggcccaagtaccctcgccggtgggtgattctccctccgttcctgtgaagaggcggtggtggtggctcactgttggtggtcggcccattgtgattcgatgtctacagacagttgtactgtactaatcgtgcctgtttagcggttgaacttggattccgttgtccgaagtttctaatccgaaagatggatttcattttcttcttcttcttcttagcattatgtcactgtctcacgtcgtcctgtctcaatacagtctaaggttcatgtgatgttatccccatttgtccacgcagaagtgaagtgaatgcagtcactatttcgattcgacactttttctgctgtcgtgtcctatgaccctgcttatctcatctgaggcttgtgatgcttgaactggacgttcagtcactaaacccttatgcagtcgctatgattgatttctagatggtac

SEQ ID NO: 75521 - DNA, 209 bp, Zea Mays
cttttacatccacggcctagatggcagaacagattagaaaaggtacagaaaatcatcacagaaaaaaataacagaaataacgcaagatctcggatctacgttttatcaactcataactcgatcccgaatattacattagatccatttcttacattcattcacagtggaggattcgagtaaatgaggactagatccgagttcaaaggttg

SEQ ID NO: 75522 - DNA, 3738 bp, Zea Mays
gtaaatattattattattctatttcttctttttattgcttatttgaacaagaataagttacaagtgtaccttcggtttgaaggagaaaagtacaggcgtgacgcaaaagtgaatgcccagtcagcgtgaacagtacggggatactattcacctatttatagacacgggtcacagcccatgcaaaattacattaataccctttacatttatcaataactctatgataattcttcgaggtctaatatggtttttcatctttaagtcggtttccttttccgccgctgtcccgaagctcttctacacgcagcttcggctttgcgccaaccttcgtgttctttgtgcttcttcataccgtggctctgatccgagtccgaagatacctgttaatgtactttactccagaaacattgttaaatcatgtttttgaggtccttcggaagccgaaggcccccaacagtgacgttcacaacgacaagaaggattgaatttgatggttttcattatccattgaacttgctttgcaatacaacattctatatcttaggttacataaggtacatcgctagaatagaaaatatatgataagaaagacacgtcaaagagtaatgccaaaactaattaaaagatgtggatcaacaaaaaggaccgcatgttttttataccaaagatgtcggcacaaatggtgtaagatgattaagatatattttttttatcgtctaagactctttatttggtactttttctagcatcaatttttacatattgtttgagcttttaaaacgatatcgttatatatgttttctttgaaactatgctacatgtaatactctacggctagtaagatttttagccttatatgggttatccttggcataacataacatgtttatggatccggagacaagggggcgagcaataaaatttactatatatttataatgacacaatatgaaatatagatttttttgttaaaataaatttgtatccaagtaaaaaaaatcacatattttaagcataaaatttgtcgcaaatttcagcccaaagttgtcagtggatagttgatgtgcacgtcaaattttgtgcttcaccttgaatatataaccatctaaaaccaaatacattatgatcacttgtcgatttgataaaaagtcttgtcaaattgtgtaaaaatttcatatataaaatagtttatggattattaaggttaatggacactcttctggtctcaactgcaatcacgaagagagccttttagctacaaaacttatgaagacacatctacgaaataaatggaagattattttgtgtgaagttacttcataatctatattcatatggaattgatagctataatcaactctcgtgatataatcaaagcttttaatttgaatgatcatcgtaaaagcaaattaattgacctttgttggagttaattaatatacaattatatggtgtaagtctttttttattaatttattatctatgctatacgtaaattagtatgcacatgtttatatattctataatatttttttatcttataatatttgatgaattgttcgaccccttttatactataatcctggctccgctcctggctgccgtagatgactagtcaatttgttattgaattggctagtttttttttaacgaagacaatcggagccgagtgggctaatgaatttcatttctttaaaatctaaatggattcgacgttcgatcctggtaaatgcatgtaggtccccaccactttgacaatgcaggcgcacacctatatatttagagcagctcgcataccatcttggagcgcagcggaccctctccgtctccgcacacccagtcaatcacccagtcagtctcagtcaatactcgacgccggctgacatggtaaagcaccgagacccagtgaacctgctggtgctgtccgcctccatgtgcctgctttggactctcgcggcggccacacaggccaacgacgaggccgcacttgacgccatcaaggtcgcggcggtccatggcgggcctggcggctatggagacgtacttgcctcgtggaacggtagcgcaggcggcggcggcgggtactgcagctgggaaggggtgaggtgccgaggcagcggcaggcggcgtcgagtggtggcgctgttcctaccctctcgcgggctcaccggcgtcctctccccggcggttggtaacctttcgtccctgaggcttctcaacctgagctccaacgccctcagcggcgccatccccgcgagcctcggccgcctgcgccacctccgtgcgcttgacctaagctacaacgccttctccggacatgagtgcccgggtcggagactttggcatatcaaggatccttccagagattgcaagaagtaacaccctgcagaattcaagcagcacagctggaataagaggctccatcggctacgttgctccagagtacggtgaagggtcttgtgtttcgactcttggagatgtttatagcgtgggcatactgttgcttgagatgttcacgggaaggagcccaactgatgagatgttcagaggatcattggacttgcacaggttttcagaggatgctctcccagagagaatctgggagatagccgatgcaaaaatgtggttgcacacaaacaccaaccatgtcgccacagctgaaactgagaactgcttggtttctgtcgtcgctctcggagtttcttgctcaaagaagcagccaagagagaggacgccgatacaggtcgcagccatccaaatgcatgatatcagagattcctactgcaagtttgccagatctcttgtcacagaactcgagtagcagaaacatctcttgcttaaaatacgcttcagctgaatcatcttactgttagttaataaatcttgtgcttagtagttcagttagttgctacgcaaattattatgaaggaatctaagtgaaaaacataatacatcactcctttctgtggagattgttcattaagttagatgagtgactcaaaatcattgtcactcctttaacagtctgcatatgtttacatttgaagcaccggaatagcaaaacaacaatgtccatgccggagtcgataaatcacggcttcttccgcattcttaaacttccacaccgcaaatgatgcctaaacctactgcatctaggtaactgtgtaagaagcctgagaccgtgtatacggctttgttttggtactctaatctatatgtactgagagtgaatactagagtacccaaaagtggaaatgtgtgtacgaacatagtgttccaattttgtagccctacagaatcacatttcagcgcactggcaaacgagtgtttgaagtagcaaaaacagtaacacatggacctcatagagaacaagccgtttttatttaggttctagataaaaatatccatatccttgtttaatctaataaataaaactttgccattccacattaaaaggtgtagaatttaagtgctcccaccacatttgtttgtttcttgcgcaacacattaaataaatttggatatcggtacgcaccttgaactcccaatttcacctgctaggaaaacgttttcacagctgactgatgatctgatcacaaagagtaatcagtcggatagggaaaaatcgctctctcagtattatattaagaaaaaactgaaacaatggtcctatgcgaaaaaattccaaaaccccgtctaatctgcaacagaccaaccggagagtggtgcataagacat

SEQ ID NO: 75523 - DNA, 1053 bp, Zea Mays
atggcgtctctcctcttggtcccgcgcctcacccggagcccatgttccaacccaggacccagtgccggtcacaagcctaggcccgtgtccatcacctgcgggccgcgcgacaaccgcgggcccctccagcgcggccgctccctctccacggaggccatcctggcgatccaatccctgaagcgcctcacctccgccgaccgctcgccggcggctgcctcggccgcagcagccaccgccctgggccgcctcctcaaggccgacctcgtggccgccatggccgagctccagcggcagggccactggtccctcgccctcgccgcgctccacatcgcccgcgccgagccctggtaccgcccagacccggcgctgtacgccaccttcgtgtcctccgcgccgcactcgccctccggcggcgagggagacgccgaggccgccgttgacgcgctcgtggaggcgttcctggaggagaaggcgagcggcggcgggttcgtggacggggaggaggacgtgtacaagctcacgaggctgctgcgcgcgctggtggccaagggcaggggccgcgcggcgtggagggtgtacgaggcggccgtcaggaagggaggcctcaacgtggacgcgtacgtgtacagggtgatggcgcgggggatgaagcggctgggcttccaggaggaggcggcggaggtggaggaggacttcgcggaatgggagaccacggtctcaccgcccgccagggacgtgctcgacgaaatgcgagcaagagacgagatcaaaaccactgctgctgcctcctagtcctatagcccaccagggtttttttagctgataaatgggtttggttggtgctagaatttgtcatgctactgcaacaacggtgatactgatacgtcttctttagaaatcatacggccattaggccactaacagaaagtgttttagcggttgaccatcgcaattgcaggacatacacccttacaactaggtgttgccgcaatctgttcaaatttcaaatttggattgtcaaatggttgctatagaaagagaacagcagggtta

SEQ ID NO: 75524 - DNA, 1501 bp, Zea Mays
aatcatcgctcgctgagcttccgttgttgcacagcacatcgatcgacgacgatatcgggaagcaatatggggttggccttgtcgcggctggaggagattaggacgcagtaccgcatggcagcggaagacggcgaggctgacagtccggcaccggcgccagtgtcgccgaccggtgctgctgctgcttccggcggcggcactgaaaagaagaagcaggcggacgactcgtcgtcgtcgtcaaagacgacagaatgggttcctcataagttctctgagatcgtcggtcaaagacgacctggtgaggatatgttccgagggatctaccttccacgatcggatcagcagccgaaaacaaaggtaaactaagagctagtccgggaacctcaatttctcaaaggattttcatttttcaaagaaaaattagtttatttttctataggaaatttgaaatctcttgacaaaattagagttcctaaactagtcctaaataattaattaatacgacaggagcgggggaggataggataggacaggagaagagagcgagcattatttaattggaaaacacatggatggatggatgtattttttaggctttgttcggttattcctattatacatggatcggatgagattggaaaaaatgtagaaattttttgatttgtttagaatttaaaaccatctaatatcacttaatccatatatatggattgattggtaaccgaacaagcccttattattttccattaatccatgcatgcagaagtactgggtagatgggagaaatgccaactgcttcatgctgttccctaaaggattcagcatcacctggggttcggacgcaaggtactggagttggcgcaagctcacacaagaagagaaaagagagatcgaccccgaggaggccaaaatggagatggaggtggcgtacctcaaggacgtgtgctggctggagatccgtgcgaagctggagatgtcccacctcactccgggattcacctacgtcgtcgactttgtagccaagctcgaacagaacggctacggctggtccgagccggtggacctccagatcaattgtcccggcgacgtcgacaggaagccgcggaaggagagtctatggaagacggttgacgggaaaaagtggtcgtacgtcaatgtcggggaggtggaggcggccgggcaaaatggggagatggagatcgccatgctcaggttaggtggggactggaagagaggactcgtcctcaggtgcatcaagattaccccaaaaccctagctagctagctaggttcaccggctataaacgacgacgacgacgatctacgtactccgactgcatgcatgcgcgcgcctctgctgccgtacgtgcaccgtaatacttagcttacttgtgctattagtgctatagtactacgtactactactatttataataagatgaataaatgccatattcatggccatgcgtggaataatatgcactcacactgtctactctctc

SEQ ID NO: 75525 - DNA, 1361 bp, Zea Mays
ctgtgcaactcggcagtgcaatttcgtgcagcatcggtgcaactctgcacgccatcccgctggccaccctcagccgctggctagtagattctcctgtaaacaccaccaccgtctctgcgctacagaattttgtcatccggaatcagattcctcaggcaccatctcaagcggctctacgttattccctctgcacttcattgtcagcaatcctaaaagctcgcagcagcagcagctagcagctcgttcttgttcgtcagctctagcctaccctgcgctagctggctcttctttaattctgcagggagttccagtttcaggtagagtgcaggcggagaaccaataatgggggcggcgccgtcgtccgacgactcgtcacgcgccggagacggccgggctgtggcgagcagcgctgcctctggcactggcagcaacagccaccaggcccagtcgaagcgggcgccgccgcctcacaagttccacgagatagttgcgcaggaggcgacgacggccggcggcggcggcggcactgctgctgcagccgagctggaggatcaggcgtgcagcaccggggtgtacctggctgggaaaaccaagaagtactgggtggacgagaagaccaggtgcaactgcttcgtgctgttcgctagagcgctgtccatcacttggggcgacgatcccagatactggatctggcatcccgtcagagaaaccaactcgattcgagccatgtctgtacctgtactctctctccctctactctgtacagtgacgccgagatcgtcgaggctgcgtcgctgcagaacgtgtgctggctggaggtgcacgggaggctggagctgtcgcacctcacgccggggtgcagctacgacgtggccttccaggtgatgctcacggagccggcgtacgggtggtcggtgccggtgaacctgcggctcaggttccccgacggcacggctcaggcgcggaaggagaagctgcaggggaggcccacgaagcagtggctggagctcagggccggggaggtgaaggcgccggcccagccggggggagcgggacgcagcggcgagcttgagatctccctgttcgagtacgacggcgggctctggaagaaggggctcctcgtcaagggcatcaagatcgtcccgaaggagagtgattattaattagtgtttgtaactttgtttcagggtgactgctcctgctcgcttttgcctgtcaggtgtgctaagaacttcgtctaagataattggaataattaatgtgtgtggcactgcgtatttcaacgcttcactcgactcgatcgcctttgcctgtcaggtgtactaatttgtttttgaccatccaccaacttgttaacttgc

SEQ ID NO: 75526 - DNA, 1714 bp, Zea Mays
gttacgagctcagaaagtgatgacatgatgagaaggaagcgcttatttggtatgattaatgaattgcaaactgtttttgaagttgtctccggtgcgagacaacaacaatctaaagagaggtccagtatggacaatggtggtagagccaagcctgtaaagatagaaaataatggaaaagtcacagacgaagcatacgaagatgacagtgatcacggtgaaaccctatgtggaacctgtggtgggatatacaacgcggatgagttttggatcgggtgtgacatgtgcgagcgatggtaccatggcaagtgtgtcaagataactcctgccaaggcagagagcataaagcattacaaatgcccgagctgcagctccaagagggcgaggcagtagcaaaacccatgaacgcaggaagcctccgaatgtgggatgtatggtgcagaagaggcgcattgcaaagtttgcaggcaggagaaggccaagaggcctccatttacaagattagaactatattgctatcttcccagtgccttatgcttgcgtttacctatgataagctgatgtgaggaaagataagacatttggcaaccagaggcacttagttaaatgccccttgatatacatggggatcaatgttgaggacaaaagacctgcgtgcccctacgagaagaatgatgacatctgctgcgcttctgattgacaacaggcccggggtctcagtttcaggtagagtgcaggcggagaaccaataatgggggcggcgccgtcgtccgacgactcgtcacgcgccggagacggccgggctgtggcgagcagcgctgcctctggcactggcagcaacagccaccaggcccagtcgaagcgggcgccgccgcctcacaagttccacgagatagttgcgcaggaggcgacgacggccggcggcggcggcggcactgctgctgcagccgagctggaggatcaggcgtgcagcaccggggtgtacctggctgggaaaaccaagaagtactgggtggacgagaagaccaggtgcaactgcttcgtgctgttcgctagagcgctgtccatcacttggggcgacgatcccagatactggatctggcatcccgtcagagaaaccaatgacgccgagatcgtcgaggctgcgtcgctgcagaacgtgtgctggctggaggtgcacgggaggctggagctgtcgcacctcacgccggggtgcagctacgacgtggccttccaggtgatgctcacggagccggcgtacgggtggtcggtgccggtgaacctgcggctcaggttccccgacggcacggctcaggcgcggaaggagaagctgcaggggaggcccacgaagcagtggctggagctcagggccggggaggtgaaggcgccggcccagccggggggagcgggacgcagcggcgagcttgagatctccctgttcgagtacgacggcgggctctggaagaaggggctcctcgtcaagggcatcaagatcgtcccgaaggagagtgattattaattagtgtttgtaactttgtttcagggtgactgctcctgctcgcttttgcctgtcaggtgtgctaagaacttcgtctaagataattggaataattaatgtgtgtggcactgcgtatttcaacgcttcactcgactcgatcgcctttgcctgtcaggtgtactaatttgtttttgaccatccaccaacttgttaacttgc

SEQ ID NO: 75527 - DNA, 2129 bp, Zea Mays
ccggcgccaccgccagtacacaccagctcgccggagatcacaagaagatacaagaccgtgctcctcgacgccgcccgacatggcggacgccgcctctggccgcggccacgtcgtctaccctccccgctccgccgaggacatcttcaaggactaccgcgcccgccggtccgccatcctccgcgccctcactcacgaggtcgaggacttctacgcgcagtgcgatccagacaaggagaacctgtgcctgtacggctacgcgaacgaggcgtgggaggtggcgctgccggcagaggaggtgcccacggagctgccggagcctgcgctgggaatcaacttcgcgcgcgacggaatgaaccgccgggactggcttgcgctcgtcgccgtccactccgactcgtggctcctctccgtcgccttttactatgccgctcggcttaatcgtaatgaccggaagcgcttatttggtatgattaatgaattgcaaactgtttttgaagttgtctccggtgcgagacaacaacaatctaaagagaggtccagtatggacaatggtggtagagccaagcctgtaaagatagaaaataatggaaaagtcacagacgaagcatacgaagatgacagtgatcacggtgaaaccctatgtggaacctgtggtgggatatacaacgcggatgagttttggatcgggtgtgacatgtgcgagcgatggtaccatggcaagtgtgtcaagataactcctgccaaggcagagagcataaagcattacaaatgcccgagctgcagctccaagagggcgaggcagtagcaaaacccatgaacgcaggaagcctccgaatgtgggatgtatggtgcagaagaggcgcattgcaaagtttgcaggcaggagaaggccaagaggcctccatttacaagattagaactatattgctatcttcccagtgccttatgcttgcgtttacctatgataagctgatgtgaggaaagataagacatttggcaaccagaggcacttagttaaatgccccttgatatacatggggatcaatgttgaggacaaaagacctgcgtgcccctacgagaagaatgatgacatctgctgcgcttctgattgacaacaggcccggggtctcagtttcaggtagagtgcaggcggagaaccaataatgggggcggcgccgtcgtccgacgactcgtcacgcgccggagacggccgggctgtggcgagcagcgctgcctctggcactggcagcaacagccaccaggcccagtcgaagcgggcgccgccgcctcacaagttccacgagatagttgcgcaggaggcgacgacggccggcggcggcggcggcactgctgctgcagccgagctggaggatcaggcgtgcagcaccggggtgtacctggctgggaaaaccaagaagtactgggtggacgagaagaccaggtgcaactgcttcgtgctgttcgctagagcgctgtccatcacttggggcgacgatcccagatactggatctggcatcccgtcagagaaaccaatgacgccgagatcgtcgaggctgcgtcgctgcagaacgtgtgctggctggaggtgcacgggaggctggagctgtcgcacctcacgccggggtgcagctacgacgtggccttccaggtgatgctcacggagccggcgtacgggtggtcggtgccggtgaacctgcggctcaggttccccgacggcacggctcaggcgcggaaggagaagctgcaggggaggcccacgaagcagtggctggagctcagggccggggaggtgaaggcgccggcccagccggggggagcgggacgcagcggcgagcttgagatctccctgttcgagtacgacggcgggctctggaagaaggggctcctcgtcaagggcatcaagatcgtcccgaaggagagtgattattaattagtgtttgtaactttgtttcagggtgactgctcctgctcgcttttgcctgtcaggtgtgctaagaacttcgtctaagataattggaataattaatgtgtgtggcactgcgtatttcaacgcttcactcgactcgatcgcctttgcctgtcaggtgtactaatttgtttttgaccatccaccaacttgttaacttgc

SEQ ID NO: 75528 - DNA, 2222 bp, Zea Mays
ccggcgccaccgccagtacacaccagctcgccggagatcacaagaagatacaagaccgtgctcctcgacgccgcccgacatggcggacgccgcctctggccgcggccacgtcgtctaccctccccgctccgccgaggacatcttcaaggactaccgcgcccgccggtccgccatcctccgcgccctcactcacgaggtcgaggacttctacgcgcagtgcgatccagacaaggagaacctgtgcctgtacggctacgcgaacgaggcgtgggaggtggcgctgccggcagaggaggtgcccacggagctgccggagcctgcgctgggaatcaacttcgcgcgcgacggaatgaaccgccgggactggcttgcgctcgtcgccgtccactccgactcgtggctcctctccgtcgccttttactatgccgctcggcttaatcgtaatgaccggaagcgcttatttggtatgattaatgaattgcaaactgtttttgaagttgtctccggtgcgagacaacaacaatctaaagagaggtccagtatggacaatggtggtagagccaagcctgtaaagaaaataatggaaaagtcacagacgaagcatacgaagatgacagtgatcacggtgaaaccctatgtggaacctgtggtgggatatacaacgcggatgagttttggatcgggtgtgacatgtgcgagcgatggtaccatggcaagtgtgtcaagataactcctgccaaggcagagagcataaagcattacaaatgcccgagctgcagctccaagagggcgaggcagtagcaaaacccatgaacgcaggaagcctccgaatgtgggatgtatggtgcagaagaggcgcattgcaaagtttgcaggcaggagaaggccaagaggcctccatttacaagattagaactatattgctatcttcccagtgccttatgcttgcgtttacctatgataagctgatgtgaggaaagataagacatttggcaaccagaggcacttagttaaatgccccttgatatacatgggggtaaaagaagaggaactcatgttttgtcgaatatatggaatctttttttcccctcttacagtaacatgtactccatcatacataatttatcacgcagatcaatgttgaggacaaaagacctgcgtgcccctacgagaagaatgatgacatctgctgcgcttctgattgacaacaggcccggggtctcagtttcaggtagagtgcaggcggagaaccaataatgggggcggcgccgtcgtccgacgactcgtcacgcgccggagacggccgggctgtggcgagcagcgctgcctctggcactggcagcaacagccaccaggcccagtcgaagcgggcgccgccgcctcacaagttccacgagatagttgcgcaggaggcgacgacggccggcggcggcggcggcactgctgctgcagccgagctggaggatcaggcgtgcagcaccggggtgtacctggctgggaaaaccaagaagtactgggtggacgagaagaccaggtgcaactgcttcgtgctgttcgctagagcgctgtccatcacttggggcgacgatcccagatactggatctggcatcccgtcagagaaaccaatgacgccgagatcgtcgaggctgcgtcgctgcagaacgtgtgctggctggaggtgcacgggaggctggagctgtcgcacctcacgccggggtgcagctacgacgtggccttccaggtgatgctcacggagccggcgtacgggtggtcggtgccggtgaacctgcggctcaggttccccgacggcacggctcaggcgcggaaggagaagctgcaggggaggcccacgaagcagtggctggagctcagggccggggaggtgaaggcgccggcccagccggggggagcgggacgcagcggcgagcttgagatctccctgttcgagtacgacggcgggctctggaagaaggggctcctcgtcaagggcatcaagatcgtcccgaaggagagtgattattaattagtgtttgtaactttgtttcagggtgactgctcctgctcgcttttgcctgtcaggtgtgctaagaacttcgtctaagataattggaataattaatgtgtgtggcactgcgtatttcaacgcttcactcgactcgatcgcctttgcctgtcaggtgtactaatttgtttttgaccatccaccaacttgttaacttgc

SEQ ID NO: 75529 - DNA, 3855 bp, Zea Mays
aagctctcgaacaaagaggtgtaccggcgccaccgccagtacacaccagctcgccggagatcacaagaagatacaagaccgtgctcctcgacgccgcccgacatggcggacgccgcctctggccgcggccacgtcgtctaccctccccgctccgccgaggacatcttcaaggactaccgcgcccgccggtccgccatcctccgcgccctcactcacgacaaggagaacctgtgcctgtacggctacgcgaacgaggcgtgggaggtggcgctgccggcagaggaggtgcccacggagctgccggagcctgcgctgggaatcaacttcgcgcgcgacggaatgaaccgccgggactggcttgcgctcgtcgccgtccactccgactcgtggctcctctccgtcgccttttactatgccgctcggcttaatcgtaatgaccggaagcgcttatttggtatgattaatgaattgcaaactgtttttgaagttgtctccggtgcgagacaacaacaatctaaagagaggtccagtatggacaatggtggtagagccaagcctgtaaagatagaaaataatggaaaagtcacagacgaagcatacgaagatgacagtgatcacggtgaaaccctatgtggaacctgtggtgggatatacaacgcggatgagttttggatcgggtgtgacatgtgcgagcgatggtaccatggcaagtgtgtcaagataactcctgccaaggcagagagcataaagcattacaaatgcccgagctgcagctccaagagggcgaggcagtagcaaaacccatgaacgcaggaagcctccgaatgtgggatgtatggtgcagaagaggcgcattgcaaagtttgcaggcaggagaaggccaagaggcctccatttacaagattagaactatattgctatcttcccagtgccttatgcttgcgtttacctatgataagctgatgtgaggaaagataagacatttggcaaccagaggcacttagttaaatgccccttgatatacatgggggtaaaagaagaggaactcatgttttgtcgaatatatggaatctttttttcccctcttacagtaacatgtactccatcatacataatttatcacgcagatcaatgttgaggacaaaagacctgcgtgcccctacgagaagaatgatgacatctgctgcgcttctgattgacaacaggcccggggtctcaggtcagcaccacccacctctctgtgtgacaaatttcaaatgttaaatcgttcagtttcatgggacgggaaggagcaccccttctgataaggatggctgcagcctttactgaccaacttgaattgtgtaggaactgaggtaagtaagtttcgtctagctacctacctacctacagccgcctctcagaactaaaaaaaactgtgaagtgtttctgttgttttatctaacggtcgatcagtgaattgactgtcccgcagaataaacatatgtacgcgataccaaaggataagcacaagcagaatagatggaccatatacgaaaaggaaaaatgttatatttacatcgagcgattactgtagcacgtaacatgaatagtagctttattacaatctaatttttttttttggggttggaactctttacatccttctttttaatagaatttactaattctttctgtggagagagaggctatatatgttaccagaccaataacagcaacaaggcgccatgcaaattgtgagtttttatagcttgtagattggtgtgatgcccagcagactgaaacactgccgcgtcagtcacgattgccgtcgccgccggacaaagaattcaggtgatctaaacatctggtgaagaagtgggagaagtcccagaaacgtgaggtgatgtggacagctagcagagatagcaagcaagacctggcaactggtgtagagctttgaggatgcttcggataatgagctaatacaagacaggctcgatcgaagcgtatcaaaattgtccacctgttaatctcaattcatgtggattgaactagcaagtcataattccttataatctcacctaaggcctgtttggttcctgagaattggtcacccgaaacaattcctaaccggattgtttatctaataattcatataaggtctgatcaactggaacgatttctaggtgagtttcagcaaaaaacgaacaggtggatcaaaccttatatccgcaaaaaatatctgatgtttagaccaaccttcgtggcctaaacatccggtagtttattctccaatccacatggactgggaataacagaggaagacccgaagggaatgccatttgtggtagaggaaggtggacagcggcgtcacagtggagatcactgcgatagcttgagcgaacttgctgtttaggccaggaagcatgctgataacgggcgctgaatcggtgacggcggcgccgcagtcgtagagggtgtaggcaaggcgtttgaggcgaccacagtactcggcgttggacatgtcgctctagaagaggcggctgtggagctcctgctggctctctgtgcaactcggcagtgcaatttcgtgcagcatcggtgcaactctgcacgccatcccgctggccaccctcagccgctggctagtagattctcctgtaaacaccaccaccgtctctgcgctacagaattttgtcatccggaatcagattcctcaggcaccatctcaagcggctctacgttattccctctgcacttcattgtcagcaatcctaaaagctcgcagcagcagcagctagcagctcgttcttgttcgtcagctctagcctaccctgcgctagctggctcttctttaattctgcagggagttccagtttcaggtagagtgcaggcggagaaccaataatgggggcggcgccgtcgtccgacgactcgtcacgcgccggagacggccgggctgtggcgagcagcgctgcctctggcactggcagcaacagccaccaggcccagtcgaagcgggcgccgccgcctcacaagttccacgagatagttgcgcaggaggcgacgacggccggcggcggcggcggcactgctgctgcagccgagctggaggatcaggcgtgcagcaccggggtgtacctggctgggaaaaccaagaagtactgggtggacgagaagaccaggtgcaactgcttcgtgctgttcgctagagcgctgtccatcacttggggcgacgatcccagatactggatctggcatcccgtcagagaaaccaatgacgccgagatcgtcgaggctgcgtcgctgcagaacgtgtgctggctggaggtgcacgggaggctggagctgtcgcacctcacgccggggtgcagctacgacgtggccttccaggtgatgctcacggagccggcgtacgggtggtcggtgccggtgaacctgcggctcaggttccccgacggcacggctcaggcgcggaaggagaagctgcaggggaggcccacgaagcagtggctggagctcagggccggggaggtgaaggcgccggcccagccggggggagcgggacgcagcggcgagcttgagatctccctgttcgagtacgacggcgggctctggaagaaggggctcctcgtcaagggcatcaagatcgtcccgaaggagagtgattattaattagtgtttgtaactttgtttcagggtgactgctcctgctcgcttttgcctgtcaggtgtgctaagaacttcgtctaagataattggaataattaatgtgtgtggcactgcgtatttcaacgcttcactcgactcgatcgcctttgcctgtcaggtgtactaatttgtttttgaccatccaccaacttgttaacttgc

SEQ ID NO: 75530 - DNA, 3131 bp, Zea Mays
ggagagtctcagtcctcacagatcgcgcgcgcaccagcaccaccactgccgtctccggcgacgaccacgccgccggccatgccgtcctcctacgctgccgctgcagccggatcctcttcccgcaagccgaatcgcacctccagcgctgccgcacccactcttcgcccaccagcaccctcaccgtcgccggcacccgctcccctggcggtgaaccctagcgtcatctctgattccgacccctcctcctactcatcttcctctgcggatgaggccgatttcgccgcctccgactccgcaactgcctctgttgtctctgcctacctctcggttgctggcgagggggccgacctctcgaaagttggcattttcctctcatccgccgcgcgccgccgatcgccgccgtgccttatctgcttcgatcctatacgcccctctgacccggtgtggtcatgctcttcatcctgctttgccatcctccacctcccctgcatccagtcatgggcgcaccagtcagcatccgggcccgccgtgccgtgcccaacctggggatgccccaagtgccgcttcgcctaccccaagtccgagatcccctcctcctacgtctgcttctgctccaagaccatagacccggctccggacccctggatcctcccccactcttgtggcgacgtctgtggccgccgtcttgatgcgaatctcgactccggctgtgagcatacctgcctgctgctgtgccacccagggccatgcccgccatgcccggccgttgttcctaaagcgacgtgcttctgtggagtgcaccgggagccccgacgctgcgcacatcagcgttactcttgtggggggaaatgcaacaaacgtcttagctgtggactccaccactgtccagtggattgccatgatggcccctgcccgccgtgtgcagtgctggggagtcacaaatgtgagtgtggagagatattggaggagaaattgtgctctgaaaggattttccagtgcaagagggagtgtggtgggatgctagattgcggtaagcataagtgtgagagggggtgccatgggggcaagtgtggggaatgcccactccgaggtcgacgcacttgcccgtgtgggaagaaaaattatccaaggttggagtgtgatgcagaggctgccacatgcggatcaacttgtgagaaggtgcttgggtgtggacgacacaggtgccctgagcgctgccatcgtgggccatgtgatgggacttgccgtcttgtggttactaaggcctgccgttgcggggggttgaagaaggaggtgccctgctaccaagaattgacgtgtgaaagaaaatgtcaacgtttgcgaaactgtggtcgccatgcttgtaaacgacgttgctgtgctggagattgcccaccctgctctgagaggcgcttgttcaccttgtcctctgatgaagaccatttcttgcgcctgtggaaaaacatgttttgaggttccttgtgggactgagaagaatcagaaaccacccaaatgctcaaagaaatgcaatatacctcgcctttgccgacacaagcttgaatgccggccccacaaatgccactatggagcctgcccaccttgcaagctgatctgcggggaagaatttccatgtgggcacacgtgtaaagaaaggtgtcatggccctatttctcctccaaactccgagttcacactgaaaccgacaaaaaagaaaatgggaaagcacatagaatgtacacctgggacaccgtgcccaccatgcaaagaggtggttttggtgtcatgctttgggcagcatcttggccaagaacgcactatgccatgttgcaaatggaggccttttccctgtgaaaatttatgtgggaatcctctcctttgtggcaaccattattgtacaaaatcttgccatgtgttagaagtcccattgaatcatcctgaaggagatcgtacaacatctatcagtaaagtgaacgcacttgctatgccttgtgaacaatgcaatcttccttgtcaaagggttagggagcctccttgttcacatccttgccctttgccatgtcatctgaacgattgtccttcttgtaaagtccttgttaaaagaccatgccattgtggtgctatggtgcatgcttttgaatgtgtgttttataacaacttaaatgcaaaggatcagattaaaataagatcttgtggtggcccatgtcataggtcagtttggctcctaactgtttccgtatcgaaaattgtacaatttttctgttgttactaaactcctatcacaaatttccttaaatttatttgattttaccaagcatctgaacatgctttttgaacagaaagctaccaaattgcccccatctgtgttcagaagtatgtcaccctggtgtatgcccatcggttgatcagtgcatgaaaaaggtcaacacccgttgtgcatgcagcactctgaaacaagagtggcgatgtcaagatgtcctcaaggaataccgtaagtctggccgggatccaaaagaagtacctaaaagtcagtttggagttggcttacttgcctgcggtgaagattgcaagaagaagctgaaggctccagattcagagttgcatctccggaaaagtcaggagaacaagatccctgctgtggaagtcgtaaatgcacccaaacgcaggaagcggcgtgaccgtggacaagaagttaaaatttcgaaattccaggaagtgaagacttttgtgctgagagcgctactgattattttgctgtcaataatcgttgctgctggtctgtacctgttgtggaaaggtattttctggctttctgactggatgaacgaaatggaagagcagagggcgagtcaaaggtatccgaggggtgcaatgttgtaaaataaaacaattactttgagcctaataatcggtattgacatgtggattaattaatggttgttagggattcagttttgcaggatcataaacatgtcaccgttttctcactttttgtcactataaactagaaattgtatgcgtgatgtattgttgtatttttattttgctactctgcattgttaagtgaacaaacgatacaattactacatgattcatcgcttatatctgttaaaatgtacttcctctgttccaat

SEQ ID NO: 75531 - DNA, 3054 bp, Zea Mays
ggagagtctcagtcctcacagatcgcgcgcgcaccagcaccaccactgccgtctccggcgacgaccacgccgccggccatgccgtcctcctacgctgccgctgcagccggatcctcttcccgcaagccgaatcgcacctccagcgctgccgcacccactcttcgcccaccagcaccctcaccgtcgccggcacccgctcccctggcggtgaaccctagcgtcatctctgattccgacccctcctcctactcatcttcctctgcggatgaggccgatttcgccgcctccgactccgcaactgcctctgttgtctctgcctacctctcggttgctggcgagggggccgacctctcgaaagttggcattttcctctcatccgccgcgcgccgccgatcgccgccgtgccttatctgcttcgatcctatacgcccctctgacccggtgtggtcatgctcttcatcctgctttgccatcctccacctcccctgcatccagtcatgggcgcaccagtcagcatccgggcccgccgtgccgtgcccaacctggggatgccccaagtgccgcttcgcctaccccaagtccgagatcccctcctcctacgtctgcttctgctccaagaccatagacccggctccggacccctggatcctcccccactcttgtggcgacgtctgtggccgccgtcttgatgcgaatctcgactccggctgtgagcatacctgcctgctgctgtgccacccagggccatgcccgccatgcccggccgttgttcctaaagcgacgtgcttctgtggagtgcaccgggagccccgacgctgcgcacatcagcgttactcttgtggggggaaatgcaacaaacgtcttagctgtggactccaccactgtccagtggattgccatgatggcccctgcccgccgtgtgcagtgctggggagtcacaaatgtgagtgtggagagatattggaggagaaattgtgctctgaaaggattttccagtgcaagagggagtgtggtgggatgctagattgcggtaagcataagtgtgagagggggtgccatgggggcaagtgtggggaatgcccactccgaggtcgacgcacttgcccgtgtgggaagaaaaattatccaaggttggagtgtgatgcagaggctgccacatgcggatcaacttgtgagaaggtgcttgggtgtggacgacacaggtgccctgagcgctgccatcgtgggccatgtgatgggacttgccgtcttgtggttactaaggcctgccgttgcggggggttgaagaaggaggtgccctgctaccaagaattgacgtgtgaaagaaaatgtcaacgtttgcgaaactgtggtcgccatgcttgtaaacgacgttgctgtgctggagattgcccaccctgctctgagctcagatgtggcaaccataaatgtctctcaccatgccacagaggcgcttgttcaccttgtcctctgatgaagaccatttcttgcgcctgtggaaaaacatgttttgaggtggaattcggttccttgtgggactgagaagaatcagaaaccacccaaatgctcaaagaaatgcaatatacctcgcctttgccgacacaagcttgaatgccggccccacaaatgccactatggagcctgcccaccttgcaagctgatctgcggggaagaatttccatgtgggcacacgtgtaaagaaaggtgtcatggccctatttctcctccaaactccgagttcacactgaaaccgacaaaaaagaaaatgggaaagcacatagaatgtacacctgggacaccgtgcccaccatgcaaagaggtggttttggtgtcatgctttgggcagcatcttggccaagaacgcactatgccatgttgcaaatggaggccttttccctgtgaaaatttatgtgggaatcctctcctttgtggcaaccattattgtacaaaatcttgccatgtgttagaagtcccattgaatcatcctgaaggagatcgtacaacatctatcagtaaagtgaacgcacttgctatgccttgtgaacaatgcaatcttccttgtcaaagggttagggagcctccttgttcacatccttgccctttgccatgtcatctgaacgattgtccttcttgtaaagtccttgttaaaagaccatgccattgtggtgctatggtgcatgcttttgaatgtgtgttttataacaacttaaatgcaaaggatcagattaaaataagatcttgtggtggcccatgtcatagaaagctaccaaattgcccccatctgtgttcagaagtatgtcaccctggtgtatgcccatcggttgatcagtgcatgaaaaaggtcaacacccgttgtgcatgcagcactctgaaacaagagtggcgatgtcaagatgtcctcaaggaataccgtaagtctggccgggatccaaaagaagtacctaaaagtcagtttggagttggcttacttgcctgcggtgaagattgcaagaagaagctgaaggctccagattcagagttgcatctccggaaaagtcaggagaacaagatccctgctgtggaagtcgtaaatgcacccaaacgcaggaagcggcgtgaccgtggacaagaagttaaaatttcgaaattccaggaagtgaagacttttgtgctgagagcgctactgattattttgctgtcaataatcgttgctgctggtctgtacctgttgtggaaaggtattttctggctttctgactggatgaacgaaatggaagagcagagggcgagtcaaaggtatccgaggggtgcaatgttgtaaaataaaacaattactttgagcctaataatcggtattgacatgtggattaattaatggttgttagggattcagttttgcaggatcataaacatgtcaccgttttctcactttttgtcactataaactagaaattgtatgcgtgatgtattgttgtatttttattttgctactctgcattgttaagtgaacaaacgatacaattactacatgattcatcgcttatatctgttaaaatgtacttcctctgttccaat

SEQ ID NO: 75532 - DNA, 3325 bp, Zea Mays
ggagagtctcagtcctcacagatcgcgcgcgcaccagcaccaccactgccgtctccggcgacgaccacgccgccggccatgccgtcctcctacgctgccgctgcagccggatcctcttcccgcaagccgaatcgcacctccagcgctgccgcacccactcttcgcccaccagcaccctcaccgtcgccggcacccgctcccctggcggtgaaccctagcgtcatctctgattccgacccctcctcctactcatcttcctctgcggatgaggccgatttcgccgcctccgactccgcaactgcctctgttgtctctgcctacctctcggttgctggcgagggggccgacctctcgaaagttggcattttcctctcatccgccgcgcgccgccgatcgccgccgtgccttatctgcttcgatcctatacgcccctctgacccggtgtggtcatgctcttcatcctgctttgccatcctccacctcccctgcatccagtcatgggcgcaccagtcagcatccgggcccgccgtgccgtgcccaacctggggatgccccaagtgccgcttcgcctaccccaagtccgagatcccctcctcctacgtctgcttctgctccaagaccatagacccggctccggacccctggatcctcccccactcttgtggcgacgtctgtggccgccgtcttgatgcgaatctcgactccggctgtgagcatacctgcctgctgctgtgccacccagggccatgcccgccatgcccggccgttgttcctaaagcgacgtgcttctgtggagtgcaccgggagccccgacgctgcgcacatcagcgttactcttgtggggggaaatgcaacaaacgtcttagctgtggactccaccactgtccagtggattgccatgatggcccctgcccgccgtgtgcagtgctggggagtcacaaatgtgagtgtggagagatattggaggagaaattgtgctctgaaaggattttccagtgcaagagggagtgtggtgggatgctagattgcggtaagcataagtgtgagagggggtgccatgggggcaagtgtggggaatgcccactccgaggtcgacgcacttgcccgtgtgggaagaaaaattatccaaggttggagtgtgatgcagaggctgccacatgcggatcaacttgtgagaaggtgcttgggtgtggacgacacaggtgccctgagcgctgccatcgtgggccatgtgatgggacttgccgtcttgtggttactaaggcctgccgttgcggggggttgaagaaggaggtgccctgctaccaagaattgacgtgtgaaagaaaatgtcaacgtttgcgaaactgtggtcgccatgcttgtaaacgacgttgctgtgctggagattgcccaccctgctctgagacttgtgataagaagctcagatgtggcaaccataaatgtctctcaccatgccacagaggcgcttgttcaccttgtcctctgatgaagaccatttcttgcgcctgtggaaaaacatgttttgaggtggaattcgggttccttgtgggactgagaagaatcagaaaccacccaaatgctcaaagaaatgcaatatacctcgcctttgccgacacaagcttgaatgccggccccacaaatgccactatggagcctgcccaccttgcaagctgatctgcggggaagaatttccatgtgggcacacgtgtaaagaaaggtgtcatggccctatttctcctccaaactccgagttcacactgaaaccgacaaaaaagaaaatgggaaagcacatagaatgtacacctgggacaccgtgcccaccatgcaaagaggtggttttggtgtcatgctttgggcagcatcttggccaagaacgcactatgccatgttgcaaatggaggccttttccctgtgaaaatttatgtgggaatcctctcctttgtggcaaccattattgtacaaaatcttgccatgtgttagaagtcccattgaatcatcctgaaggagatcgtacaacatctatcagtaaagtgaacgcacttgctatgccttgtgaacaatgcaatcttccttgtcaaagggttagatactctcttttcgttttcaagaactccagtttggtttgttttacaaagcttaatatgaagaagctactgtggtttcatatgcttttgagcttggtgcaggatattgacatatttatttcaggttagggagcctccttgttcacatccttgccctttgccatgtcatctgaacgattgtccttcttgtaaagtccttgttaaaagaccatgccattgtggtgctatggtgcatgcttttgaatgtgtgttttataacaacttaaatgcaaaggatcagattaaaataagatcttgtggtggcccatgtcataggtcagtttggctcctaactgtttccgtatcgaaaattgtacaatttttctgttgttactaaactcctatcacaaatttccttaaatttatttgattttaccaagcatctgaacatgctttttgaacagaaagctaccaaattgcccccatctgtgttcagaagtatgtcaccctggtgtatgcccatcggttgatcagtgcatgaaaaaggtcaacacccgttgtgcatgcagcactctgaaacaagagtggcgatgtcaagatgtcctcaaggaataccgtaagtctggccgggatccaaaagaagtacctaaaagtcagtttggagttggcttacttgcctgcggtgaagattgcaagaagaagctgaaggctccagattcagagttgcatctccggaaaagtcaggagaacaagatccctgctgtggaagtcgtaaatgcacccaaacgcaggaagcggcgtgaccgtggacaagaagttaaaatttcgaaattccaggaagtgaagacttttgtgctgagagcgctactgattattttgctgtcaataatcgttgctgctggtctgtacctgttgtggaaaggtattttctggctttctgactggatgaacgaaatggaagagcagagggcgagtcaaaggtatccgaggggtgcaatgttgtaaaataaaacaattactttgagcctaataatcggtattgacatgtggattaattaatggttgttagggattcagttttgcaggatcataaacatgtcaccgttttctcactttttgtcactataaactagaaattgtatgcgtgatgtattgttgtatttttattttgctactctgcattgttaagtgaacaaacgatacaattactacatgattcatcgcttatatctgttaaaatgtacttcctctgttccaat

SEQ ID NO: 75533 - DNA, 3018 bp, Zea Mays
ggagagtctcagtcctcacagatcgcgcgcgcaccagcaccaccactgccgtctccggcgacgaccacgccgccggccatgccgtcctcctacgctgccgctgcagccggatcctcttcccgcaagccgaatcgcacctccagcgctgccgcacccactcttcgcccaccagcaccctcaccgtcgccggcacccgctcccctggcggtgaaccctagcgtcatctctgattccgacccctcctcctactcatcttcctctgcggatgaggccgatttcgccgcctccgactccgcaactgcctctgttgtctctgcctacctctcggttgctggcgagggggccgacctctcgaaagttggcattttcctctcatccgccgcgcgccgccgatcgccgccgtgccttatctgcttcgatcctatacgcccctctgacccggtgtggtcatgctcttcatcctgctttgccatcctccacctcccctgcatccagtcatgggcgcaccagtcagcatccgggcccgccgtgccgtgcccaacctggggatgccccaagtgccgcttcgcctaccccaagtccgagatcccctcctcctacgtctgcttctgctccaagaccatagacccggctccggacccctggatcctcccccactcttgtggcgacgtctgtggccgccgtcttgatgcgaatctcgactccggctgtgagcatacctgcctgctgctgtgccacccagggccatgcccgccatgcccggccgttgttcctaaagcgacgtgcttctgtggagtgcaccgggagccccgacgctgcgcacatcagcgttactcttgtggggggaaatgcaacaaacgtcttagctgtggactccaccactgtccagtggattgccatgatggcccctgcccgccgtgtgcagtgctggggagtcacaaatgtgagtgtggagagatattggaggagaaattgtgctctgaaaggattttccagtgcaagagggagtgtggtgggatgctagattgcggtaagcataagtgtgagagggggtgccatgggggcaagtgtggggaatgcccactccgaggtcgacgcacttgcccgtgtgggaagaaaaattatccaaggttggagtgtgatgcagaggctgccacatgcggatcaacttgtgagaaggtgcttgggtgtggacgacacaggtgccctgagcgctgccatcgtgggccatgtgatgggacttgccgtcttgtggttactaaggcctgccgttgcggggggttgaagaaggaggtgccctgctaccaagaattgacgtgtgaaagaaaatgtcaacgtttgcgaaactgtggtcgccatgcttgtaaacgacgttgctgtgctggagattgcccaccctgctctgagacttgtgataagaagctcagatgtggcaaccataaatgtctctcaccatgccacagaggcgcttgttcaccttgtcctctgatgaagaccatttcttgcgcctgtggaaaaacatgttttgaggtggaattcggttccttgtgggactgagaagaatcagaaaccacccaaatgctcaaagaaatgcaatatacctcgcctttgccgacacaagcttgaatgccggccccacaaatgccactatggagcctgcccaccttgcaagctgatctgcggggaagaatttccatgtgggcacacgtgtaaagaaaggtgtcatggccctatttctcctccaaactccgagttcacactgaaaccgacaaaaaagaaaatgggaaagcacatagaatgtacacctgggacaccgtgcccaccatgcaaagaggtggttttggtgtcatgctttgggcagcatcttggccaagaacgcactatgccatgttgcaaatggaggccttttccctgtgaaaatttatgtgggaatcctctcctttgtggcaaccattattgtacaaaatcttgccatgtgttagaagtcccattgaatcatcctgaaggagatcgtacaacatctatcagtaaagttagggagcctccttgttcacatccttgccctttgccatgtcatctgaacgattgtccttcttgtaaagtccttgttaaaagaccatgccattgtggtgctatggtgcatgcttttgaatgtgtgttttataacaacttaaatgcaaaggatcagattaaaataagatcttgtggtggcccatgtcatagaaagctaccaaattgcccccatctgtgttcagaagtatgtcaccctggtgtatgcccatcggttgatcagtgcatgaaaaaggtcaacacccgttgtgcatgcagcactctgaaacaagagtggcgatgtcaagatgtcctcaaggaataccgtaagtctggccgggatccaaaagaagtacctaaaagtcagtttggagttggcttacttgcctgcggtgaagattgcaagaagaagctgaaggctccagattcagagttgcatctccggaaaagtcaggagaacaagatccctgctgtggaagtcgtaaatgcacccaaacgcaggaagcggcgtgaccgtggacaagaagttaaaatttcgaaattccaggaagtgaagacttttgtgctgagagcgctactgattattttgctgtcaataatcgttgctgctggtctgtacctgttgtggaaaggtattttctggctttctgactggatgaacgaaatggaagagcagagggcgagtcaaaggtatccgaggggtgcaatgttgtaaaataaaacaattactttgagcctaataatcggtattgacatgtggattaattaatggttgttagggattcagttttgcaggatcataaacatgtcaccgttttctcactttttgtcactataaactagaaattgtatgcgtgatgtattgttgtatttttattttgctactctgcattgttaagtgaacaaacgatacaattactacatgattcatcgcttatatctgttaaaatgtacttcctctgttccaat

SEQ ID NO: 75534 - DNA, 3164 bp, Zea Mays
ggagagtctcagtcctcacagatcgcgcgcgcaccagcaccaccactgccgtctccggcgacgaccacgccgccggccatgccgtcctcctacgctgccgctgcagccggatcctcttcccgcaagccgaatcgcacctccagcgctgccgcacccactcttcgcccaccagcaccctcaccgtcgccggcacccgctcccctggcggtgaaccctagcgtcatctctgattccgacccctcctcctactcatcttcctctgcggatgaggccgatttcgccgcctccgactccgcaactgcctctgttgtctctgcctacctctcggttgctggcgagggggccgacctctcgaaagttggcattttcctctcatccgccgcgcgccgccgatcgccgccgtgccttatctgcttcgatcctatacgcccctctgacccggtgtggtcatgctcttcatcctgctttgccatcctccacctcccctgcatccagtcatgggcgcaccagtcagcatccgggcccgccgtgccgtgcccaacctggggatgccccaagtgccgcttcgcctaccccaagtccgagatcccctcctcctacgtctgcttctgctccaagaccatagacccggctccggacccctggatcctcccccactcttgtggcgacgtctgtggccgccgtcttgatgcgaatctcgactccggctgtgagcatacctgcctgctgctgtgccacccagggccatgcccgccatgcccggccgttgttcctaaagcgacgtgcttctgtggagtgcaccgggagccccgacgctgcgcacatcagcgttactcttgtggggggaaatgcaacaaacgtcttagctgtggactccaccactgtccagtggattgccatgatggcccctgcccgccgtgtgcagtgctggggagtcacaaatgtgagtgtggagagatattggaggagaaattgtgctctgaaaggattttccagtgcaagagggagtgtggtgggatgctagattgcggtaagcataagtgtgagagggggtgccatgggggcaagtgtggggaatgcccactccgaggtcgacgcacttgcccgtgtgggaagaaaaattatccaaggttggagtgtgatgcagaggctgccacatgcggatcaacttgtgagaaggtgcttgggtgtggacgacacaggtgccctgagcgctgccatcgtgggccatgtgatgggacttgccgtcttgtggttactaaggcctgccgttgcggggggttgaagaaggaggtgccctgctaccaagaattgacgtgtgaaagaaaatgtcaacgtttgcgaaactgtggtcgccatgcttgtaaacgacgttgctgtgctggagattgcccaccctgctctgagacttgtgataagaagctcagatgtggcaaccataaatgtctctcaccatgccacagaggcgcttgttcaccttgtcctctgatgaagaccatttcttgcgcctgtggaaaaacatgttttgaggttccttgtgggactgagaagaatcagaaaccacccaaatgctcaaagaaatgcaatatacctcgcctttgccgacacaagcttgaatgccggccccacaaatgccactatggagcctgcccaccttgcaagctgatctgcggggaagaatttccatgtgggcacacgtgtaaagaaaggtgtcatggccctatttctcctccaaactccgagttcacactgaaaccgacaaaaaagaaaatgggaaagcacatagaatgtacacctgggacaccgtgcccaccatgcaaagaggtggttttggtgtcatgctttgggcagcatcttggccaagaacgcactatgccatgttgcaaatggaggccttttccctgtgaaaatttatgtgggaatcctctcctttgtggcaaccattattgtacaaaatcttgccatgtgttagaagtcccattgaatcatcctgaaggagatcgtacaacatctatcagtaaagtgaacgcacttgctatgccttgtgaacaatgcaatcttccttgtcaaagggttagggagcctccttgttcacatccttgccctttgccatgtcatctgaacgattgtccttcttgtaaagtccttgttaaaagaccatgccattgtggtgctatggtgcatgcttttgaatgtgtgttttataacaacttaaatgcaaaggatcagattaaaataagatcttgtggtggcccatgtcataggtcagtttggctcctaactgtttccgtatcgaaaattgtacaatttttctgttgttactaaactcctatcacaaatttccttaaatttatttgattttaccaagcatctgaacatgctttttgaacagaaagctaccaaattgcccccatctgtgttcagaagtatgtcaccctggtgtatgcccatcggttgatcagtgcatgaaaaagcactctgaaacaagagtggcgatgtcaagatgtcctcaaggaataccgtaagtctggccgggatccaaaagaagtacctaaaagtcagtttggagttggcttacttgcctgcggtgaagattgcaagaagaagctgaaggctccagattcagagttgcatctccggaaaagtcaggagaacaagatccctgctgtggaagtcgtaaatgcacccaaacgcaggaagcggcgtgaccgtggacaagaagttaaaatttcgaaattccaggaagtgaagacttttgtgctgagagcgctactgattattttgctgtcaataatcgttgctgctggtctgtacctgttgtggaaaggtattttctggctttctgactggatgaacgaaatggaagagcagagggcgagtcaaaggtatccgaggggtgcaatgttgtaaaataaaacaattactttgagcctaataatcggtattgacatgtggattaattaatggttgttagggattcagttttgcaggatcataaacatgtcaccgttttctcactttttgtcactataaactagaaattgtatgcgtgatgtattgttgtatttttattttgctactctgcattgttaagtgaacaaacgatacaattactacatgattcatcgcttatatctgttaaaatgtacttcctctgttccaat

SEQ ID NO: 75535 - DNA, 3044 bp, Zea Mays
ggagagtctcagtcctcacagatcgcgcgcgcaccagcaccaccactgccgtctccggcgacgaccacgccgccggccatgccgtcctcctacgctgccgctgcagccggatcctcttcccgcaagccgaatcgcacctccagcgctgccgcacccactcttcgcccaccagcaccctcaccgtcgccggcacccgctcccctggcggtgaaccctagcgtcatctctgattccgacccctcctcctactcatcttcctctgcggatgaggccgatttcgccgcctccgactccgcaactgcctctgttgtctctgcctacctctcggttgctggcgagggggccgacctctcgaaagttggcattttcctctcatccgccgcgcgccgccgatcgccgccgtgccttatctgcttcgatcctatacgcccctctgacccggtgtggtcatgctcttcatcctgctttgccatcctccacctcccctgcatccagtcatgggcgcaccagtcagcatccgggcccgccgtgccgtgcccaacctggggatgccccaagtgccgcttcgcctaccccaagtccgagatcccctcctcctacgtctgcttctgctccaagaccatagacccggctccggacccctggatcctcccccactcttgtggcgacgtctgtggccgccgtcttgatgcgaatctcgactccggctgtgagcatacctgcctgctgctgtgccacccagggccatgcccgccatgcccggccgttgttcctaaagcgacgtgcttctgtggagtgcaccgggagccccgacgctgcgcacatcagcgttactcttgtggggggaaatgcaacaaacgtcttagctgtggactccaccactgtccagtggattgccatgatggcccctgcccgccgtgtgcagtgctggggagtcacaaatgtgagtgtggagagatattggaggagaaattgtgctctgaaaggattttccagtgcaagagggagtgtggtgggatgctagattgcggtaagcataagtgtgagagggggtgccatgggggcaagtgtggggaatgcccactccgaggtcgacgcacttgcccgtgtgggaagaaaaattatccaaggttggagtgtgatgcagaggctgccacatgcggatcaacttgtgagaaggtgcttgggtgtggacgacacaggtgccctgagcgctgccatcgtgggccatgtgatgggacttgccgtcttgtggttactaaggcctgccgttgcggggggttgaagaaggaggtgccctgctaccaagaattgacgtgtgaaagaaaatgtcaacgtttgcgaaactgtggtcgccatgcttgtaaacgacgttgctgtgctggagattgcccaccctgctctgagctcagatgtggcaaccataaatgtctctcaccatgccacagaggcgcttgttcaccttgtcctctgatgaagaccatttcttgcgcctgtggaaaaacatgttttgaggttccttgtgggactgagaagaatcagaaaccacccaaatgctcaaagaaatgcaatatacctcgcctttgccgacacaagcttgaatgccggccccacaaatgccactatggagcctgcccaccttgcaagctgatctgcggggaagaatttccatgtgggcacacgtgtaaagaaaggtgtcatggccctatttctcctccaaactccgagttcacactgaaaccgacaaaaaagaaaatgggaaagcacatagaatgtacacctgggacaccgtgcccaccatgcaaagaggtggttttggtgtcatgctttgggcagcatcttggccaagaacgcactatgccatgttgcaaatggaggccttttccctgtgaaaatttatgtgggaatcctctcctttgtggcaaccattattgtacaaaatcttgccatgtgttagaagtcccattgaatcatcctgaaggagatcgtacaacatctatcagtaaagtgaacgcacttgctatgccttgtgaacaatgcaatcttccttgtcaaagggttagggagcctccttgttcacatccttgccctttgccatgtcatctgaacgattgtccttcttgtaaagtccttgttaaaagaccatgccattgtggtgctatggtgcatgcttttgaatgtgtgttttataacaacttaaatgcaaaggatcagattaaaataagatcttgtggtggcccatgtcatagaaagctaccaaattgcccccatctgtgttcagaagtatgtcaccctggtgtatgcccatcggttgatcagtgcatgaaaaaggtcaacacccgttgtgcatgcagcactctgaaacaagagtggcgatgtcaagatgtcctcaaggaataccgtaagtctggccgggatccaaaagaagtacctaaaagtcagtttggagttggcttacttgcctgcggtgaagattgcaagaagaagctgaaggctccagattcagagttgcatctccggaaaagtcaggagaacaagatccctgctgtggaagtcgtaaatgcacccaaacgcaggaagcggcgtgaccgtggacaagaagttaaaatttcgaaattccaggaagtgaagacttttgtgctgagagcgctactgattattttgctgtcaataatcgttgctgctggtctgtacctgttgtggaaaggtattttctggctttctgactggatgaacgaaatggaagagcagagggcgagtcaaaggtatccgaggggtgcaatgttgtaaaataaaacaattactttgagcctaataatcggtattgacatgtggattaattaatggttgttagggattcagttttgcaggatcataaacatgtcaccgttttctcactttttgtcactataaactagaaattgtatgcgtgatgtattgttgtatttttattttgctactctgcattgttaagtgaacaaacgatacaattactacatgattcatcgcttatatctgttaaaatgtacttcctctgttccaat

SEQ ID NO: 75536 - DNA, 3046 bp, Zea Mays
ggagagtctcagtcctcacagatcgcgcgcgcaccagcaccaccactgccgtctccggcgacgaccacgccgccggccatgccgtcctcctacgctgccgctgcagccggatcctcttcccgcaagccgaatcgcacctccagcgctgccgcacccactcttcgcccaccagcaccctcaccgtcgccggcacccgctcccctggcggtgaaccctagcgtcatctctgattccgacccctcctcctactcatcttcctctgcggatgaggccgatttcgccgcctccgactccgcaactgcctctgttgtctctgcctacctctcggttgctggcgagggggccgacctctcgaaagttggcattttcctctcatccgccgcgcgccgccgatcgccgccgtgccttatctgcttcgatcctatacgcccctctgacccggtgtggtcatgctcttcatcctgctttgccatcctccacctcccctgcatccagtcatgggcgcaccagtcagcatccgggcccgccgtgccgtgcccaacctggggatgccccaagtgccgcttcgcctaccccaagtccgagatcccctcctcctacgtctgcttctgctccaagaccatagacccggctccggacccctggatcctcccccactcttgtggcgacgtctgtggccgccgtcttgatgcgaatctcgactccggctgtgagcatacctgcctgctgctgtgccacccagggccatgcccgccatgcccggccgttgttcctaaagcgacgtgcttctgtggagtgcaccgggagccccgacgctgcgcacatcagcgttactcttgtggggggaaatgcaacaaacgtcttagctgtggactccaccactgtccagtggattgccatgatggcccctgcccgccgtgtgcagtgctggggagtcacaaatgtgagtgtggagagatattggaggagaaattgtgctctgaaaggattttccagtgcaagagggagtgtggtgggatgctagattgcggtaagcataagtgtgagagggggtgccatgggggcaagtgtggggaatgcccactccgaggtcgacgcacttgcccgtgtgggaagaaaaattatccaaggttggagtgtgatgcagaggctgccacatgcggatcaacttgtgagaaggtgcttgggtgtggacgacacaggtgccctgagcgctgccatcgtgggccatgtgatgggacttgccgtcttgtggttactaaggcctgccgttgcggggggttgaagaaggaggtgccctgctaccaagaattgacgtgtgaaagaaaatgtcaacgtttgcgaaactgtggtcgccatgcttgtaaacgacgttgctgtgctggagattgcccaccctgctctgagacttgtgataagaagctcagatgtggcaaccataaatgtctctcaccatgccacagaggcgcttgttcaccttgtcctctgatgaagaccatttcttgcgcctgtggaaaaacatgttttgaggtggaattcggttccttgtgggactgagaagaatcagaaaccacccaaatgctcaaagaaatgcaatatacctcgcctttgccgacacaagcttgaatgccggccccacaaatgccactatggagcctgcccaccttgcaagctgatctgcggggaagaatttccatgtgggcacacgtgtaaagaaaggtgtcatggccctatttctcctccaaactccgagttcacactgaaaccgacaaaaaagaaaatgggaaagcacatagaatgtacacctgggacaccgtgcccaccatgcaaagaggtggttttggtgtcatgctttgggcagcatcttggccaagaacgcactatgccatgttgcaaatggaggccttttccctgtgaaaatttatgtgggaatcctctcctttgtggcaaccattattgtacaaaatcttgccatgtgttagaagtcccattgaatcatcctgaaggagatcgtacaacatctatcagtaaagtgaacgcacttgctatgccttgtgaacaatgcaatcttccttgtcaaagggttagggagcctccttgttcacatccttgccctttgccatgtcatctgaacgattgtccttcttgtaaagtccttgttaaaagaccatgccattgtggtgctatggtgcatgcttttgaatgtgtgttttataacaacttaaatgcaaaggatcagattaaaataagatcttgtggtggcccatgtcatagaaagctaccaaattgcccccatctgtgttcagaagtatgtcaccctggtgtatgcccatcggttgatcagtgcatgaaaaagcactctgaaacaagagtggcgatgtcaagatgtcctcaaggaataccgtaagtctggccgggatccaaaagaagtacctaaaagtcagtttggagttggcttacttgcctgcggtgaagattgcaagaagaagctgaaggctccagattcagagttgcatctccggaaaagtcaggagaacaagatccctgctgtggaagtcgtaaatgcacccaaacgcaggaagcggcgtgaccgtggacaagaagttaaaatttcgaaattccaggaagtgaagacttttgtgctgagagcgctactgattattttgctgtcaataatcgttgctgctggtctgtacctgttgtggaaaggtattttctggctttctgactggatgaacgaaatggaagagcagagggcgagtcaaaggtatccgaggggtgcaatgttgtaaaataaaacaattactttgagcctaataatcggtattgacatgtggattaattaatggttgttagggattcagttttgcaggatcataaacatgtcaccgttttctcactttttgtcactataaactagaaattgtatgcgtgatgtattgttgtatttttattttgctactctgcattgttaagtgaacaaacgatacaattactacatgattcatcgcttatatctgttaaaatgtacttcctctgttccaat

SEQ ID NO: 75537 - DNA, 3028 bp, Zea Mays
ggggacactactgctggagagtctcagtcctcacagatcgcgcgcgcaccagcaccaccactgccgtctccggcgacgaccacgccgccggccatgccgtcctcctacgctgccgctgcagccggatcctcttcccgcaagccgaatcgcacctccagcgctgccgcacccactcttcgcccaccagcaccctcaccgtcgccggcacccgctcccctggcggtgaaccctagcgtcatctctgattccgacccctcctcctactcatcttcctctgcggatgaggccgatttcgccgcctccgactccgcaactgcctctgttgtctctgcctacctctcggttgctggcgagggggccgacctctcgaaagttggcattttcctctcatccgccgcgcgccgccgatcgccgccgtgccttatctgcttcgatcctatacgcccctctgacccggtgtggtcatgctcttcatcctgctttgccatcctccacctcccctgcatccagtcatgggcgcaccagtcagcatccgggcccgccgtgccgtgcccaacctggggatgccccaagtgccgcttcgcctaccccaagtccgagatcccctcctcctacgtctgcttctgctccaagaccatagacccggctccggacccctggatcctcccccactcttgtggcgacgtctgtggccgccgtcttgatgcgaatctcgactccggctgtgagcatacctgcctgctgctgtgccacccagggccatgcccgccatgcccggccgttgttcctaaagcgacgtgcttctgtggagtgcaccgggagccccgacgctgcgcacatcagcgttactcttgtggggggaaatgcaacaaacgtcttagctgtggactccaccactgtccagtggattgccatgatggcccctgcccgccgtgtgcagtgctggggagtcacaaatgtgagtgtggagagatattggaggagaaattgtgctctgaaaggattttccagtgcaagagggagtgtggtgggatgctagattgcggtaagcataagtgtgagagggggtgccatgggggcaagtgtggggaatgcccactccgaggtcgacgcacttgcccgtgtgggaagaaaaattatccaaggttggagtgtgatgcagaggctgccacatgcggatcaacttgtgagaaggtgcttgggtgtggacgacacaggtgccctgagcgctgccatcgtgggccatgtgatgggacttgccgtcttgtggttactaaggcctgccgttgcggggggttgaagaaggaggtgccctgctaccaagaattgacgtgtgaaagaaaatgtcaacgtttgcgaaactgtggtcgccatgcttgtaaacgacgttgctgtgctggagattgcccaccctgctctgagaggcgcttgttcaccttgtcctctgatgaagaccatttcttgcgcctgtggaaaaacatgttttgaggtggaattcggttccttgtgggactgagaagaatcagaaaccacccaaatgctcaaagaaatgcaatatacctcgcctttgccgacacaagcttgaatgccggccccacaaatgccactatggagcctgcccaccttgcaagctgatctgcggggaagaatttccatgtgggcacacgtgtaaagaaaggtgtcatggccctatttctcctccaaactccgagttcacactgaaaccgacaaaaaagaaaatgggaaagcacatagaatgtacacctgggacaccgtgcccaccatgcaaagaggtggttttggtgtcatgctttgggcagcatcttggccaagaacgcactatgccatgttgcaaatggaggccttttccctgtgaaaatttatgtgggaatcctctcctttgtggcaaccattattgtacaaaatcttgccatgtgttagaagtcccattgaatcatcctgaaggagatcgtacaacatctatcagtaaagtgaacgcacttgctatgccttgtgaacaatgcaatcttccttgtcaaagggttagggagcctccttgttcacatccttgccctttgccatgtcatctgaacgattgtccttcttgtaaagtccttgttaaaagaccatgccattgtggtgctatggtgcatgcttttgaatgtgtgttttataacaacttaaatgcaaaggatcagattaaaataagatcttgtggtggcccatgtcatagaaagctaccaaattgcccccatctgtgttcagaagtatgtcaccctggtgtatgcccatcggttgatcagtgcatgaaaaaggtcaacacccgttgtgcatgcagcactctgaaacaagagtggcgatgtcaagatgtcctcaaggaataccgtaagtctggccgggatccaaaagaagtacctaaaagtcagtttggagttggcttacttgcctgcggtgaagattgcaagaagaagctgaaggctccagattcagagttgcatctccggaaaagtcaggagaacaagatccctgctgtggaagtcgtaaatgcacccaaacgcaggaagcggcgtgaccgtggacaagaagttaaaatttcgaaattccaggaagtgaagacttttgtgctgagagcgctactgattattttgctgtcaataatcgttgctgctggtctgtacctgttgtggaaaggtattttctggctttctgactggatgaacgaaatggaagagcagagggcgagtcaaaggtatccgaggggtgcaatgttgtaaaataaaacaattactttgagcctaataatcggtattgacatgtggattaattaatggttgttagggattcagttttgcaggatcataaacatgtcaccgttttctcactttttgtcactataaactagaaattgtatgcgtgatgtattgttgtatttttattttgctactctgcattgttaagtgaacaaacgatacaattactacatgattcatcgcttatatctgttaaaatgtacttcctctgttccaat

SEQ ID NO: 75538 - DNA, 3160 bp, Zea Mays
ctgagaatatatagatgacaaaattttttagagtgttctgtaaacagagaatattgctttaggggacgggaatttaggggacactactgctggagagtctcagtcctcacagatcgcgcgcgcaccagcaccaccactgccgtctccggcgacgaccacgccgccggccatgccgtcctcctacgctgccgctgcagccggatcctcttcccgcaagccgaatcgcacctccagcgctgccgcacccactcttcgcccaccagcaccctcaccgtcgccggcacccgctcccctggcggtgaaccctagcgtcatctctgattccgacccctcctcctactcatcttcctctgcggatgaggccgatttcgccgcctccgactccgcaactgcctctgttgtctctgcctacctctcggttgctggcgagggggccgacctctcgaaagttggcattttcctctcatccgccgcgcgccgccgatcgccgccgtgccttatctgcttcgatcctatacgcccctctgacccggtgtggtcatgctcttcatcctgctttgccatcctccacctcccctgcatccagtcatgggcgcaccagtcagcatccgggcccgccgtgccgtgcccaacctggggatgccccaagtgccgcttcgcctaccccaagtccgagatcccctcctcctacgtctgcttctgctccaagaccatagacccggctccggacccctggatcctcccccactcttgtggcgacgtctgtggccgccgtcttgatgcgaatctcgactccggctgtgagcatacctgcctgctgctgtgccacccagggccatgcccgccatgcccggccgttgttcctaaagcgacgtgcttctgtggagtgcaccgggagccccgacgctgcgcacatcagcgttactcttgtggggggaaatgcaacaaacgtcttagctgtggactccaccactgtccagtggattgccatgatggcccctgcccgccgtgtgcagtgctggggagtcacaaatgtgagtgtggagagatattggaggagaaattgtgctctgaaaggattttccagtgcaagagggagtgtggtgggatgctagattgcggtaagcataagtgtgagagggggtgccatgggggcaagtgtggggaatgcccactccgaggtcgacgcacttgcccgtgtgggaagaaaaattatccaaggttggagtgtgatgcagaggctgccacatgcggatcaacttgtgagaaggtgcttgggtgtggacgacacaggtgccctgagcgctgccatcgtgggccatgtgatgggacttgccgtcttgtggttactaaggcctgccgttgcggggggttgaagaaggaggtgccctgctaccaagaattgacgtgtgaaagaaaatgtcaacgtttgcgaaactgtggtcgccatgcttgtaaacgacgttgctgtgctggagattgcccaccctgctctgagacttgtgataagaagctcagatgtggcaaccataaatgtctctcaccatgccacagaggcgcttgttcaccttgtcctctgatgaagaccatttcttgcgcctgtggaaaaacatgttttgaggtggaattcggttccttgtgggactgagaagaatcagaaaccacccaaatgctcaaagaaatgcaatatacctcgcctttgccgacacaagcttgaatgccggccccacaaatgccactatggagcctgcccaccttgcaagctgatctgcggggaagaatttccatgtgggcacacgtgtaaagaaaggtgtcatggccctatttctcctccaaactccgagttcacactgaaaccgacaaaaaagaaaatgggaaagcacatagaatgtacacctgggacaccgtgcccaccatgcaaagaggtggttttggtgtcatgctttgggcagcatcttggccaagaacgcactatgccatgttgcaaatggaggccttttccctgtgaaaatttatgtgggaatcctctcctttgtggcaaccattattgtacaaaatcttgccatgtgttagaagtcccattgaatcatcctgaaggagatcgtacaacatctatcagtaaagtgaacgcacttgctatgccttgtgaacaatgcaatcttccttgtcaaagggttagggagcctccttgttcacatccttgccctttgccatgtcatctgaacgattgtccttcttgtaaagtccttgttaaaagaccatgccattgtggtgctatggtgcatgcttttgaatgtgtgttttataacaacttaaatgcaaaggatcagattaaaataagatcttgtggtggcccatgtcatagaaagctaccaaattgcccccatctgtgttcagaagtatgtcaccctggtgtatgcccatcggttgatcagtgcatgaaaaaggtcaacacccgttgtgcatgcagcactctgaaacaagagtggcgatgtcaagatgtcctcaaggaataccgtaagtctggccgggatccaaaagaagtacctaaaagtcagtttggagttggcttacttgcctgcggtgaagattgcaagaagaagctgaaggctccagattcagagttgcatctccggaaaagtcaggagaacaagatccctgctgtggaagtcgtaaatgcacccaaacgcaggaagcggcgtgaccgtggacaagaagttaaaatttcgaaattccaggaagtgaagacttttgtgctgagagcgctactgattattttgctgtcaataatcgttgctgctggtctgtacctgttgtggaaaggtattttctggctttctgactggatgaacgaaatggaagagcagagggcgagtcaaaggtatccgaggggtgcaatgttgtaaaataaaacaattactttgagcctaataatcggtattgacatgtggattaattaatggttgttagggattcagttttgcaggatcataaacatgtcaccgttttctcactttttgtcactataaactagaaattgtatgcgtgatgtattgttgtatttttattttgctactctgcattgttaagtgaacaaacgatacaattactacatgattcatcgcttatatctgttaaaatgtacttcctctgttccaat

SEQ ID NO: 75539 - DNA, 2025 bp, Zea Mays
ttccgctctctgctttgtttacgcaggcgacgcaagccacgcagcgcgccgccgccgccgcgtctcctctccgccccgcgaagcttccggggggccctcttccttcctccgccccagccctcgagtcggtctccaccggcggcagcgggcttccgcgccggcgccggactgggtcggcccggccacgagattattaagggcaggcagacattacttgttttatggctagaaataatgagggtcatctccagctgccagagatggatcatattcaacccaagaacaccccgcacaatgaaccactgcctctaggccagaagcttatgctgcatcatggaagtgatgcaccccttagaattggtcattcaagtcatgagaatatgagacttagatcaaatgatcttccacctttaagtcacactgtgcaaactcaaggttatagagttgggaacccaggagcctcgcatgctccttttgttcattgtcatgctggaagttccagtagtcatttaccagaacctgctgtgaattatccacataggtcggaggaaggctttgctccagtgggttcccatatggacaacagaagggctgcaacgaagcgaaaagatcctattgtgcaccctgctgggatcagtgctactggttattatgttggaagttcttccaatactcagctatctaactctgtgcagccaaatcctgctccactttctgagcccttacttcgtcaaatacctttaagcattgaccgaagtggttgggatggcctacacttaattcatcaagaaggatttcagaggaatgtgagagcacgccagcgccacagccataatatttcattagagcccagaacagcttcaacctacccactaaacagtgttcatgtgccatcatttggttcaactacaagtgcttccttaagtatgtcagtggaaaggaaccaagcatctgtttctgtgccaacaagaaatgtaccatcaggtgcaccaggtatcactagcaggtccctgacaaggagggcttactatcctgtggttggaagtagcaactcaagcgttgatgtcgttccaactatctgtggatcatctggcgcagcaatatttgctaatggtggctatgctcttaatgctgatgctggaactgtttctatctaccctaatccagctcctgctacttcatctggctctataaccatgcccatgcccatgctccatcagatggtcattcagagccatccacctgctacctctgcagcaacctctacatccatgtggatcgctcaaccattacctgccagaactgctgcggcttctagacatgcaagacgcgtatcagcagggcttgccaacaatggaaggtacagaagggctaggagctcttactacagccttcatccactgatgatggtagaggcagagcggttcatgatggaccagttggtcttttacgaatcaagagcagcagccgctgacccccacagggacatgagactggacatcgacaacatgagctacgaggacctgttggctttgggagaatctatgggcaatgtcaacacaggcttggccgatgagaaaatttcgaagtgcgtgaaagaagtggtctgctgcagttccgaccagatgcaaaccgatcaagatgaccaggatgacgacggaagctgcgtcatctgcctgagacaaggatatgctggggatactgaaatgcaggcacgacttccacgccggctgcatcaagaagtggctgcagacgaagaactcgtgcccggtgtgcaaagccgccgccgcctaggacgacaccagaggagcgagcaactattttgtgctcctcctcgatccattcattttttaggctcaggtcgaattatatatgccgttccattcttttgattcctggcagtcgtgtaaataaatgctctgtgttggttattttagttatcacttgggttacattagcccaaattctcctgttgcattgtaaacaatccagtggtgaaggcaattgatcaagtggttgcaagcg

SEQ ID NO: 75540 - DNA, 2071 bp, Zea Mays
gttcctctactagtccttctcctctctctttcacacacacacacgcggccaaattccgctctctgctttgtttacgcaggcgacgcaagccacgcagcgcgccgccgccgccgcgtctcctctccgccccgcgaagcttccggggggccctcttccttcctccgccccagccctcgagtcggtctccaccggcggcagcgggcttccgcgccggcgccggactgggtcggcccggccacgagattattaagggcaggcagacattacttgttttatggctagaaataatgagggtcatctccagctgccagagatggatcatattcaacccaagaacaccccgcacaatgaaccactgcctctaggccagaagcttatgctgcatcatggaagtgatgcaccccttagaattggtcattcaagtcatgagaatatgagacttagatcaaatgatcttccacctttaagtcacactgtgcaaactcaaggttatagagttgggaacccaggagcctcgcatgctccttttgttcattgtcatgctggaagttccagtagtcatttaccagaacctgctgtgaattatccacataggtcggaggaaggctttgctccagtgggttcccatatggacaacagaagggctgcaacgaagcgaaaagatcctattgtgcaccctgctgggatcagtgctactggttattatgttggaagttcttccaatactcagctatctaactctgtgcagccaaatcctgctccactttctgagcccttacttcgtcaaatacctttaagcattgaccgaagtggttgggatggcctacacttaattcatcaagaaggatttcagaggaatgtgagagcacgccagcgccacagccataatatttcattagagcccagaacagcttcaacctacccactaaacagtgttcatgtgccatcatttggttcaactacaagtgcttccttaagtatgtcagtggaaaggaaccaagcatctgtttctgtgccaacaagaaatgtaccatcaggtgcaccaggtatcactagcaggtccctgacaaggagggcttactatcctgtggttggaagtagcaactcaagcgttgatgtcgttccaactatctgtggatcatctggcgcagcaatatttgctaatggtggctatgctcttaatgctgatgctggaactgtttctatctaccctaatccagctcctgctacttcatctggctctataaccatgcccatgcccatgctccatcagatggtcattcagagccatccacctgctacctctgcagcaacctctacatccatgtggatcgctcaaccattacctgccagaactgctgcggcttctagacatgcaagacgcgtatcagcagggcttgccaacaatggaaggtacagaagggctaggagctcttactacagccttcatccactgatgatggtagaggcagagttggtcttttacgaatcaagagcagcagccgctgacccccacagggacatgagactggacatcgacaacatgagctacgaggacctgttggctttgggagaatctatgggcaatgtcaacacaggcttggccgatgagaaaatttcgaagtgcgtgaaagaagtggtctgctgcagttccgaccagatgcaaaccgatcaagatgaccaggatgacgacggaagctgcgtcatctgcctggagggttacagagacaaggatatgctggggatactgaaatgcaggcacgacttccacgccggctgcatcaagaagtggctgcagacgaagaactcgtgcccggtgtgcaaagccgccgccgcctaggacgacaccagaggagcgagcaactattttgtgctcctcctcgatccattcattttttaggctcaggtcgaattatatatgccgttccattcttttgattcctggcagtcgtgtaaataaatgctctgtgttggttattttagttatcacttgggttacattagcccaaattctcctgttgcattgtaaacaatccagtggtgaaggcaattgatcaagtggttgcaagcg

SEQ ID NO: 75541 - DNA, 877 bp, Zea Mays
ggcccgtcactcacccctctctctcccgccggccccgttcctctactagtccttctcctctctctttcacacacacacacgcggccaaattccgctctctgctttgtttacgcaggcgacgcaagccacgcagcgcgccgccgccgccgcgtctcctctccgccccgcgaagcttccggggggccctcttccttcctccgccccagccctcgagtcggtctccaccggcggcagcgggcttccgcgccggcgccggactgggtcggcccggccacgagtaatctaaggttcacacaaggcgccatggcaatcattctaggagagcacttcaacaagccactattccactagagttggtttttgtgaatctaccatggggacgaccacaagagcctccgatgatcaaagatggcaacaatcgcaattgtcgcttaatgatccttcgttgcaccaaagccgattaagtggcgacaaccaccaaaactaacaagaatctgctcaactagatcaatagtgccattagattactcctcaatctcactaagaatgtatcactgtcactagatgtgggtgagagatgttttcgtgcttaccaggatgtatactcagttgatattgataagccatgatatctcccttaagaccgcacaacatctatttataaggtcgtaaggctcaactagttgttggaaccgtaaccggatcctctgcagtacttcccggccaccaccgtgtgggcgcagggcgtggcggggcctgcacacagtgacccggcaaggggctacgtcccgggaagtacaacagaggatccactcgcgttggaatcaacccactctagcccgtgggtcatcgaaccatctgaaccctagcatcggac

SEQ ID NO: 75542 - DNA, 738 bp, Zea Mays
gtcactcacccctctctctcccgccggccccgttcctctactagtccttctcctctctctttcacacacacacacgcggccaaattccgctctctgctttgtttacgcaggcgacgcaagccacgcagcgcgccgccgccgccgcgtctcctctccgccccgcgaagcttccggggggccctcttccttcctccgccccagccctcgagtcggtctccaccggcggcagcgggcttccgcgccggcgccggactgggtcggcccggccacgagcctgtctccagttgtgcaagctggttcctattagtatttgcaagatgaaccttatccagaagaaatccaagctagttatctgttgaatttggagttggctggatttaccaatgagcagacaaaaggcagaagtgcacccgccaagaattttaggaatggcagaatatgggcccctccatgcatatattgcttggagcatttcttctttcatttgcatctgcttttatttttctttctatattttgtttcttcatgctatgtaaagtaaaattaactttgtttgatttgttactaagatgtataaaaaacttggaagtaataatgtcatatacattctggctgtaaatctatttgatatatgagtgcctatttatataaaaaaatggttatttttctggcctctatggtatatttgaaattctacttgaaattgctatgggttatttgcattgttaggttccactg

SEQ ID NO: 75543 - DNA, 2323 bp, Zea Mays
ccttctagcaggctcgctgagacgctgacacgcccagccccacgcagttccacccatagattttgtttctttgcgacacagctccaccgtaaaatgccacgggcacgacttccactggactccaacgctccaacccacccgacaaccatcctagtatacacgccaagtcgccagccagcatttcctcccgaaccatccttccactccctcgccgaccctccccccgcgcccgccatggacacggcgatcggctccgtcccggcagcctccgacgcggcgcgtcacccagcgccgtccgcgtccgccccgcgcgacgcgacgctgggccggcacctggcgcggcgcctggcggaggtgggcgcccgggacgtgttcacggtgccgggggacttcaacctcacgctcctcgacgagctggaggccgagccgggcggcgtccgcctcgtcggctgctgcaacgagctcaacgcggcgtacgcggccgacgggtacgcccgcgcgcgcgccggcggggtcggcgcctgcgccgtcaccttcaccgtcggcggcctcagcgccatcaacggcgtcgccggcgccttcagcgagaacctccccgtcgtgtgcatcgtcggcggacccaacagcaacgactacgggagtaacaggatcctgcaccataccatcggcttgcctgatttcacgcaggagctcaggtgcttccagaacgtcacgtgctatcaggctgtggtgaacaacttggaagatgcgcatgagcagatcgacactgccatctccacggcaatcaaggagagcaagcctgtttacattagcatcagctgcaacctcccttcgatcccacatcccaccttcagccgccatcccgtccctttcttcctctccccaaggctatcgaaccagatgaacctggaggctgcagtggaagccgccgcggctttcttgaacaaagccgtcaagccagtgcttgtaggtgggccaaagatgagggtgtccaaagcatgggaagccttggcagagctggcagatgcctgcggctatcccgttgccgtgatgccttctgcgaaggggctagtgccagtgcaccactctaggttcattggcacgtactggggtgcggtgagcactccattctgtgctgagatcgtcgagtctgccgatgcctacctatttgctggccccgtattcaacgactacagctcggttgggtactcgctgctcctcaagaaggagaaggccatcattgtccaaccagagcgggtggtggtcgggcatggacccgcgtttgggtgtgttctgatgaaggatttccttcatgcccttgcaacccgtctgaagaagaacactgtcgcgtatgagaactaccgtcgaatttatgtgcctccaggcgaaccactttcatctgaacctggcgagccgttgagagtgaacgtgctcttcaagcatattcaggcaatgctgtccggcgacatggctgtcatcgcagagactggggactcgtggtttaactgccagaagctgaagctaccggaaggatgtacgaattccagatgcagtatggatcaattggctggtcagtgggcgcaactctaggatacgcacaggctgccaaggataaacgtgtcattgcctgcattggagacggcagctttcaggtgacggcacaagaagtgtcaacgatgctccggtgggggcagaacagcatcatcttcctgataaacaatggagggtacacaatcgaggtggagattcacgatggcccttataacgttatcaagaactggaactacaccggtctggtggaagcgttccacaatggcgagggcgcgtgctacacagcaaaggttcgaacagaggaggagctgacggaggcgctggaggcagctctaggacctaagaaggactgcttatgcttcatcgaggtcatcgtgcataaggatgacaccagcaaagcgcttctcgagtggggatctagggtttctgcggcgaatagccgtccacctaatcctcagtgaatacatcaggtctcccgaattgccctgtaaaccgatccgctttctggtgacgcccataacaagaagtctcggcgatgacatgctgccgatttctgaataaattgtccctgtaattcactgatgttgcaagtccttgttgtaaaactagagagccgcttggaggaatcatggacagtctaaactcgggtctgagtatatacaagctgattgagtcctagataaatacaatatggacttaaactagatttcagtctatttcattattggaacatccacttggttataactctttatcctatacaatatctttt

SEQ ID NO: 75544 - DNA, 1180 bp, Zea Mays
cctgatctagctttctggctctagcgtaaaaaaaatgctcaaatatttgcctcatatttcattccagtcgaaaaaaggatggggcaccgacgagcaggcggtgatctccatcttggcccaccgcgacgccactcagaggaagcagatcgcgctggagtacgagcacgagtacagcgagagcctaatccagcgcctgcagtcggagctcaccggcgacctcgagagagcggtgtaccactggatgctcggccccgccgagaggcaggctgcgatggcgcacgccgcgacggagtgcgtccaggagcggtacgcggtggtcgtggagatcgcgtgcgccaccaactcgtccgcggagctcgtgtccgtcaagcaagcctaccacgtcctgtaccgccgctccctggaggaagacgtcgccgctcgtgccacgggcaaccttcgcagcgtacgacggcgacgacaacgtggacgcggagctagcgcggtcggaggcgaagatcgtgcacgaggccgtgaggaacagcgcgggcgcggcggggggccgccacgaccacgaggagctcatcagggtcctgggcacccggagcaaggcccagctcagggccacgttcagctgcttcaaggaccaggacgagcaccgccgcagcgtcaccaaggcgctgccgcgcggggccgacgatcccacgggctacctccgcgcgctgcgggcggcggtgaggtgcgtcgcggatccgaccaagtacttcgccaaggtgctgaggaacgcgacgcgcgaggcagcagggaccgacgaggatagcctgacccgggtggtggtgctgcacgcggagaaggatgacatgggggccatctgcggtgcgttccagaagagggcttcgtgtaccttgcagcaggctatcgccaaggaaacctcgggtgactacagcagcttcctgctggctctccttggaagctaaacaaacaatacaatataatcccttcgagtttgattaagcagcgtacgtacgagtggttgtaataagcttagtaactatgcactttggtgctagctatcgaagttataaataaaagtgaggtgtttggtaacatccaaccagtgctatctctagcaacagagatgttaaaggaaaggctgattttgaatatagaaattaaagttttcatttagtaagcatcaatc

SEQ ID NO: 75545 - DNA, 1415 bp, Zea Mays
taaagctaaaactaactggggaaaaaataacggagtaacgctgaatcgcgattgacatgcggtttcttcaaggtttcgttcgattaataaatgcccggtagcaaacgctaagatacagtcttatccataaataccaagggggggaatgcggcgattgacaataaaccagtctggagaacaaggaaagaagaagaagaagagaagaaaatggcaacgattacccttcctcgagttgtcccttcccccgccgaagacgccgcggctctcctcaaggctttccaaggatggggcaccgacgagcaggcggtgatctccatcttggcccaccgcgacgccactcagaggaagcagatcgcgctggagtacgagcacgagtacagcgagagcctaatccagcgcctgcagtcggagctcaccggcgacctcgagagagcggtgtaccactggatgctcggccccgccgagaggcaggctgcgatggcgcacgccgcgacggagtgcgtccaggagcggtacgcggtggtcgtggagatcgcgtgcgccaccaactcgtccgcggagctcgtgtccgtcaagcaagcctaccacgtcctgtaccgccgctccctggaggaagacgtcgccgctcgtgccacgggcaaccttcgcagccttctgctggcgctggtgagcacgtacaggtacgacggcgacgacaacgtggacgcggagctagcgcggtcggaggcgaagatcgtgcacgaggccgtgaggaacagcgcgggcgcggcggggggccgccacgaccacgaggagctcatcagggtcctgggcacccggagcaaggcccagctcagggccacgttcagctgcttcaaggaccaggacgagcaccgccgcagcgtcaccaaggcgctgccgcgcggggccgacgatcccacgggctacctccgcgcgctgcgggcggcggtgaggtgcgtcgcggatccgaccaagtacttcgccaaggtgctgaggaacgcgacgcgcgaggcagcagggaccgacgaggatagcctgacccgggtggtggtgctgcacgcggagaaggatgacatgggggccatctgcggtgcgttccagaagagggcttcgtgtaccttgcagcaggctatcgccaaggaaacctcgggtgactacagcagcttcctgctggctctccttggaagctaaacaaacaatacaatataatcccttcgagtttgattaagcagcgtacgtacgagtggttgtaataagcttagtaactatgcactttggtgctagctatcgaagttataaataaaagtgaggtgtttggtaacatccaaccagtgctatctctagcaacagagatgttaaaggaaaggctgattttgaatatagaaattaaagttttcatttagtaagcatcaatc

SEQ ID NO: 75546 - DNA, 1386 bp, Zea Mays
taaagctaaaactaactggggaaaaaataacggagtaacgctgaatcgcgattgacatgcggtttcttcaaggtttcgttcgattaataaatgcccggtagcaaacgctaagatacagtcttatccataaataccaagggggggaatgcggcgattgacaataaaccagtctggagaacaaggaaagaagaagaagaagagaagaaaatggcaacgattacccttcctcgagttgtcccttcccccgccgaagacgccgcggctctcctcaaggctttccaaggatggggcaccgacgagcaggcggtgatctccatcttggcccaccgcgacgccactcagaggaagcagatcgcgctggagtacgagcacgagtacagcgagagcctaatccagcgcctgcagtcggagctcaccggcgacctcgagagagcggtgtaccactggatgctcggccccgccgagaggcaggctgcgatggcgcacgccgcgacggagtgcgtccaggagcggtacgcggtggtcgtggagatcgcgtgcgccaccaactcgtccgcggagctcgtgtccgtcaagcaagcctaccacgtcctgtaccgccgctccctggaggaagacgtcgccgctcgtgccacgggcaaccttcgcagcgtacgacggcgacgacaacgtggacgcggagctagcgcggtcggaggcgaagatcgtgcacgaggccgtgaggaacagcgcgggcgcggcggggggccgccacgaccacgaggagctcatcagggtcctgggcacccggagcaaggcccagctcagggccacgttcagctgcttcaaggaccaggacgagcaccgccgcagcgtcaccaaggcgctgccgcgcggggccgacgatcccacgggctacctccgcgcgctgcgggcggcggtgaggtgcgtcgcggatccgaccaagtacttcgccaaggtgctgaggaacgcgacgcgcgaggcagcagggaccgacgaggatagcctgacccgggtggtggtgctgcacgcggagaaggatgacatgggggccatctgcggtgcgttccagaagagggcttcgtgtaccttgcagcaggctatcgccaaggaaacctcgggtgactacagcagcttcctgctggctctccttggaagctaaacaaacaatacaatataatcccttcgagtttgattaagcagcgtacgtacgagtggttgtaataagcttagtaactatgcactttggtgctagctatcgaagttataaataaaagtgaggtgtttggtaacatccaaccagtgctatctctagcaacagagatgttaaaggaaaggctgattttgaatatagaaattaaagttttcatttagtaagcatcaatc

SEQ ID NO: 75547 - DNA, 5178 bp, Zea Mays
ctagattctagcagcatctacgatgaaccctgctccccggcacccaagcacgaagattgaaaccttttttactgcaacaccaagtgcacagacacaaaatcaaaccaatgaaaggtatggaacatatcctgttgctgcccgtaatcttcgggaagatgagctaggaggagtgatttttggctgcaaacacaacacaatcggtgaatgcctctctaaacagctgtttggtttgccttcaagccatttctcatatgtgaagaatgtcaaacctggcatgcctctatttctgttcaattatagcgatcgaaaaatgcatggaatttatgaggctgcaagtgctggcaagcttaacattgaccaatttgcttggagtgatggtggtagaataaagacacaatttcctgcacaggtcctcatctctatgaagactgcctgccttccagttccagaatctcaattccaaagtgtgatcagtggcaattattacaaacctcggcacttcttctttgagctagaccatgaacaaacaagagctttgatatttttgtttaagcctgcccctgttcatgatgtttcaaacaaatgtcatccttccaaatctattcaatctccaatagtcgaagcatatgtcaatcctgatggtgaatatgctagtgagagtagaacgtcaacgagccaccttgacaaggaggcttctaactgggatgatgttacgaccaaggaaggaactgaatttgtcaataatgaccatccacatattaatccaccacataaacaacaagatatgtttgttttacgacagcatgaggctgaatcctccaaggacactgtggattctgcttcaaataaatcaatgcctcaagaagcacagtttgatgccactctccccacagacccatctaattccacttcagtgggtgatgtatgtattaaagacctgacatcactggggcaatctcgtggaaatgctgagctgcttcacattgtcaaagagttatccaagaggaaccaagcaatggagaaaaaactgtctgagtcagataaagaaatactgtttctgagggaatcaatgaaggacacaggaagaagaattcaggagctggaatatcagtatgagaaactacaatcaaactataactctttagtcccactccttggtagtcgacatgataatatggaagggccatcaataatcttaatgggtggctacaggggcagtacttgcctgtcatcactagattccttttgccctacgacagacagagtagtgcctctgtgttcaatgagctcagcccgtgcatatgcagccgctgttgcattgaaggaccatctctatatttttggtggtgggaatggcagttcatggtatcacacagtggaatgctacaggatgggcagtaataaatggatagcatgcccccgtttgaaacatgcaaaaggaagccttgctggaactacattgaatgataaaatatttgctattggtggtggagatgggtctgcagttttctcagaagttgaaatgtttgacccagcacttgggagatggatagacaatgtgtcaatgcggcaaaagagatttgctgctgctgctgccgtattaagtggcacactctatgtaactggtggttatgatggcaacacgtacttacaatcagcagaaagatatgacccaagggaaggtttctggactctgctaccaagtatgagtgcaagaagaggatcccactccgtagctgtcatgggggaatccttattcgctgtgggagggtacgatggaaacagcaatatttccaccgtagaaatctttgatccgcgtgccaattcatggaggataggccgttcatgcagcattgcaagaggatacggatgcgcggtgacgatggacggcaatctgtacttcattggtggggtcaacgatgctggagaaactctcgggactgtggaggtctacaatgagaggcaaggctggtcgatctctggctgcaaatccgtagggaagagggcctttgcctgcgctatcaccgtttgacatgatcgcggatctcataccctacctttttttttttttttttttttttgcaaccagcagtcactcatggttcgcagcctttgccctcctgctggtcctactcctaccacgttggtccgagtatacctgggttgagagaaattttgctgcctccccccccccctacttatactacttccgtccgtgaacaaatcaacttctagaggtgaattgagccaaacttttgcaaacgttagaaatgttgaacttaaggtaactataaaagttaatttatttgggggatggagagagtattagacaaagccaccaaatgttctggtggtgcatttgggaattgacaatcacagagcaccaccaaatggctaagggccacagtagcatgttctgctgtgtaatgtccaggcagtctgctgctgtttgcgcttttgagaaactagacatggtgtcatggtaggtgatgagacgtaggaagatggggaccaattgctgaatgctgccgatagctcaaattggcagccggttcataatcgtcgctgcaagggaatcgctctgatcgcttttgtgcgagcggttggtggaatctggactctggggcaatgcaatgtgtttggtgaaccgagtgcaacgctgctaagcaaggaatacgaacctaactcgagggatttggtctgccaaaccatcggagcaaagatgcgcgcgactgtgggcctgttcagttcagtcagccaaagacgtctgattgccttgcgcgttatatccggatgagggctggttatcttagcacagacaagacaaacaaaaaaggaatttttccgattaccaatcgacaggttcccgtacaaggctgagcatccgttcatcgtccagaacggcagaatctaaaaatcatcagtggacaccatcagacgtgcaaaccagcacacctccgtgttgttgttcctcagtgaaagcaatcatcctggaattcttcagttttcttcgctacagcataagatgccaacttcagcaccggtttacctttggctcagcacggaaatataaaagctaccgagggagattcctcaagttccaattgacaacaggaattcttcaactcagacacacccatcttcaaacagagaatccgttttacctgaaaactttgacgggccttattggacatcaatcatcgtcgaccagaattcccccaaaacactgccttccttcctctcctctataaaaccaacccaccagctcaaagtttcaagcaccagagcaaactaccagcttaagtttccagcaccagagcaagctaagtttccagcaccatagcaacgatgacatccaacttcacgcccaatgtctgggcttggatcgccagcctgcccccattcacccagtggcgcaccaacaccatgtccctttgcatctgcgccacgccatcatcatcatcttcgtcgtcacagccacagccatcgataaacctctcggttacgaaaactacttccatcgcacagcctccttatgttatcttctccgtcttcgcaaactacagcatgccagtttcgctgtggaagtcacagccagtccacctgaaaacaaagacgcagcaaactctagacgaacaggatatcatacacatcttcgtcaacatcgtcaactccgtgctgaagtactgtccagacaagaactcgtcgtttcggttccctggggcacagcctcgtggcaacttcagcgacgtgttcaacatagctttcttgtccctggccttcctgctgtgcatcttcgaggtccctcgcgacctccgtccaggatgcttgggttcactaggagcccagctcactggttcgaggtgcagagatgccgcaaagagccttgtgaggatgctcggtgcaaacctcgaggaccagtggatgcagacgatgaacctcgcagtaaccaactggatagtcgagctgagatcctcgagccgctcgtccgggcccgccgtcgccgctcttctcatacgccgtctcagcaagcgggctctggaaggtgcagctgtactgcccggtcatagccatgggtatggaggaagctgcagagacaccacaggatgagcgtctcctcttctcactcatttatcaacaagtcgagtgtgtcattcagctggcctatagaacgacaagaagggataactggatcgatgtcgaggtgaaggtggacaacgtaaggtgtgatgtggactctttggtctccgagacccttatggcggagcgtggatatggctccgaagagaagcacttcccatctcgtgtgatgctgcaaatcacacctacgcaacaatctgatgtgctctctgtttctgtcggcaagtccaacgacaaccccacacacgaattcggcatcgagaagggctttgagggttcatttgaacccccaaacgcatttggcctgaaggcgtcagtaactgaaagccttacactagccatgaagccctggaaattcgagcagtctgtgcatgggaacactgcaaccttgaactggtttcttcatgacggtgtcaatgggagggaggtttattcctcgaaaccttcaaagatttctctgctccaaccgaaggcctggttccgtgacaggtactcaaatgcgtaccgccccttcacaaagcagggcggtgtcattttcgcacgtgacgagtatggagacagtgtctggtggaaggtatgtggtgcagcgttaggacagactatgaactggcaaatccgaggctggatttggctaacctactggcctaacaaacaacggaccttccacaacgaaacgagatggcttgaatttagagaatgcctgcagctcccccttaccaagttttcataaaccacttgtactctgaaatgaatggctgtatagcagtgtagaaccatagacatcgaaaaaatccatgcatatttggggggcacaaaaaagagtatgatactctattgtaactgaatgtactgttacatcgaaatgacttcctcatatgcctgccttgcgatttaatgcaatcctaaaaatttattcctttttcttgagctaatttagagttcaccccacccgaacaaatgtgcaatattaacagccaagagagctcattaaacacgaactcatccctactatagtacaggaactcaacacaaaggaac

SEQ ID NO: 75548 - DNA, 5884 bp, Zea Mays
cctcaccgcacttgtggcctggcacgtgctgcgcgcacacccaattctagcccacgcaagcggccgatacgagcgcctactacctctggcgctgccgcgcgctggcgaggccatcgaactagattctagcagcatctacgatgaaccctgctccccggcacccaagcacgtgcatatggcaaagcatgagtttggaaattatttcaagttttatcaaagaatggacttttgataagcagttgagacgaggaacaactcttatgaggcgaacataactatgaactagtaactgggagtccttgattctttaaattttcgtttcccttctcttgttggtagatgttctgtacattacttccctttttctctgctctttgcttctccttggtggcttggtagtcctagctgtgttactggttccaaatatatttttggacatttattactccatattactctgagttgctacctatggtgagttatctttgtaagattgtctccagcagttcaccccatatggtcactcaaaacactgttctgccctgtaagcactgttttgcccccgtaagcactgttttgccccgtagactgcactgtttgcagagtggagtttgaatatgaggatgaggatggttaagctgttggagatagcctaacgagtttgtttgtccaacttgcccctgcatgtgtgctgtatgcatattattgttgccattttacatgtttttcatgattttcaaaaaatgggtgctggaaggaagattgaaaccttttttactgcaacaccaagtgcacagacacaaaatcaaaccaatgaaaggtatggaacatatcctgttgctgcccgtaatcttcgggaagatgagctaggaggagtgatttttggctgcaaacacaacacaatcggtgaatgcctctctaaacagctgtttggtttgccttcaagccatttctcatatgtgaagaatgtcaaacctggcatgcctctatttctgttcaattatagcgatcgaaaaatgcatggaatttatgaggctgcaagtgctggcaagcttaacattgaccaatttgcttggagtgatggtggtagaataaagacacaatttcctgcacaggtcctcatctctatgaagactgcctgccttccagttccagaatctcaattccaaagtgtgatcagtggcaattattacaaacctcggcacttcttctttgagctagaccatgaacaaacaagagctttgatatttttgtttaagcctgcccctgttcatgatgtttcaaacaaatgtcatccttccaaatctattcaatctccaatagtcgaagcatatgtcaatcctgatggtgaatatgctagtgagagtagaacgtcaacgagccaccttgacaaggaggcttctaactgggatgatgttacgaccaaggaaggaactgaatttgtcaataatgaccatccacatattaatccaccacataaacaacaagatatgtttgttttacgacagcatgaggctgaatcctccaaggacactgtggattctgcttcaaataaatcaatgcctcaagaagcacagtttgatgccactctccccacagacccatctaattccacttcagtgggtgatgtatgtattaaagacctgacatcactggggcaatctcgtggaaatgctgagctgcttcacattgtcaaagagttatccaagaggaaccaagcaatggagaaaaaactgtctgagtcagataaagaaatactgtttctgagggaatcaatgaaggacacaggaagaagaattcaggagctggaatatcagtatgagaaactacaatcaaactataactctttagtcccactccttggtagtcgacatgataatatggaagggccatcaataatcttaatgggtggctacaggggcagtacttgcctgtcatcactagattccttttgccctacgacagacagagtagtgcctctgtgttcaatgagctcagcccgtgcatatgcagccgctgttgcattgaaggaccatctctatatttttggtggtgggaatggcagttcatggtatcacacagtggaatgctacaggatgggcagtaataaatggatagcatgcccccgtttgaaacatgcaaaaggaagccttgctggaactacattgaatgataaaatatttgctattggtggtggagatgggtctgcagttttctcagaagttgaaatgtttgacccagcacttgggagatggatagacaatgtgtcaatgcggcaaaagagatttgctgctgctgctgccgtattaagtggcacactctatgtaactggtggttatgatggcaacacgtacttacaatcagcagaaagatatgacccaagggaaggtttctggactctgctaccaagtatgagtgcaagaagaggatcccactccgtagctgtcatgggggaatccttattcgctgtgggagggtacgatggaaacagcaatatttccaccgtagaaatctttgatccgcgtgccaattcatggaggataggccgttcatgcagcattgcaagaggatacggatgcgcggtgacgatggacggcaatctgtacttcattggtggggtcaacgatgctggagaaactctcgggactgtggaggtctacaatgagaggcaaggctggtcgatctctggctgcaaatccgtagggaagagggcctttgcctgcgctatcaccgtttgacatgatcgcggatctcataccctacctttttttttttttttttttttttgcaaccagcagtcactcatggttcgcagcctttgccctcctgctggtcctactcctaccacgttggtccgagtatacctgggttgagagaaattttgctgcctccccccccccctacttatactacttccgtccgtgaacaaatcaacttctagaggtgaattgagccaaacttttgcaaacgttagaaatgttgaacttaaggtaactataaaagttaatttatttgggggatggagagagtattagacaaagccaccaaatgttctggtggtgcatttgggaattgacaatcacagagcaccaccaaatggctaagggccacagtagcatgttctgctgtgtaatgtccaggcagtctgctgctgtttgcgcttttgagaaactagacatggtgtcatggtaggtgatgagacgtaggaagatggggaccaattgctgaatgctgccgatagctcaaattggcagccggttcataatcgtcgctgcaagggaatcgctctgatcgcttttgtgcgagcggttggtggaatctggactctggggcaatgcaatgtgtttggtgaaccgagtgcaacgctgctaagcaaggaatacgaacctaactcgagggatttggtctgccaaaccatcggagcaaagatgcgcgcgactgtgggcctgttcagttcagtcagccaaagacgtctgattgccttgcgcgttatatccggatgagggctggttatcttagcacagacaagacaaacaaaaaaggaatttttccgattaccaatcgacaggttcccgtacaaggctgagcatccgttcatcgtccagaacggcagaatctaaaaatcatcagtggacaccatcagacgtgcaaaccagcacacctccgtgttgttgttcctcagtgaaagcaatcatcctggaattcttcagttttcttcgctacagcataagatgccaacttcagcaccggtttacctttggctcagcacggaaatataaaagctaccgagggagattcctcaagttccaattgacaacaggaattcttcaactcagacacacccatcttcaaacagagaatccgttttacctgaaaactttgacgggccttattggacatcaatcatcgtcgaccagaattcccccaaaacactgccttccttcctctcctctataaaaccaacccaccagctcaaagtttcaagcaccagagcaaactaccagcttaagtttccagcaccagagcaagctaagtttccagcaccatagcaacgatgacatccaacttcacgcccaatgtctgggcttggatcgccagcctgcccccattcacccagtggcgcaccaacaccatgtccctttgcatctgcgccacgccatcatcatcatcttcgtcgtcacagccacagccatcgataaacctctcggttacgaaaactacttccatcgcacagcctccttatgttatcttctccgtcttcgcaaactacagcatgccagtttcgctgtggaagtcacagccagtccacctgaaaacaaagacgcagcaaactctagacgaacaggatatcatacacatcttcgtcaacatcgtcaactccgtgctgaagtactgtccagacaagaactcgtcgtttcggttccctggggcacagcctcgtggcaacttcagcgacgtgttcaacatagctttcttgtccctggccttcctgctgtgcatcttcgaggtccctcgcgacctccgtccaggatgcttgggttcactaggagcccagctcactggttcgaggtgcagagatgccgcaaagagccttgtgaggatgctcggtgcaaacctcgaggaccagtggatgcagacgatgaacctcgcagtaaccaactggatagtcgagctgagatcctcgagccgctcgtccgggcccgccgtcgccgctcttctcatacgccgtctcagcaagcgggctctggaaggtgcagctgtactgcccggtcatagccatgggtatggaggaagctgcagagacaccacaggatgagcgtctcctcttctcactcatttatcaacaagtcgagtgtgtcattcagctggcctatagaacgacaagaagggataactggatcgatgtcgaggtgaaggtggacaacgtaaggtgtgatgtggactctttggtctccgagacccttatggcggagcgtggatatggctccgaagagaagcacttcccatctcgtgtgatgctgcaaatcacacctacgcaacaatctgatgtgctctctgtttctgtcggcaagtccaacgacaaccccacacacgaattcggcatcgagaagggctttgagggttcatttgaacccccaaacgcatttggcctgaaggcgtcagtaactgaaagccttacactagccatgaagccctggaaattcgagcagtctgtgcatgggaacactgcaaccttgaactggtttcttcatgacggtgtcaatgggagggaggtttattcctcgaaaccttcaaagatttctctgctccaaccgaaggcctggttccgtgacaggtactcaaatgcgtaccgccccttcacaaagcagggcggtgtcattttcgcacgtgacgagtatggagacagtgtctggtggaaggtatgtggtgcagcgttaggacagactatgaactggcaaatccgaggctggatttggctaacctactggcctaacaaacaacggaccttccacaacgaaacgagatggcttgaatttagagaatgcctgcagctcccccttaccaagttttcataaaccacttgtactctgaaatgaatggctgtatagcagtgtagaaccatagacatcgaaaaaatccatgcatatttggggggcacaaaaaagagtatgatactctattgtaactgaatgtactgttacatcgaaatgacttcctcatatgcctgccttgcgatttaatgcaatcctaaaaatttattcctttttcttgagctaatttagagttcaccccacccgaacaaatgtgcaatattaacagccaagagagctcattaaacacgaactcatccctactatagtacaggaactcaacacaaaggaac

SEQ ID NO: 75549 - DNA, 5318 bp, Zea Mays
aggcattcagcctcaccgcacttgtggcctggcacgtgctgcgcgcacacccaattctagcccacgcaagcggccgatacgagcgcctactacctctggcgctgccgcgcgctggcgaggccatcgaactagattctagcagcatctacgatgaaccctgctccccggcacccaagcactgcacagacacaaaatcaaaccaatgaaaggtatggaacatatcctgttgctgcccgtaatcttcgggaagatgagctaggaggagtgatttttggctgcaaacacaacacaatcggtgaatgcctctctaaacagctgtttggtttgccttcaagccatttctcatatgtgaagaatgtcaaacctggcatgcctctatttctgttcaattatagcgatcgaaaaatgcatggaatttatgaggctgcaagtgctggcaagcttaacattgaccaatttgcttggagtgatggtggtagaataaagacacaatttcctgcacaggtcctcatctctatgaagactgcctgccttccagttccagaatctcaattccaaagtgtgatcagtggcaattattacaaacctcggcacttcttctttgagctagaccatgaacaaacaagagctttgatatttttgtttaagcctgcccctgttcatgatgtttcaaacaaatgtcatccttccaaatctattcaatctccaatagtcgaagcatatgtcaatcctgatggtgaatatgctagtgagagtagaacgtcaacgagccaccttgacaaggaggcttctaactgggatgatgttacgaccaaggaaggaactgaatttgtcaataatgaccatccacatattaatccaccacatgttgaacaatatggtgaagtggctgttacgcagaaacaacaagatatgtttgttttacgacagcatgaggctgaatcctccaaggacactgtggattctgcttcaaataaatcaatgcctcaagaagcacagtttgatgccactctccccacagacccatctaattccacttcagtgggtgatgtatgtattaaagacctgacatcactggggcaatctcgtggaaatgctgagctgcttcacattgtcaaagagttatccaagaggaaccaagcaatggagaaaaaactgtctgagtcagataaagaaatactgtttctgagggaatcaatgaaggacacaggaagaagaattcaggagctggaatatcagtatgagaaactacaatcaaactataactctttagtcccactccttggtagtcgacatgataatatggaagggccatcaataatcttaatgggtggctacaggggcagtacttgcctgtcatcactagattccttttgccctacgacagacagagtagtgcctctgtgttcaatgagctcagcccgtgcatatgcagccgctgttgcattgaaggaccatctctatatttttggtggtgggaatggcagttcatggtatcacacagtggaatgctacaggatgggcagtaataaatggatagcatgcccccgtttgaaacatgcaaaaggaagccttgctggaactacattgaatgataaaatatttgctattggtggtggagatgggtctgcagttttctcagaagttgaaatgtttgacccagcacttgggagatggatagacaatgtgtcaatgcggcaaaagagatttgctgctgctgctgccgtattaagtggcacactctatgtaactggtggttatgatggcaacacgtacttacaatcagcagaaagatatgacccaagggaaggtttctggactctgctaccaagtatgagtgcaagaagaggatcccactccgtagctgtcatgggggaatccttcttatgtttcagattcgctgtgggagggtacgatggaaacagcaatatttccaccgtagaaatctttgatccgcgtgccaattcatggaggataggccgttcatgcagcattgcaagaggatacggatgcgcggtgacgatggacggcaatctgtacttcattggtggggtcaacgatgctggagaaactctcgggactgtggaggtctacaatgagaggcaaggctggtcgatctctggctgcaaatccgtagggaagagggcctttgcctgcgctatcaccgtttgacatgatcgcggatctcataccctacctttttttttttttttttttttttgcaaccagcagtcactcatggttcgcagcctttgccctcctgctggtcctactcctaccacgttggtccgagtatacctgggttgagagaaattttgctgcctccccccccccctacttatactacttccgtccgtgaacaaatcaacttctagaggtgaattgagccaaacttttgcaaacgttagaaatgttgaacttaaggtaactataaaagttaatttatttgggggatggagagagtattagacaaagccaccaaatgttctggtggtgcatttgggaattgacaatcacagagcaccaccaaatggctaagggccacagtagcatgttctgctgtgtaatgtccaggcagtctgctgctgtttgcgcttttgagaaactagacatggtgtcatggtaggtgatgagacgtaggaagatggggaccaattgctgaatgctgccgatagctcaaattggcagccggttcataatcgtcgctgcaagggaatcgctctgatcgcttttgtgcgagcggttggtggaatctggactctggggcaatgcaatgtgtttggtgaaccgagtgcaacgctgctaagcaaggaatacgaacctaactcgagggatttggtctgccaaaccatcggagcaaagatgcgcgcgactgtgggcctgttcagttcagtcagccaaagacgtctgattgccttgcgcgttatatccggatgagggctggttatcttagcacagacaagacaaacaaaaaaggaatttttccgattaccaatcgacaggttcccgtacaaggctgagcatccgttcatcgtccagaacggcagaatctaaaaatcatcagtggacaccatcagacgtgcaaaccagcacacctccgtgttgttgttcctcagtgaaagcaatcatcctggaattcttcagttttcttcgctacagcataagatgccaacttcagcaccggtttacctttggctcagcacggaaatataaaagctaccgagggagattcctcaagttccaattgacaacaggaattcttcaactcagacacacccatcttcaaacagagaatccgttttacctgaaaactttgacgggccttattggacatcaatcatcgtcgaccagaattcccccaaaacactgccttccttcctctcctctataaaaccaacccaccagctcaaagtttcaagcaccagagcaaactaccagcttaagtttccagcaccagagcaagctaagtttccagcaccatagcaacgatgacatccaacttcacgcccaatgtctgggcttggatcgccagcctgcccccattcacccagtggcgcaccaacaccatgtccctttgcatctgcgccacgccatcatcatcatcttcgtcgtcacagccacagccatcgataaacctctcggttacgaaaactacttccatcgcacagcctccttatgttatcttctccgtcttcgcaaactacagcatgccagtttcgctgtggaagtcacagccagtccacctgaaaacaaagacgcagcaaactctagacgaacaggatatcatacacatcttcgtcaacatcgtcaactccgtgctgaagtactgtccagacaagaactcgtcgtttcggttccctggggcacagcctcgtggcaacttcagcgacgtgttcaacatagctttcttgtccctggccttcctgctgtgcatcttcgaggtccctcgcgacctccgtccaggatgcttgggttcactaggagcccagctcactggttcgaggtgcagagatgccgcaaagagccttgtgaggatgctcggtgcaaacctcgaggaccagtggatgcagacgatgaacctcgcagtaaccaactggatagtcgagctgagatcctcgagccgctcgtccgggcccgccgtcgccgctcttctcatacgccgtctcagcaagcgggctctggaaggtgcagctgtactgcccggtcatagccatgggtatggaggaagctgcagagacaccacaggatgagcgtctcctcttctcactcatttatcaacaagtcgagtgtgtcattcagctggcctatagaacgacaagaagggataactggatcgatgtcgaggtgaaggtggacaacgtaaggtgtgatgtggactctttggtctccgagacccttatggcggagcgtggatatggctccgaagagaagcacttcccatctcgtgtgatgctgcaaatcacacctacgcaacaatctgatgtgctctctgtttctgtcggcaagtccaacgacaaccccacacacgaattcggcatcgagaagggctttgagggttcatttgaacccccaaacgcatttggcctgaaggcgtcagtaactgaaagccttacactagccatgaagccctggaaattcgagcagtctgtgcatgggaacactgcaaccttgaactggtttcttcatgacggtgtcaatgggagggaggtttattcctcgaaaccttcaaagatttctctgctccaaccgaaggcctggttccgtgacaggtactcaaatgcgtaccgccccttcacaaagcagggcggtgtcattttcgcacgtgacgagtatggagacagtgtctggtggaaggtatgtggtgcagcgttaggacagactatgaactggcaaatccgaggctggatttggctaacctactggcctaacaaacaacggaccttccacaacgaaacgagatggcttgaatttagagaatgcctgcagctcccccttaccaagttttcataaaccacttgtactctgaaatgaatggctgtatagcagtgtagaaccatagacatcgaaaaaatccatgcatatttggggggcacaaaaaagagtatgatactctattgtaactgaatgtactgttacatcgaaatgacttcctcatatgcctgccttgcgatttaatgcaatcctaaaaatttattcctttttcttgagctaatttagagttcaccccacccgaacaaatgtgcaatattaacagccaagagagctcattaaacacgaactcatccctactatagtacaggaactcaacacaaaggaac

SEQ ID NO: 75550 - DNA, 5273 bp, Zea Mays
aggcattcagcctcaccgcacttgtggcctggcacgtgctgcgcgcacacccaattctagcccacgcaagcggccgatacgagcgcctactacctctggcgctgccgcgcgctggcgaggccatcgaactagattctagcagcatctacgatgaaccctgctccccggcacccaagcactgcacagacacaaaatcaaaccaatgaaaggtatggaacatatcctgttgctgcccgtaatcttcgggaagatgagctaggaggagtgatttttggctgcaaacacaacacaatcggtgaatgcctctctaaacagctgtttggtttgccttcaagccatttctcatatgtgaagaatgtcaaacctggcatgcctctatttctgttcaattatagcgatcgaaaaatgcatggaatttatgaggctgcaagtgctggcaagcttaacattgaccaatttgcttggagtgatggtggtagaataaagacacaatttcctgcacaggtcctcatctctatgaagactgcctgccttccagttccagaatctcaattccaaagtgtgatcagtggcaattattacaaacctcggcacttcttctttgagctagaccatgaacaaacaagagctttgatatttttgtttaagcctgcccctgttcatgatgtttcaaacaaatgtcatccttccaaatctattcaatctccaatagtcgaagcatatgtcaatcctgatggtgaatatgctagtgagagtagaacgtcaacgagccaccttgacaaggaggcttctaactgggatgatgttacgaccaaggaaggaactgaatttgtcaataatgaccatccacatattaatccaccacataaacaacaagatatgtttgttttacgacagcatgaggctgaatcctccaaggacactgtggattctgcttcaaataaatcaatgcctcaagaagcacagtttgatgccactctccccacagacccatctaattccacttcagtgggtgatgtatgtattaaagacctgacatcactggggcaatctcgtggaaatgctgagctgcttcacattgtcaaagagttatccaagaggaaccaagcaatggagaaaaaactgtctgagtcagataaagaaatactgtttctgagggaatcaatgaaggacacaggaagaagaattcaggagctggaatatcagtatgagaaactacaatcaaactataactctttagtcccactccttggtagtcgacatgataatatggaagggccatcaataatcttaatgggtggctacaggggcagtacttgcctgtcatcactagattccttttgccctacgacagacagagtagtgcctctgtgttcaatgagctcagcccgtgcatatgcagccgctgttgcattgaaggaccatctctatatttttggtggtgggaatggcagttcatggtatcacacagtggaatgctacaggatgggcagtaataaatggatagcatgcccccgtttgaaacatgcaaaaggaagccttgctggaactacattgaatgataaaatatttgctattggtggtggagatgggtctgcagttttctcagaagttgaaatgtttgacccagcacttgggagatggatagacaatgtgtcaatgcggcaaaagagatttgctgctgctgctgccgtattaagtggcacactctatgtaactggtggttatgatggcaacacgtacttacaatcagcagaaagatatgacccaagggaaggtttctggactctgctaccaagtatgagtgcaagaagaggatcccactccgtagctgtcatgggggaatccttattcgctgtgggagggtacgatggaaacagcaatatttccaccgtagaaatctttgatccgcgtgccaattcatggaggataggccgttcatgcagcattgcaagaggatacggatgcgcggtgacgatggacggcaatctgtacttcattggtggggtcaacgatgctggagaaactctcgggactgtggaggtctacaatgagaggcaaggctggtcgatctctggctgcaaatccgtagggaagagggcctttgcctgcgctatcaccgtttgacatgatcgcggatctcataccctacctttttttttttttttttttttttgcaaccagcagtcactcatggttcgcagcctttgccctcctgctggtcctactcctaccacgttggtccgagtatacctgggttgagagaaattttgctgcctccccccccccctacttatactacttccgtccgtgaacaaatcaacttctagaggtgaattgagccaaacttttgcaaacgttagaaatgttgaacttaaggtaactataaaagttaatttatttgggggatggagagagtattagacaaagccaccaaatgttctggtggtgcatttgggaattgacaatcacagagcaccaccaaatggctaagggccacagtagcatgttctgctgtgtaatgtccaggcagtctgctgctgtttgcgcttttgagaaactagacatggtgtcatggtaggtgatgagacgtaggaagatggggaccaattgctgaatgctgccgatagctcaaattggcagccggttcataatcgtcgctgcaagggaatcgctctgatcgcttttgtgcgagcggttggtggaatctggactctggggcaatgcaatgtgtttggtgaaccgagtgcaacgctgctaagcaaggaatacgaacctaactcgagggatttggtctgccaaaccatcggagcaaagatgcgcgcgactgtgggcctgttcagttcagtcagccaaagacgtctgattgccttgcgcgttatatccggatgagggctggttatcttagcacagacaagacaaacaaaaaaggaatttttccgattaccaatcgacaggttcccgtacaaggctgagcatccgttcatcgtccagaacggcagaatctaaaaatcatcagtggacaccatcagacgtgcaaaccagcacacctccgtgttgttgttcctcagtgaaagcaatcatcctggaattcttcagttttcttcgctacagcataagatgccaacttcagcaccggtttacctttggctcagcacggaaatataaaagctaccgagggagattcctcaagttccaattgacaacaggaattcttcaactcagacacacccatcttcaaacagagaatccgttttacctgaaaactttgacgggccttattggacatcaatcatcgtcgaccagaattcccccaaaacactgccttccttcctctcctctataaaaccaacccaccagctcaaagtttcaagcaccagagcaaactaccagcttaagtttccagcaccagagcaagctaagtttccagcaccatagcaacgatgacatccaacttcacgcccaatgtctgggcttggatcgccagcctgcccccattcacccagtggcgcaccaacaccatgtccctttgcatctgcgccacgccatcatcatcatcttcgtcgtcacagccacagccatcgataaacctctcggttacgaaaactacttccatcgcacagcctccttatgttatcttctccgtcttcgcaaactacagcatgccagtttcgctgtggaagtcacagccagtccacctgaaaacaaagacgcagcaaactctagacgaacaggatatcatacacatcttcgtcaacatcgtcaactccgtgctgaagtactgtccagacaagaactcgtcgtttcggttccctggggcacagcctcgtggcaacttcagcgacgtgttcaacatagctttcttgtccctggccttcctgctgtgcatcttcgaggtccctcgcgacctccgtccaggatgcttgggttcactaggagcccagctcactggttcgaggtgcagagatgccgcaaagagccttgtgaggatgctcggtgcaaacctcgaggaccagtggatgcagacgatgaacctcgcagtaaccaactggatagtcgagctgagatcctcgagccgctcgtccgggcccgccgtcgccgctcttctcatacgccgtctcagcaagcgggctctggaaggtgcagctgtactgcccggtcatagccatgggtatggaggaagctgcagagacaccacaggatgagcgtctcctcttctcactcatttatcaacaagtcgagtgtgtcattcagctggcctatagaacgacaagaagggataactggatcgatgtcgaggtgaaggtggacaacgtaaggtgtgatgtggactctttggtctccgagacccttatggcggagcgtggatatggctccgaagagaagcacttcccatctcgtgtgatgctgcaaatcacacctacgcaacaatctgatgtgctctctgtttctgtcggcaagtccaacgacaaccccacacacgaattcggcatcgagaagggctttgagggttcatttgaacccccaaacgcatttggcctgaaggcgtcagtaactgaaagccttacactagccatgaagccctggaaattcgagcagtctgtgcatgggaacactgcaaccttgaactggtttcttcatgacggtgtcaatgggagggaggtttattcctcgaaaccttcaaagatttctctgctccaaccgaaggcctggttccgtgacaggtactcaaatgcgtaccgccccttcacaaagcagggcggtgtcattttcgcacgtgacgagtatggagacagtgtctggtggaaggtatgtggtgcagcgttaggacagactatgaactggcaaatccgaggctggatttggctaacctactggcctaacaaacaacggaccttccacaacgaaacgagatggcttgaatttagagaatgcctgcagctcccccttaccaagttttcataaaccacttgtactctgaaatgaatggctgtatagcagtgtagaaccatagacatcgaaaaaatccatgcatatttggggggcacaaaaaagagtatgatactctattgtaactgaatgtactgttacatcgaaatgacttcctcatatgcctgccttgcgatttaatgcaatcctaaaaatttattcctttttcttgagctaatttagagttcaccccacccgaacaaatgtgcaatattaacagccaagagagctcattaaacacgaactcatccctactatagtacaggaactcaacacaaaggaac

SEQ ID NO: 75551 - DNA, 882 bp, Zea Mays
cctgcgtgtactcaagcggcaagcactagcagccagccagccaacccaacggcgccctccacactaggcggctagggtttgtgacccgtgggcaccttctagagctagaacgccagcggcacatcgtcctcgtccagccaggcctctgcaggttatctgtgggtgtcgcgcgcatcgcccttggcccctcaccctcgcccttccctccaggagttgacatgattaagtgaagtattgatgaggagcttgattgctatatatttgatggacaagcatgatggaaagcacataaagaagaatatcctatcttgggcgagttttagtggtggtggttgtgtacttgatctatttcgtactcgtcttgatcctaccatggtagaagcacttgtctgcaccaaagattggatagatggagcaagaaaaggttccaaggctaagtgtgttgctattcctgatatggtttgtgaaatggaggaactcgaggctattgctataaatctttcacttgaggatgaagacctagatgatgatcatgatgagggacccaaggcatcattgtaagcttgttgatgaagacctaaatgatgataatgcgacatgaatgctatgaatgtttcttattgtacttgttgcgtaatgtttagtgaccttgcgaacttctcacatgtggacttgtggcattgtgaactttgtgatcaacttgttatattgtgaactttgtgatcaacttggtggacttgtgatctttgtgatcaacttgttatattgtgaacttatgatctttgttatattgtgaacttgtgatctttgtgatcaacttgttataatgtgaacttgcgatattgtgaatttgtggtctttgagatatttgtaaactttgtt

SEQ ID NO: 75552 - DNA, 1646 bp, Zea Mays
caagccaccaccaagtcaccaacccgagtccgatgtatacgcgcggcaacaataatatcctttcctttcttttgtataaaaaacacccgcctccgtctccatctccggtgagcaggaagagggggagggaggaggccaagagcgcagcggcgaagccatagccaagctcacccgatccagtccctgccgctcccagcgtgccacagccagtcccgcgctagctcagctcagctcagattcacgagctcgtctcccagatccagcttcgtctggtgctggtgggcggcgtggtttggtgctttgggggcctgcgtgttaagtttctgcgttctccgggctatctgcctgtcttgctgcggcctgcggcggcggggtggagatgggggtggccggggagaagttccagctggggacggtgggggcgctcagcctctcggtggtgtcctccgtctccatcgtcatctgcaacaaggctctcatgagctccctccgcttcaactttgatgacaaagctggctattattccctgtactgttatactggagacccttttcttcaggaagaaatttagtcggaacatcaagctttcccttagtgtgctccttcttggtgttggtgttgcaactataactgatctgcaactcaaccttgtgggatctgtattgtccctactggcaatcatcacaacctgcattgctcagatcatgacaaatacaatacagaagaagttcaaggtatcttcgacacagctcctgtaccaatcgtgcccataccaagcattgactttgttcctcgtcggcccattccttgatgggtttttgactaaccaaaacgtctttgctttcgactacacaactcaagtcctgttcttcatcgtgctgtcgtgcctgatctcggtctcggtaaacttcagcactttccttgtgatcgggaagacgtcgcctgtaacctaccaagttctcggccacctgaaaacgtgcttggtcctcgccttcggctacgtcctgctccacgacccgtttagctggagaaacatacttggaatcctgatcgcggtgatcgggatggtcctgtactcgtacttctgcactagagagactcagcagaagccggcagaggcctccccgcaagccatcctgcaggcaaaggagggtgaatcgaaccctctgatcttggattccctgagcgccgccgaaaacgggggcagtgccaccgacgacgagcctctgaaggtgccaatgtggagctcgaagtactccaaggcgtgaaaggctgttctgttactggtgtactacggtgttatacagaattcagcttggtaggcagatactactactagggttggaaggcaatcctgttcctgttcctgttccatttttggccttctattttttttcttgttttcatcctttctggcatatactacaaatatatgtgttgctgttagtaaatggatctcactctttggaggatgatacctcagctcgagacgagtgatctgtctgaaagctatttccttgtgttccatccactccacagtataaactggtagatggacatgatatcaacagtagtggtttgcattcttttgtactagtatgtatccgagtcttctgctatgtatttctcgggaatcgcgatccgct

SEQ ID NO: 75553 - DNA, 1828 bp, Zea Mays
caagccaccaccaagtcaccaacccgagtccgatgtatacgcgcggcaacaataatatcctttcctttcttttgtataaaaaacacccgcctccgtctccatctccggtgagcaggaagagggggagggaggaggccaagagcgcagcggcgaagccatagccaagctcacccgatccagtccctgccgctcccagcgtgccacagccagtcccgcgctagctcagctcagctcagattcacgagctcgtctcccagatccagcttcgtctggtgctggtgggcggcgtggtttggtgctttgggggcctgcgtgttaagtttctgcgttctccgggctatctgcctgtcttgctgcggcctgcggcggcggggtggagatgggggtggccggggagaagttccagctggggacggtgggggcgctcagcctctcggtggtgtcctccgtctccatcgtcatctgcaacaaggctctcatgagctccctccgcttcaactttgccaccactttgacaagctggcatcttctggtcaccttctgctctctccatgtagcattatgtatgaaactctttgagcacaaacctttcgatgcaaggaccgtcatgggattcggagtgctcaatggcatatctattggacttctaaacttgagtttgggtttcaattctgttggtttctatcagatgacaaagctggctattattccctgtactgttatactggagacccttttcttcaggaagaaatttagtcggaacatcaagctttcccttagtgtgctccttcttggtgttggtgttgcaactataactgatctgcaactcaaccttgtgggatctgtattgtccctactggcaatcatcacaacctgcattgctcagatcatgacaaatacaatacagaagaagttcaaggtatcttcgacacagctcctgtaccaatcgtgcccataccaagcattgactttgttcctcgtcggcccattccttgatgggtttttgactaaccaaaacgtctttgctttcgactacacaactcaagtcctgttcttcatcgtgctgtcgtgcctgatctcggtctcggtaaacttcagcactttccttgtgatcgggaagacgtcgcctgtaacctaccaagttctcggccacctgaaaacgtgcttggtcctcgccttcggctacgtcctgctccacgacccgtttagctggagaaacatacttggaatcctgatcgcggtgatcgggatggtcctgtactcgtacttctgcactagagagactcagcagaagccggcagaggcctccccgcaagccatccaggcaaaggagggtgaatcgaaccctctgatcttggattccctgagcgccgccgaaaacgggggcagtgccaccgacgacgagcctctgaaggtgccaatgtggagctcgaagtactccaaggcgtgaaaggctgttctgttactggtgtactacggtgttatacagaattcagcttggtaggcagatactactactagggttggaaggcaatcctgttcctgttcctgttccatttttggccttctattttttttcttgttttcatcctttctggcatatactacaaatatatgtgttgctgttagtaaatggatctcactctttggaggatgatacctcagctcgagacgagtgatctgtctgaaagctatttccttgtgttccatccactccacagtataaactggtagatggacatgatatcaacagtagtggtttgcattcttttgtactagtatgtatccgagtcttctgctatgtatttctcgggaatcgcgatccgct

SEQ ID NO: 75554 - DNA, 2032 bp, Zea Mays
aacaatatatcaaatcaaacacaaaaatttacaaatctcattaaacacgtgctaatgaaccttatatatacacacacagtacacagactccctctctattgtttgtacattacagtacacaaaaaagtccaaaccaaatcgacccaaagaaaactccttgatcgccctcaataaaaaaactaactgtatatctgcccctcacaagccaccaccaagtcaccaacccgagtccgatgtatacgcgcggcaacaataatatcctttcctttcttttgtataaaaaacacccgcctccgtctccatctccggtgagcaggaagagggggagggaggaggccaagagcgcagcggcgaagccatagccaagctcacccgatccagtccctgccgctcccagcgtgccacagccagtcccgcgctagctcagctcagctcagattcacgagctcgtctcccagatccagcttcgtctggtgctggtgggcggcgtggtttggtgctttgggggcctgcgtgttaagtttctgcgttctccgggctatctgcctgtcttgctgcggcctgcggcggcggggtggagatgggggtggccggggagaagttccagctggggacggtgggggcgctcagcctctcggtggtgtcctccgtctccatcgtcatctgcaacaaggctctcatgagctccctccgcttcaactttgccaccactttgacaagctggcatcttctggtcaccttctgctctctccatgtagcattatgtatgaaactctttgagcacaaacctttcgatgcaaggaccgtcatgggattcggagtgctcaatggcatatctattggacttctaaacttgagtttgggtttcaattctgttggtttctatcagatgacaaagctggctattattccctgtactgttatactggagacccttttcttcaggaagaaatttagtcggaacatcaagctttcccttagtgtgctccttcttggtgttggtgttgcaactataactgatctgcaactcaaccttgtgggatctgtattgtccctactggcaatcatcacaacctgcattgctcagatcatgacaaatacaatacagaagaagttcaaggtatcttcgacacagctcctgtaccaatcgtgcccataccaagcattgactttgttcctcgtcggcccattccttgatgggtttttgactaaccaaaacgtctttgctttcgactacacaactcaagtcctgttcttcatcgtgctgtcgtgcctgatctcggtctcggtaaacttcagcactttccttgtgatcgggaagacgtcgcctgtaacctaccaagttctcggccacctgaaaacgtgcttggtcctcgccttcggctacgtcctgctccacgacccgtttagctggagaaacatacttggaatcctgatcgcggtgatcgggatggtcctgtactcgtacttctgcactagagagactcagcagaagccggcagaggcctccccgcaagccatcctgcaggcaaaggagggtgaatcgaaccctctgatcttggattccctgagcgccgccgaaaacgggggcagtgccaccgacgacgagcctctgaaggtgccaatgtggagctcgaagtactccaaggcgtgaaaggctgttctgttactggtgtactacggtgttatacagaattcagcttggtaggcagatactactactagggttggaaggcaatcctgttcctgttcctgttccatttttggccttctattttttttcttgttttcatcctttctggcatatactacaaatatatgtgttgctgttagtaaatggatctcactctttggaggatgatacctcagctcgagacgagtgatctgtctgaaagctatttccttgtgttccatccactccacagtataaactggtagatggacatgatatcaacagtagtggtttgcattcttttgtactagtatgtatccgagtcttctgctatgtatttctcgggaatcgcgatccgct

SEQ ID NO: 75555 - DNA, 1744 bp, Zea Mays
cgctgacctggcgcccctccagctcatcctatctacatatcagtgtccctctccctggcccagccgctcctaccatcagaatcagaccaccacacgcccgaggcccgactgcaagcgcctgagcccaagacccatggccatggccgccgccaccgtcgcagcgtctctgcccgtggcgcaggggctcgggaagcccctctgcgccggcagcaacgcgccgtcgctccgggccttcgcgagcgcgccccgtcgtcggtcggccaggaccaggatggccgtcgtccgggcgtccgcgcaaaagcagcacccggccaaggagtgggcggccgcggctgccgtggcggcggcgctggtgctgccggaggtcgcggaggccgcgccggggatctccccgtcgctcaagaacttcctcctcagcatcgtctccggtggggtcgtgctcgtcgccatcgtcggcgccgtcgtcgccgtctctaacttcgatcccgtcaggcggggttgagctgcatgcgtcgttgtgtgttgttgtacctatgtggctatgtactgagatctctccccccgtgtgcttcccaatgaaaacagtgtttaatgcgtgaatgtgtaaatttcatttcatgccatctgtatgtatgagacggattcaacagtgcattcggtttctttatgttgtggactaacctaagatatgatctcattgcatacttatcttactattactaaattatgactgcccttaatctgctctcaaatctttgtgtttcagttttcagtgaaggaactccttcacatgatctcttttctgatgaatctttgtgttccaattttcattgaaggaaatccttcttttttttgaatgcaaaggaaatccttctttacatgatctcttttctgatgattagttgatggatgatgaaggcactaacctttctttgaccggaggctactgaacatttcaagtgggaaaggtaagcatacataatgaagcccatgcatattatcgtatttacaatacttctgatatttatgtgattcttgtcaggcacccgccaagtaaggagatatccaactggcttggccttttttatgctcaatagttcagacaaaagaagggccccaataagtgaagaatcatgctcatctgctgcagatcagataaagaacgagaatgatgagtttctgtaagatcgaacaagctggatatactccaaacatggaggcacatctcaacgggacggcactatttaacaacccagaaagtttttttttattgaaaggaacccggaaaagtttgctaaaactgaaagaaacctgagaaccctgttcttgaaaatgaagttcacatgcattagccggttcaagctcagactgttattggtacgagcattttctttcgacagaaggtgggcaagaagcaagacggcgaatttccaggtttaagcagtccaagctcagactgttaataggtttcagcagaacaagctctcatatagcgtctgtttcaaaatattaatgtctccttcacctgttagtttttatttattcatgtttccttcacctattagtttctttagtgttggttttcgtcataatctcgcctcactgtatagctgtgggaatctggatttgtgagttgttggttgttagcgattctaggagggtcatgaaatgttaatacaaatatgatgctaatccatttgactcctgactattgtgagtaaagttcgtcaaaaagctacagaac

SEQ ID NO: 75556 - DNA, 1718 bp, Zea Mays
cgctgacctggcgcccctccagctcatcctatctacatatcagtgtccctctccctggcccagccgctcctaccatcagaatcagaccaccacacgcccgaggcccgactgcaagcgcctgagcccaagacccatggccatggccgccgccaccgtcgcagcgtctctgcccgtggcgcaggggctcgggaagcccctctgcgccggcagcaacgcgccgtcgctccgggccttcgcgagcgcgccccgtcgtcggtcggccaggaccaggatggccgtcgtccgggcgtccgcgcaaaagcagcacccggccaaggagtgggcggccgcggctgccgtggcggcggcgctggtgctgccggaggtcgcggaggccgcgccggggatctccccgtcgctcaagaacttcctcctcagcatcgtctccggtggggtcgtgctcgtcgccatcgtcggcgccgtcgtcgccgtctctaacttcgatcccgtcaggcggggttgagctgcatgcgtcgttgtgtgttgttgtacctatgtggctatgtactgagatctctccccccgtgtgcttcccaatgaaaacagtgtttaatgcgtgaatgtgtaaatttcatttcatgccatctgtatgtatgagacggattcaacagtgcattcggtttctttatgttgtggactaacctaagatatgatctcattgcatacttatcttactattactaaattatgactgcccttaatctgctctcaaatctttgtgtttcagttttcagtgaaggaactccttcacatgatctcttttctgatgaatctttgtgttccaattttcattgaaggaaatccttcttttttttgaatgcaaaggaaatccttctttacatgatctcttttctgatgattagttgatggatgatgaaggcactaacctttctttgaccggaggctactgaacatttcaagtgggaaaggtaagcatacataatgaagcccatgcatattatcgtatttacaatacttctgatatttatgtgattcttgtcaggcacccgccaagtaaggagatatccaactggcttggccttttttatgctcaatagttcagacaaaagaagggccccaataagatcagataaagaacgagaatgatgagtttctgtaagatcgaacaagctggatatactccaaacatggaggcacatctcaacgggacggcactatttaacaacccagaaagtttttttttattgaaaggaacccggaaaagtttgctaaaactgaaagaaacctgagaaccctgttcttgaaaatgaagttcacatgcattagccggttcaagctcagactgttattggtacgagcattttctttcgacagaaggtgggcaagaagcaagacggcgaatttccaggtttaagcagtccaagctcagactgttaataggtttcagcagaacaagctctcatatagcgtctgtttcaaaatattaatgtctccttcacctgttagtttttatttattcatgtttccttcacctattagtttctttagtgttggttttcgtcataatctcgcctcactgtatagctgtgggaatctggatttgtgagttgttggttgttagcgattctaggagggtcatgaaatgttaatacaaatatgatgctaatccatttgactcctgactattgtgagtaaagttcgtcaaaaagctacagaac

SEQ ID NO: 75557 - DNA, 2621 bp, Zea Mays
tcagttacgagggatcaaagaataggccttggtcatatcaagatggaaacacctccccattcaccgcgacgagccaaaagggttttacctttacctccaaagcccatgcggtttatacataaagcaaagcggtctataccatttgatgtcacaaaggcattggattctattaccagtatcaatatgctgaaggagcaaagaccatcagccaaaatgtgcagtatattggatgaagcaggctatgaaaggagagaacagtttaactgttatttaccggattcatctaagagcctcaatgctgacctctatgttgaggacgaggacatgttttatgaacctcaagctgaaaaagattggcaatcaaagcatagtagatcagatggcaatcttgctgatgagaattatgatggactctggaggatggatgaatttaattcagaggatcatctttttactcaaagagacaaacatgttgatataagtggctatggatttaaagacggatactctccagagcgaagaaactcaacaagacctgtcacagtatttgagaatacaggaattcaatcctcacatgatctcttttctgatcattcattgatggatgatgaggacactgaacttttcaagtgggaaagtcacccaccaagtaagaaaaaatccaactcaaatagcaattttggtccttctgcttggccttatgacatggtcgatggttcagagaaaaggagtccaataagtgaagaatcatgctcatctgctgcagcgatgaaggatagaacgtgcaagaaacaatcaccatcaatgaagaatgatatgaacgagaatgacgagtttcatataagattggataagctggatattccaaacatggatgcacctcttcatgggaggtcactgtttaacaatccagaaaagttggataggaaagaaacagcacctcggaagaaacttgagacaaattggttgcaaagtgttactgggcagccaagaactcaagaaccaagctgtcggttatcacttaacgagaaattttctaattgggattctcctactttccgttcaaagagtactactggactaactgataaatcgagttgcaccatgttgcataaggataaatcttctttcgatgccgctccagatttggacatgtatcaaactgtggagtcaactcaaaagaggcctgtttcaaaagttcattctatttatcagaggcctgagaaacctatttttgaagacgaaattcacatgcagcatactgtttcagatatgtttcatgataaaattgaattatcgaacccatatcagaacaagaatctccagagtgacattgatatgagcactttcattgggcagaaggtggagaagcaagaagatgaatttccatgcttcagcagttcaagtgcagacaccttccgtgcagagaaagcagcgcgttctgtaagacaaactgttgatcgacacagtacatgctcacagccttctggcagggattcattcaggcacgggttcagtcctggtttcaatttccaggagtcagaaccaaacacgttttgggcagatagctatgtttgcaatggtacttttcaggcgggtcttgagttcagtggtgtggttgcaagaaaagacagtgataagaatgaagtcaagattgaggcatctgagaaaccagatactaagatattgacaggaacatgttggctctctgcagataacaggaatgtgattaatgggactgaaacatgttctgatggctcagaagcgttcaattgttctgaagcacagaaggaaacttcagcagtagtgacacaaattcctgcgaacttgagctctcttcgggaaacctcagcagaactgttccaagttcgtaatcacgtcatacctgtaaagagggaaaagatagataatcctggtgttgacttcgatgctgtgatgcattcaaaaagcaagatccacgatgttagagatcattctaaactaaatactacgtttcgatctcctttcattggagaggtggtggggattgagaagaagattgtagcgaacgtgtcacccgacaactctgatgttcagtatcagtttatgcttgaacaacgtgttcttcggcggctttgtgttcagaagatagtggtgcctacaccgatgaaggacaggctagacaaggatacaaacttcacgatagcggaggatggatctcttcatgtccttccaaaaagcgtctaacagattcacatcaggggaaggaaatgacaatgtagggaaggaactcatttcatgcccgcgaaatgcaggagcaagcccatacacacgtctgagttcctctgtgctcatattctcatttaagggcacctcgctcgtttgtagtgtctgtttggaaatagtaatctttccttcactcattagtcctagtgttgattttcaccataatatcgcttcaatgtatgcgtgtggaaatatggatttctgaattgtttgttgttacttaagtagtgtttggttccggaatatggtgggacgaagctgtttcactctcaatttattgttgtttggattggttctgtgtagaatagagtggctataaaaaaattatgctcaaatgttaaatcattcgatttctt

SEQ ID NO: 75558 - DNA, 3360 bp, Zea Mays
ctcgctttgaccctttcactctgcgcgcgctatctctctagtggcgtcgtgggcgactgccgcgcctccgtcaggtgccgaggtcttcgtcgggcctttcgccggcgacgagcacctaccagttgtgggatttctcaccgcttgctcgcgatgctgcaatggacgggtggttcgaggaggaaggtgtacgcctccaggaagtcaacacagagcaggcaaaggcagtacttcgaacaaaagcgacggcaacagcagcagccagagctgcagtaccaggatgatgtggcaggaggtcaagcatcacaaaatcaacaacgtcgttcacttgatgttctgaacatcaatgatctggctactccaaataatcatcatagtggatccacaaatacagatggtgccatttcacaagtggattgcattctttcagatgcttctcctaaagaggcgataaagaatatcacttctttatgcaatatcaacatgaaggaagcaggtgagggtgccatttctgtacaaacagtcaagttctcagccaaggtcagtatatccacacagtatggtgagagtgtgcctgcatttggcctgttttatgaatgccagtattgtggattggcagattgtcttcaccctttggtcatcaagatgttgcagaacctgttaatcgtcatgaagatcctcttggttgtaaagtgtcttcatccataaactgtagcaccaggcagaaaaatcaaaatctggaactccaaagtgaaatttcacttattgatttggtcagttacgagggatcaaagaataggttgaccgcacaatctgcccatgaacctcatgtttcattttctgttaaaggccttggtcatatcaagatggaaacacctccccattcaccgcgacgagccaaaaggattctattaccagtatcaatatgctgaaggagcaaagaccatcagccaaaatgtgcagtatattggatgaagcaggctatgaaaggagagaacagtttaactgttatttaccggattcatctaagagcctcaatgctgacctctatgttgaggacgaggacatgttttatgaacctcaagctgaaaaagattggcaatcaaagcatagtagatcagatggcaatcttgctgatgagaattatgatggactctggaggatggatgaatttaattcagaggatcatctttttactcaaagagacaaacatgttgatataagtggctatggatttaaagacggatactctccagagcgaagaaactcaacaagacctgtcacagtatttgagaatacaggaattcaatcctcacatgatctcttttctgatcattcattgatggatgatgaggacactgaacttttcaagtgggaaagtcacccaccaagtaagaaaaaatccaactcaaatagcaattttggtccttctgcttggccttatgacatggtcgatggttcagagaaaaggagtccaataagtgaagaatcatgctcatctgctgcagcgatgaaggatagaacgtgcaagaaacaatcaccatcaatgaagaatgatatgaacgagaatgacgagtttcatataagattggataagctggatattccaaacatggatgcacctcttcatgggaggtcactgtttaacaatccagaaaagttggataggaaagaaacagcacctcggaagaaacttgagacaaattggttgcaaagtgttactgggcagccaagaactcaagaaccaagctgtcggttatcacttaacgagaaattttctaattgggattctcctactttccgttcaaagagtactactggactaactgataaatcgagttgcaccatgttgcataaggataaatcttctttcgatgccgctccagatttggacatgtatcaaactgtggagtcaactcaaaagaggcctgtttcaaaagttcattctatttatcagaggcctgagaaacctatttttgaagacgaaattcacatgcagcatactgtttcagatatgtttcatgataaaattgaattatcgaacccatatcagaacaagaatctccagagtgacattgatatgagcactttcattgggcagaaggtggagaagcaagaagatgaatttccatgcttcagcagttcaagtgcagacaccttccgtgcagagaaagcagcgcgttctgtaagacaaactgttgatcgacacagtacatgctcacagccttctggcagggattcattcaggcacgggttcagtcctggtttcaatttccaggagtcagaaccaaacacgttttgggcagatagctatgtttgcaatggtacttttcaggcgggtcttgagttcagtggtgtggttgcaagaaaagacagtgataagaatgaagtcaagattgaggcatctgagaaaccagatactaagatattgacaggaacatgttggctctctgcagataacaggaatgtgattaatgggactgaaacatgttctgatggctcagaagcgttcaattgttctgaagcacagaaggaaacttcagcagtagtgacacaaattcctgcgaacttgagctctcttcgggaaacctcagcagaactgttccaagttcgtaatcacgtcatacctgtaaagagggaaaagatagataatcctggtgttgacttcgatgctgtgatgcattcaaaaagcaagatccacgatgttagagatcattctaaactaaatactacgtttcgatctcctttcattggagaggtggtggggattgagaagaagattgtagcgaacgtgtcacccgacaactctgatgttcagtatcagtttatgcttgaacaacgtgttcttcggcggctttgtgttcagaagatagtggtgcctacaccgatgaaggacaggctagacaaggatacaaacttcacgatagcggaggatggatctcttcatgtccttccaaaaagcgtctaacagattcacatcaggggaaggaaatgacaatgtagggaaggaactcatttcatgcccgcgaaatgcaggagcaagcccatacacacgtctgagttcctctgtgctcatattctcatttaagggcacctcgctcgtttgtagtgtctgtttggaaatagtaatctttccttcactcattagtcctagtgttgattttcaccataatatcgcttcaatgtatgcgtgtggaaatatggatttctgaattgtttgttgttacttaagtagtgtttggttccggaatatggtgggacgaagctgtttcactctcaatttattgttgtttggattggttctgtgtagaatagagtggctataaaaaaattatgctcaaatgttaaatcattcgatttctt

SEQ ID NO: 75559 - DNA, 3459 bp, Zea Mays
cggcactgccttctcttctcgctttgaccctttcactctgcgcgcgctatctctctagtggcgtcgtgggcgactgccgcgcctccgtcaggtgccgaggtcttcgtcgggcctttcgccggcgacgagcacctaccagttgtgggatttctcaccgcttgctcgcgatgctgcaatggacgggtggttcgaggaggaaggtgtacgcctccaggaagtcaacacagagcaggcaaaggcagtacttcgaacaaaagcgacggcaacagcagcagccagagctgcagtaccaggatgatgtggcaggaggtcaagcatcacaaaatcaacaacgtcgttcacttgatgttctgaacatcaatgatctggctactccaaataatcatcatagtggatccacaaatacagatggtgccatttcacaagtggattgcattctttcagatgcttctcctaaagaggcgataaagaatatcacttctttatgcaatatcaacatgaaggaagcaggtgagggtgccatttctgtacaaacagtcaagttctcagccaaggtcagtatatccacacagtatggtgagagtgtgcctgcatttggcctgttttatgaatgccagtattgtggattggcagattgtcttcaccctttggtcatcaagatgttgcagaacctgttaatcgtcatgaagatcctcttggttgtaaagtgtcttcatccataaactgtagcaccaggcagaaaaatcaaaatctggaactccaaagtgaaatttcacttattgatttggtcagttacgagggatcaaagaataggttgaccgcacaatctgcccatgaacctcatgtttcattttctgttaaaggccttggtcatatcaagatggaaacacctccccattcaccgcgacgagccaaaagggttttacctttacctccaaagcccatgcggtttatacataaagcaaagcggtctataccatttgatgtcacaaaggcattggattctattaccagtatcaatatgctgaaggagcaaagaccatcagccaaaatgtgcagtatattggatgaagcaggctatgaaaggagagaacagtttaactgttatttaccggattcatctaagagcctcaatgctgacctctatgttgaggacgaggacatgttttatgaacctcaagctgaaaaagattggcaatcaaagcatagtagatcagatggcaatcttgctgatgagaattatgatggactctggaggatggatgaatttaattcagaggatcatctttttactcaaagagacaaacatgttgatataagtggctatggatttaaagacggatactctccagagcgaagaaactcaacaagacctgtcacagtatttgagaatacaggaattcaatcctcacatgatctcttttctgatcattcattgatggatgatgaggacactgaacttttcaagtgggaaagtcacccaccaagtaagaaaaaatccaactcaaatagcaattttggtccttctgcttggccttatgacatggtcgatggttcagagaaaaggagtccaataagtgaagaatcatgctcatctgctgcagcgatgaaggatagaacgtgcaagaaacaatcaccatcaatgaagaatgatatgaacgagaatgacgagtttcatataagattggataagctggatattccaaacatggatgcacctcttcatgggaggtcactgtttaacaatccagaaaagttggataggaaagaaacagcacctcggaagaaacttgagacaaattggttgcaaagtgttactgggcagccaagaactcaagaaccaagctgtcggttatcacttaacgagaaattttctaattgggattctcctactttccgttcaaagagtactactggactaactgataaatcgagttgcaccatgttgcataaggataaatcttctttcgatgccgctccagatttggacatgtatcaaactgtggagtcaactcaaaagaggcctgtttcaaaagttcattctatttatcagaggcctgagaaacctatttttgaagacgaaattcacatgcagcatactgtttcagatatgtttcatgataaaattgaattatcgaacccatatcagaacaagaatctccagagtgacattgatatgagcactttcattgggcagaaggtggagaagcaagaagatgaatttccatgcttcagcagttcaagtgcagacaccttccgtgcagagaaagcagcgcgttctgtaagacaaactgttgatcgacacagtacatgctcacagccttctggcagggattcattcaggcacgggttcagtcctggtttcaatttccaggagtcagaaccaaacacgttttgggcagatagctatgtttgcaatggtacttttcaggcgggtcttgagttcagtggtgtggttgcaagaaaagacagtgataagaatgaagtcaagattgaggcatctgagaaaccagatactaagatattgacaggaacatgttggctctctgcagataacaggaatgtgattaatgggactgaaacatgttctgatggctcagaagcgttcaattgttctgaagcacagaaggaaacttcagcagtagtgacacaaattcctgcgaacttgagctctcttcgggaaacctcagcagaactgttccaagttcgtaatcacgtcatacctgtaaagagggaaaagatagataatcctggtgttgacttcgatgctgtgatgcattcaaaaagcaagatccacgatgttagagatcattctaaactaaatactacgtttcgatctcctttcattggagaggtggtggggattgagaagaagattgtagcgaacgtgtcacccgacaactctgatgttcagtatcagtttatgcttgaacaacgtgttcttcggcggctttgtgttcagaagatagtggtgcctacaccgatgaaggacaggctagacaaggatacaaacttcacgatagcggaggatggatctcttcatgtccttccaaaaagcgtctaacagattcacatcaggggaaggaaatgacaatgtagggaaggaactcatttcatgcccgcgaaatgcaggagcaagcccatacacacgtctgagttcctctgtgctcatattctcatttaagggcacctcgctcgtttgtagtgtctgtttggaaatagtaatctttccttcactcattagtcctagtgttgattttcaccataatatcgcttcaatgtatgcgtgtggaaatatggatttctgaattgtttgttgttacttaagtagtgtttggttccggaatatggtgggacgaagctgtttcactctcaatttattgttgtttggattggttctgtgtagaatagagtggctataaaaaaattatgctcaaatgttaaatcattcgatttctt

SEQ ID NO: 75560 - DNA, 3291 bp, Zea Mays
ctgcgatcggcactgccttctcttctcgctttgaccctttcactctgcgcgcgctatctctctagtggcgtcgtgggcgactgccgcgcctccgtcaggtgccgaggtcttcgtcgggcctttcgccggcgacgagcacctaccagttgtgggatttctcaccgcttgctcgcgatgctgcaatggacgggtggttcgaggaggaaggtgtacgcctccaggaagtcaacacagagcaggcaaaggcagtacttcgaacaaaagcgacggcaacagcagcagccagagctgcagtaccaggatgatgtggcaggagatacagatggtgccatttcacaagtggattgcattctttcagatgcttctcctaaagaggcgataaagaatatcacttctttatgcaatatcaacatgaaggaagcaggtgagggtgccatttctgtacaaacagtcaagttctcagccaaggtcagtatatccacacagtatggtgagagtgtgcctgcatttggcctgttttatgaatgccagtattgtggattggcagattgtcttcaccctttggtcatcaagatgttgcagaacctgttaatcgtcatgaagatcctcttggttgtaaagtgtcttcatccataaactgtagcaccaggcagaaaaatcaaaatctggaactccaaagtgaaatttcacttattgatttggtcagttacgagggatcaaagaataggttgaccgcacaatctgcccatgaacctcatgtttcattttctgttaaaggccttggtcatatcaagatggaaacacctccccattcaccgcgacgagccaaaaggattctattaccagtatcaatatgctgaaggagcaaagaccatcagccaaaatgtgcagtatattggatgaagcaggctatgaaaggagagaacagtttaactgttatttaccggattcatctaagagcctcaatgctgacctctatgttgaggacgaggacatgttttatgaacctcaagctgaaaaagattggcaatcaaagcatagtagatcagatggcaatcttgctgatgagaattatgatggactctggaggatggatgaatttaattcagaggatcatctttttactcaaagagacaaacatgttgatataagtggctatggatttaaagacggatactctccagagcgaagaaactcaacaagacctgtcacagtatttgagaatacaggaattcaatcctcacatgatctcttttctgatcattcattgatggatgatgaggacactgaacttttcaagtgggaaagtcacccaccaagtaagaaaaaatccaactcaaatagcaattttggtccttctgcttggccttatgacatggtcgatggttcagagaaaaggagtccaataagtgaagaatcatgctcatctgctgcagcgatgaaggatagaacgtgcaagaaacaatcaccatcaatgaagaatgatatgaacgagaatgacgagtttcatataagattggataagctggatattccaaacatggatgcacctcttcatgggaggtcactgtttaacaatccagaaaagttggataggaaagaaacagcacctcggaagaaacttgagacaaattggttgcaaagtgttactgggcagccaagaactcaagaaccaagctgtcggttatcacttaacgagaaattttctaattgggattctcctactttccgttcaaagagtactactggactaactgataaatcgagttgcaccatgttgcataaggataaatcttctttcgatgccgctccagatttggacatgtatcaaactgtggagtcaactcaaaagaggcctgtttcaaaagttcattctatttatcagaggcctgagaaacctatttttgaagacgaaattcacatgcagcatactgtttcagatatgtttcatgataaaattgaattatcgaacccatatcagaacaagaatctccagagtgacattgatatgagcactttcattgggcagaaggtggagaagcaagaagatgaatttccatgcttcagcagttcaagtgcagacaccttccgtgcagagaaagcagcgcgttctgtaagacaaactgttgatcgacacagtacatgctcacagccttctggcagggattcattcaggcacgggttcagtcctggtttcaatttccaggagtcagaaccaaacacgttttgggcagatagctatgtttgcaatggtacttttcaggcgggtcttgagttcagtggtgtggttgcaagaaaagacagtgataagaatgaagtcaagattgaggcatctgagaaaccagatactaagatattgacaggaacatgttggctctctgcagataacaggaatgtgattaatgggactgaaacatgttctgatggctcagaagcgttcaattgttctgaagcacagaaggaaacttcagcagtagtgacacaaattcctgcgaacttgagctctcttcgggaaacctcagcagaactgttccaagttcgtaatcacgtcatacctgtaaagagggaaaagatagataatcctggtgttgacttcgatgctgtgatgcattcaaaaagcaagatccacgatgttagagatcattctaaactaaatactacgtttcgatctcctttcattggagaggtggtggggattgagaagaagattgtagcgaacgtgtcacccgacaactctgatgttcagtatcagtttatgcttgaacaacgtgttcttcggcggctttgtgttcagaagatagtggtgcctacaccgatgaaggacaggctagacaaggatacaaacttcacgatagcggaggatggatctcttcatgtccttccaaaaagcgtctaacagattcacatcaggggaaggaaatgacaatgtagggaaggaactcatttcatgcccgcgaaatgcaggagcaagcccatacacacgtctgagttcctctgtgctcatattctcatttaagggcacctcgctcgtttgtagtgtctgtttggaaatagtaatctttccttcactcattagtcctagtgttgattttcaccataatatcgcttcaatgtatgcgtgtggaaatatggatttctgaattgtttgttgttacttaagtagtgtttggttccggaatatggtgggacgaagctgtttcactctcaatttattgttgtttggattggttctgtgtagaatagagtggctataaaaaaattatgctcaaatgttaaatcattcgatttctt

SEQ ID NO: 75561 - DNA, 3373 bp, Zea Mays
ctgcgatcggcactgccttctcttctcgctttgaccctttcactctgcgcgcgctatctctctagtggcgtcgtgggcgactgccgcgcctccgtcaggtgccgaggtcttcgtcgggcctttcgccggcgacgagcacctaccagttgtgggatttctcaccgcttgctcgcgatgctgcaatggacgggtggttcgaggaggaaggtgtacgcctccaggaagtcaacacagagcaggcaaaggcagtacttcgaacaaaagcgacggcaacagcagcagccagagctgcagtaccaggatgatgtggcaggagatacagatggtgccatttcacaagtggattgcattctttcagatgcttctcctaaagaggcgataaagaatatcacttctttatgcaatatcaacatgaaggaagcaggtgagggtgccatttctgtacaaacagtcaagttctcagccaaggtcagtatatccacacagtatggtgagagtgtgcctgcatttggcctgttttatgaatgccagtattgtggattggcagattgtcttcaccctttggtcatcaagatgttgcagaacctgttaatcgtcatgaagatcctcttggttgtaaagtgtcttcatccataaactgtagcaccaggcagaaaaatcaaaatctggaactccaaagtgaaatttcacttattgatttggtcagttacgagggatcaaagaataggttgaccgcacaatctgcccatgaacctcatgtttcattttctgttaaaggccttggtcatatcaagatggaaacacctccccattcaccgcgacgagccaaaagggttttacctttacctccaaagcccatgcggtttatacataaagcaaagcggtctataccatttgatgtcacaaaggcattggattctattaccagtatcaatatgctgaaggagcaaagaccatcagccaaaatgtgcagtatattggatgaagcaggctatgaaaggagagaacagtttaactgttatttaccggattcatctaagagcctcaatgctgacctctatgttgaggacgaggacatgttttatgaacctcaagctgaaaaagattggcaatcaaagcatagtagatcagatggcaatcttgctgatgagaattatgatggactctggaggatggatgaatttaattcagaggatcatctttttactcaaagagacaaacatgttgatataagtggctatggatttaaagacggatactctccagagcgaagaaactcaacaagacctgtcacagtatttgagaatacaggaattcaatcctcacatgatctcttttctgatcattcattgatggatgatgaggacactgaacttttcaagtgggaaagtcacccaccaagtaagaaaaaatccaactcaaatagcaattttggtccttctgcttggccttatgacatggtcgatggttcagagaaaaggagtccaataagtgaagaatcatgctcatctgctgcagcgatgaaggatagaacgtgcaagaaacaatcaccatcaatgaagaatgatatgaacgagaatgacgagtttcatataagattggataagctggatattccaaacatggatgcacctcttcatgggaggtcactgtttaacaatccagaaaagttggataggaaagaaacagcacctcggaagaaacttgagacaaattggttgcaaagtgttactgggcagccaagaactcaagaaccaagctgtcggttatcacttaacgagaaattttctaattgggattctcctactttccgttcaaagagtactactggactaactgataaatcgagttgcaccatgttgcataaggataaatcttctttcgatgccgctccagatttggacatgtatcaaactgtggagtcaactcaaaagaggcctgtttcaaaagttcattctatttatcagaggcctgagaaacctatttttgaagacgaaattcacatgcagcatactgtttcagatatgtttcatgataaaattgaattatcgaacccatatcagaacaagaatctccagagtgacattgatatgagcactttcattgggcagaaggtggagaagcaagaagatgaatttccatgcttcagcagttcaagtgcagacaccttccgtgcagagaaagcagcgcgttctgtaagacaaactgttgatcgacacagtacatgctcacagccttctggcagggattcattcaggcacgggttcagtcctggtttcaatttccaggagtcagaaccaaacacgttttgggcagatagctatgtttgcaatggtacttttcaggcgggtcttgagttcagtggtgtggttgcaagaaaagacagtgataagaatgaagtcaagattgaggcatctgagaaaccagatactaagatattgacaggaacatgttggctctctgcagataacaggaatgtgattaatgggactgaaacatgttctgatggctcagaagcgttcaattgttctgaagcacagaaggaaacttcagcagtagtgacacaaattcctgcgaacttgagctctcttcgggaaacctcagcagaactgttccaagttcgtaatcacgtcatacctgtaaagagggaaaagatagataatcctggtgttgacttcgatgctgtgatgcattcaaaaagcaagatccacgatgttagagatcattctaaactaaatactacgtttcgatctcctttcattggagaggtggtggggattgagaagaagattgtagcgaacgtgtcacccgacaactctgatgttcagtatcagtttatgcttgaacaacgtgttcttcggcggctttgtgttcagaagatagtggtgcctacaccgatgaaggacaggctagacaaggatacaaacttcacgatagcggaggatggatctcttcatgtccttccaaaaagcgtctaacagattcacatcaggggaaggaaatgacaatgtagggaaggaactcatttcatgcccgcgaaatgcaggagcaagcccatacacacgtctgagttcctctgtgctcatattctcatttaagggcacctcgctcgtttgtagtgtctgtttggaaatagtaatctttccttcactcattagtcctagtgttgattttcaccataatatcgcttcaatgtatgcgtgtggaaatatggatttctgaattgtttgttgttacttaagtagtgtttggttccggaatatggtgggacgaagctgtttcactctcaatttattgttgtttggattggttctgtgtagaatagagtggctataaaaaaattatgctcaaatgttaaatcattcgatttctt

SEQ ID NO: 75562 - DNA, 682 bp, Zea Mays
ctcacttagtcatcaggccacagtatgacatgaagctactagctgttgacataccaatggcatcaggtcctgaccagcggctgttcctcgtgggtgatgaacaagagtacaaggtcggcgggggcttgatatctgagctacgagacccgatcgtaaaagctatggccgcggagaaggagtttgactatcttgacgagagagaggatgaggaggacgagcggagggagcgtgaggaggcggagcaagaggaggcggaagcattgaggcgcgaggaggaaaggctgcgccaggcgggtgaagagcgtaggcggcgggaggaggctgagagcctggagaaagctacgtgacatgacttactgtactgactttccaccttgcctcgtgcattgtctcctacctctgtccctcccggagtgtagcgatcagcggtttccacagcaggagattgcttccgagttcatttggagttcctggtggtcaattcggcgtcaccagtctcaaagttgttgagaaggaaggaataattttgaccgttacgcgacaggtcacttcggcgaagcaatgtaatttatagtggttgatcagttgttaacctttttttttgctgcacgtctgagcgcatggagttgtggtggtatgagacagccagtttacctgctcagcttctacgcggatgaagatc

SEQ ID NO: 75563 - DNA, 1542 bp, Zea Mays
aaaattcgtcacaggtctcctggtccaggccgccgccggttcaatctctcctctgacttctccggctgtcctcgactgcgaacccgatctcgattcgatccccaagccatcccatggcggctgccctctcctcgcggcgtgccctgcacagcctccaccgccgcctcctcttccacccctccccctcacccgccgccgcacgccgcgcgctacccacttccactcgcagccccatccccgcacactcccccaccttctccttctccttctactcctcctcccgcttcttcaccaccgcgcgccccgatgcgaggctgcggcacgggatgctgccgcagcggctgataggcggggtcaggtcggtggcgaacggtgggtcgaaactgggaccgctgggtcagggggtcaaggggctggggcggcccatggaggcggcgaggagcgcggccgcgcggtaccgcgcggccgtcggcctgcaggtcgaggccttctggcggcgcaactccatgatcctcgtcggtgcggggggagtcatcgtctgtttcttgctctggaggatcatgttcggcatcgccagcaccttcgtcggcctctccgagggtatggccaaggtatgtatgcccgggcaaggttaaccataaaccctgacaaggtttaccggctggctatgacaaaactcaatacatctgctgccatccttgaagttatgggtgcgcccctaactggtactgatgtcagagcatatgttatgtctggaggaggcccgaaactgaaggacttcaaatttaagcttggcagtaaacggtgcttcctcattttccccatcaaaggatcagaaagaaggggcctcgtaagtgttgaggccaagaagaaaaatggacagtatgacatgaagctactagctgttgacataccaatggcatcaggtcctgaccagcggctgttcctcgtgggtgatgaacaagagtacaaggtcggcgggggcttgatatctgagctacgagacccgatcgtaaaagctatggccgcggagaaggagtttgactatcttgacgagagagaggatgaggaggacgagcggagggagcgtgaggaggcggagcaagaggaggcggaagcattgaggcgcgaggaggaaaggctgcgccaggcgggtgaagagcgtaggcggcgggaggaggctgagagcctggagaaagctacgtgacatgacttactgtactgactttccaccttgcctcgtgcattgtctcctacctctgtccctcccggagtgtagcgatcagcggtttccacagcaggagattgcttccgagttcatttggagttcctggtggtcaattcggcgtcaccagtctcaaagttgttgagaaggaaggaataattttgaccgttacgcgacaggtcacttcggcgaagcaatgtaatttatagtggttgatcagttgttaacctttttttttgctgcacgtctgagcgcatggagttgtggtggtatgagacagccagtttacctgctcagcttctacgcggatgaagatc

SEQ ID NO: 75564 - DNA, 1520 bp, Zea Mays
aaaattcgtcacaggtctcctggtccaggccgccgccggttcaatctctcctctgacttctccggctgtcctcgactgcgaacccgatctcgattcgatccccaagccatcccatggcggctgccctctcctcgcggcgtgccctgcacagcctccaccgccgcctcctcttccacccctccccctcacccgccgccgcacgccgcgcgctacccacttccactcgcagccccatccccgcacactcccccaccttctccttctccttctactcctcctcccgcttcttcaccaccgcgcgccccgatgcgaggctgcggcacgggatgctgccgcagcggctgataggcggggtcaggtcggtggcgaacggtgggtcgaaactgggaccgctgggtcagggggtcaaggggctggggcggcccatggaggcggcgaggagcgcggccgcgcggtaccgcgcggccgtcggcctgcaggtcgaggccttctggcggcgcaactccatgatcctcgtcggtgcggggggagtcatcgtctgtttcttgctctggaggatcatgttcggcatcgccagcaccttcgtcggcctctccgagggtatggccaagtacggcttcctcgcccttgccaccgccattgtcgcctttgccggtatgtatgcccgggcaaggttaaccataaaccctgacaaggtttaccggctggctatgacaaaactcaatacatctgctgccatccttgaagttatgggtgcgcccctaactgcttggcagtaaacggtgcttcctcattttccccatcaaaggatcagaaagaaggggcctcgtaagtgttgaggccaagaagaaaaatggacagtatgacatgaagctactagctgttgacataccaatggcatcaggtcctgaccagcggctgttcctcgtgggtgatgaacaagagtacaaggtcggcgggggcttgatatctgagctacgagacccgatcgtaaaagctatggccgcggagaaggagtttgactatcttgacgagagagaggatgaggaggacgagcggagggagcgtgaggaggcggagcaagaggaggcggaagcattgaggcgcgaggaggaaaggctgcgccaggcgggtgaagagcgtaggcggcgggaggaggctgagagcctggagaaagctacgtgacatgacttactgtactgactttccaccttgcctcgtgcattgtctcctacctctgtccctcccggagtgtagcgatcagcggtttccacagcaggagattgcttccgagttcatttggagttcctggtggtcaattcggcgtcaccagtctcaaagttgttgagaaggaaggaataattttgaccgttacgcgacaggtcacttcggcgaagcaatgtaatttatagtggttgatcagttgttaacctttttttttgctgcacgtctgagcgcatggagttgtggtggtatgagacagccagtttacctgctcagcttctacgcggatgaagatc

SEQ ID NO: 75565 - DNA, 1587 bp, Zea Mays
gaaaaaacgaaaatggttgctgtgttttatggaagcgcaacagaaaaaaaggaggaaaattcgtcacaggtctcctggtccaggccgccgccggttcaatctctcctctgacttctccggctgtcctcgactgcgaacccgatctcgattcgatccccaagccatcccatggcggctgccctctcctcgcggcgtgccctgcacagcctccaccgccgcctcctcttccacccctccccctcacccgccgccgcacgccgcgcgctacccacttccactcgcagccccatccccgcacactcccccaccttctccttctccttctactcctcctcccgcttcttcaccaccgcgcgccccgatgcgaggctgcggcacgggatgctgccgcagcggctgataggcggggtcaggtcggtggcgaacggtgggtcgaaactgggaccgctgggtcagggggtcaaggggctggggcggcccatggaggcggcgaggagcgcggccgcgcggtaccgcgcggccgtcggcctgcaggtcgaggccttctggcggcgcaactccatgatcctcgtcggtgcggggggagtcatcgtctgtttcttgctctggaggatcatgttcggcatcgccagcaccttcgtcggcctctccgaggggtatgtatgcccgggcaaggttaaccataaaccctgacaaggtttaccggctggctatgacaaaactcaatacatctgctgccatccttgaagttatgggtgcgcccctaactggtactgatgtcagagcatatgttatgtctggaggaggcccgaaactgaaggacttcaaatttaagcttggcagtaaacggtgcttcctcattttccccatcaaaggatcagaaagaaggggcctcgtaagtgttgaggccaagaagaaaaatggacagtatgacatgaagctactagctgttgacataccaatggcatcaggtcctgaccagcggctgttcctcgtgggtgatgaacaagagtacaaggtcggcgggggcttgatatctgagctacgagacccgatcgtaaaagctatggccgcggagaaggagtttgactatcttgacgagagagaggatgaggaggacgagcggagggagcgtgaggaggcggagcaagaggaggcggaagcattgaggcgcgaggaggaaaggctgcgccaggcgggtgaagagcgtaggcggcgggaggaggctgagagcctggagaaagctacgtgacatgacttactgtactgactttccaccttgcctcgtgcattgtctcctacctctgtccctcccggagtgtagcgatcagcggtttccacagcaggagattgcttccgagttcatttggagttcctggtggtcaattcggcgtcaccagtctcaaagttgttgagaaggaaggaataattttgaccgttacgcgacaggtcacttcggcgaagcaatgtaatttatagtggttgatcagttgttaacctttttttttgctgcacgtctgagcgcatggagttgtggtggtatgagacagccagtttacctgctcagcttctacgcggatgaagatc

SEQ ID NO: 75566 - DNA, 316 bp, Zea Mays
ccaccgcccgcatggcccaccgccacgcccgcttccgccgcacaccgccgacggccaccatccctggcggccgcggcctccacctacctaccacccaatcagtaccgcctccctggctgctactgctgccgctgctgctacctaccagcaggaggatgaggaacacgacgagtgggagggggagacgatggaaaggggagggagagcggccgagcagagacagtgggaagggtcggtcgggggaggggtgtttatgcgaagggaggccggaggtggctgcgtgcgtcggcacgcacgggcacggcgctgggcattt

SEQ ID NO: 75567 - DNA, 1856 bp, Zea Mays
accaacaaaagaaggaccccagtaccccactaaagaagagaagaatgtggcgtgaacagagagacctgaccctgaggcaggtgaggaggtccagggagcaatgggtttcggcgtagtgcacctcctcgacgcggtgttccgccgcatgttccggtcggccggcctccgcccgggctcggccacggtgaacgccgaagacgacacggtcatccactactgggcccacccgtccctcctccgcccgccgccctccgactccgactccgagcagcggcagccggtggtggtgctgatccacgggttcgggccggacccgacgtggcagtgggcggcgcaggcgggcccgctgtcgcgccacttccgcctggtggtgccgacgctgctcttcttcggggcgtccggcacgcgcgcgcccgcgcggtccgacgcctcccaggccgccgcgctcgccgcgctgctcgcgggcccgggccagcagcacctcccgggcctcggcgccggccgcaccgtgcacgtggtgggcaccagctacggcggcctcgtggcgtaccacctcgcccgggagctggagcggcaaggcggcggcgttcgcgtcggcaaggtggtgctgtgcgactcggacgcgtgcaagggcgccgaggacgaccgcgcgctggcggccaggagcggcgtggcggaggtggcggagctgctggcgcccgccgacacccgggcgctgcgccgcctcatggcggtctgcgcccaccgccccgtcaaagatacttcgcggacaagagggaggagaagatggcgctcatcagagggatcgccaccggagaaggcttcgagcttgctccgctgcctcaggaggtgctcatcatctggggagagttcgaccagatcttcccggtggacaaagcgcacaaggtgaaagagaagctcggggagaaggcgacggtgaaggtgatccccaacgcggggcacctgccgcagcaggaggacagcaagctcttcaaccgagtcctcctcgacttcctgctgcgcccttcctccaccgccgcctgacctccaacggcagcgcccaagccaaacagcttatagctcgctcggctgccgccttttgtttccggcgttcttgtttgtttgtagagtggagaggaggcgctgccgccttttgtttttgtttttctccatggctggcttgttttgaaattcaagagggtggcaatgtgcagatcctaccttgtgtctaatgatgtaggtttgatttattactgtggcacagatttctcgacgccggccatgtctacgtacgtcagcgttgttttcatcgtccgcgatcggattcacagcgtgcggtgcggcgcattctccctccgccgcccatctcccgtcttttgctggtgtaatgttatgagagattacgaggccatgccctggtgtcctcttctagttcagaaggcaacgcccagcggccaacgccgcagaacttgcacggacaaaaggcaactcgtccacgccgaacgagagcggttaaaagattgcaaatttccagagcgcattcctttctggtgctacgtacaaaacagccgaatgatcaatgccatctgatcgagacgggcgtgcaagtgcaagccaagtcgggatcagccgacccgtacctacagaccaacggcaacaaccacgtcgacagtttctatacaccatggacgttaaaatccataggaaccaagcaattgctccatcgccataatttgatcaagtcaagggtaatgttgtcagaatgttgttgtgaatcttgaatgattgcttactggtacaataaacttccaggggaaaaaatgaactactttcacatgagcagagagagctaatgc

SEQ ID NO: 75568 - DNA, 4635 bp, Zea Mays
gtggtagctaccattgcaaatgcttcggtgtgtgagtcctcggaaaaagtgcggccggggcaggctcgtgccggccggaagcggctcaaaacagcagcactgcactgcagcaggccggcgtccgaatccatcgtcatcaattcggcatttcttcccccgtacagcctaccaaccaactactacagcacagcacggagagagtcttgacctcggagcgagcgagagcgagagagagagctccacctcctgctcgtagctcctgctacgcggctgtatttatagcgagcgtcctggcctctcttctccctgctcgctcctagctggggtggggagggaagaagaggacaagcagcacgccaacgcgggagcataccgacagctccagggaacgattgaaggagtaggagaaagagaaagaacaagcgtgggatacagacaacgagaagaccgacgagccgcgacaccgccactgccaccccgctccgaagtcctagctcgtgctacaaaggaataaaccaaggccggcccatgtcttcatctagcggctgtaaccgcgggcgagcagtcctcccagtcactgcctccctcgttcccttcctgctcctcctcgtcgtcgtctcgtgccaggccgccctggtggtctccgcgacgcacacgcacgggcacggcggcgggaagcatgccggcgccgcgcgggcggccttccgtgccggggacgagcaggaggcgtacgcgaggatcatggcgcgcatggccaggatggacaaggactccaacatgacgatacaggttccttcccttcccatctcgtactcgtacatccattccctgcctgctgttccttggcccagctgtgcgcgcgcgctgccggttccggcttccggccaagcaagcctgcaaatccaccacctcgctgtcgtttacgtactctagctcgttcgtcgtgtctcgtgcgtgtgcgtgcgcgtgtgcagagccccgacggcgacgtcatccactgcgtgccggcgcacctgcagccggcgttcgaccaccccaggctgagagggcaggagcccgaggacgagcccgtggagaggcccatgtccaagggcggcgccgccgaggaggaggccggcgtgttcccgcaggcgtggagcgacggcggcagcaagcggtgcccggcggggacggtgccgatacggcggacggcggcgcgcgacgtgctgcgggccagctccgcgcgccggttcgggatgaaggcccgcggcggcggcagcagcagcagcaacgcccgccgcgactccaccagcagcggccatgaggtcagtgagtcactctgtctcatcagtcatcgccttcgccttcgcctcgccgcgacgtgcccgcccgccattagcgtcgcgactcgcgagacccacacccaccacgccctgaaaagacacgcacggccagtaatcaagtcctggtggtgctgtaacattaaagctggattagttgggggggaaaacactggtgttagtgggagtaactgccgcgattcattacgcaaccaaatggcgcagccgtgcatgcctgcctgcctcaggttttgtcgaccgcgctcctgctctgctccagcagccacaccacacccacaggccacagtgcagttaggctggcgcacagtacattactggcgcatgcagtgtgcggtgcggccatggccgtaggcccgtagctatagcagcgtggagcaacgtcctactctctctctatatatatacacctcgatctatcgatcggctctgaaactctgatggcttgcatttgcatggtgggcgcggcataacggcggcggcggcggcgcttgcagcacgcggtggggtacgtgacgggggaccagttctacggcgccaaggccagcctgaacgtgtggccggccaaggtggcgtcggcggcggagttcagcctgtcccagatctgggtcatctccggctccttcggcaacgacctcaacaccatcgaggccggatggcaggtgcgtacgttacgttacgtgcttgctgcaatcaaaaccgccctgcttattgctgccgtacgtacgtgcatgtgtactcgccctcacttaaacaacctccttccttccttccaagtacatacagagatgcgccctagctagctacctaccaggaaatccttgcatatgtataattgcacacataaatgacgcaccgtatgtgccgccgtgtttcgttagtctatctacagcagcttgctcatctccatgcttatatatttaaatttcactacgcaaacagtacacactatgatacaaaataatactccccccgtttcgttttagttgtcgctggatagtgtaaaattgaactatccagcgacaactaaaaaggaacggagggagtagtattttggatgatcagctgctacagaaactagacgggcgccattgcccattgctgcgtccggattgtcttctagcttccagcgcgggagagatcgagctagtagctataagtaaaggccttgcttgcttgttcggatcctgcagcagtggcagtggtctcgcgccagtcctcgaacagaaaaaaggccctccatcctgcgcctgtgtctttgcgagtaatgggaacctgactcgcagtatagctcttcagttcaggctgcccggccggttggtgacgccagtaaatgtgggtgcctctgcctcctagctgctggccaggcagatgtgcgcgtgaatgaactctggaggtcctcctcctctttgcttgcgtgcttggcttgctttccaccgacacttctggtgttcctatagcatattgtatctatatatcgctgagccagagcatttgaaagaactgaactgaactgaaggacacaccatatatacatcagtggttttcgtagttaactgctggtaagtggtaaccgctttcttctacctctatatgatggagaccttgcttctagttaccaccaatagcagtatagtgtatgcgtttattgaactgaaaggttattacctcgatctatatgatggaatggtagctggatcccgcttcctctgcagcatgcatatgcatgtatgtggctctatgtttgacttgggcagtacattaaggtggtgcagaactggcgctcattaattagattccgtgtcgtcactgtgtgtgatctcgatcggagatagatgtgtgcccattgacctgcgacgatgctgctggcggttccagttccagtcgaggagtcaatcacagattctgctggagactgcactgcagtgctaacttccctgccttgctgcattgttttactcaggtgagccctgagctgtatggcgacagcagcccgaggttcttcacgtattggacgaccgatgcgtaccaggagactgggtgctacaacctgcactgctccggcttcgtccagacgaacagccggatcgccattggagccgccatctcgcctacctcggtctacaacggccggcagttcgacatcagcctgctcatatggaaggacccgcaccgggggaactggtggctgcagctggggtcgggcccgctggtggggtactggccgtcgctcctgttcacgcacctgggcgcccacgccgacatggtgcagttcggcggcgaggtggtgaactcgcgcccggcgggggcgcacacgcccacgcagatggggagcggccacttcccccgcgagggatccaaccgcgcagcctacttccgcaacctgcaggtcgtcgacgccgacaacagcctcgtcgccgccgccgcgctccgcctcgtcgccgaccgcccgggctgctacgacatccagggcggctacaacaccgcctgggggaactacttctactacggagggcccggcaggaacgtgcactgcccgtgatctgtctctgtctctgttggtagccgacgcccgacgacgtacgaccatgaatatacgtgcacagatagacatacagagagtgaagaagaacgtacggatcaccgaccctgccggagttgcatcgtcgtcgctcatcaaccggccggacatggatcgtataatagcaacactgctagtcatatataagctacatctagtccctcgtttagttactgcatgcatgctaatgagtttttaagcagcccgactgcgtatacgcggccgggacggtagcagagaggcaaaaggtttcgaactttcgatatttgatgtatgtgggcttctttcgtttgcattggtctgattgttttttttgtcttgggttatgtatatacatgaagaaatccacatatagtattttcttcatcaccatgtgttgtatagtactccccatcagcgtttactttctcgccgcaagatatcagcgagtttcgcctctctttttttttccgttttccccactgactgaaaacggatatggcccagttttaactagatttcgattcaaaatataaaaaaatacaaaagtcaaattttggtcaacaaaacgaaattcggatcacccaaaacgaaattgtgaaccctgctccccatgcatccattgtgttttttccttctaatttctaactactactacaacaacaaaaaacagtaaacctcctgatgttgagcttgtgatctaaattctgaataaggcggttaaattggctagcaaag

SEQ ID NO: 75569 - DNA, 3149 bp, Zea Mays
gtggtagctaccattgcaaatgcttcggtgtgtgagtcctcggaaaaagtgcggccggggcaggctcgtgccggccggaagcggctcaaaacagcagcactgcactgcagcaggccggcgtccgaatccatcgtcatcaattcggcatttcttcccccgtacagcctaccaaccaactactacagcacagcacggagagagtcttgacctcggagcgagcgagagcgagagagagagctccacctcctgctcgtagctcctgctacgcggctgtatttatagcgagcgtcctggcctctcttctccctgctcgctcctagctggggtggggagggaagaagaggacaagcagcacgccaacgcgggagcataccgacagctccagggaacgattgaaggagtaggagaaagagaaagaacaagcgtgggatacagacaacgagaagaccgacgagccgcgacaccgccactgccaccccgctccgaagtcctagctcgtgctacaaaggaataaaccaaggccggcccatgtcttcatctagcggctgtaaccgcgggcgagcagtcctcccagtcactgcctccctcgttcccttcctgctcctcctcgtcgtcgtctcgtgccaggccgccctggtggtctccgcgacgcacacgcacgggcacggcggcgggaagcatgccggcgccgcgcgggcggccttccgtgccggggacgagcaggaggcgtacgcgaggatcatggcgcgcatggccaggatggacaaggactccaacatgacgatacagagccccgacggcgacgtcatccactgcgtgccggcgcacctgcagccggcgttcgaccaccccaggctgagagggcaggagcccgaggacgagcccgtggagaggcccatgtccaagggcggcgccgccgaggaggaggccggcgtgttcccgcaggcgtggagcgacggcggcagcaagcggtgcccggcggggacggtgccgatacggcggacggcggcgcgcgacgtgctgcgggccagctccgcgcgccggttcgggatgaaggcccgcggcggcggcagcagcagcagcaacgcccgccgcgactccaccagcagcggccatgaggtcagtgagtcactctgtctcatcagtcatcgccttcgccttcgcctcgccgcgacgtgcccgcccgccattagcgtcgcgactcgcgagacccacacccaccacgccctgaaaagacacgcacggccagtaatcaagtcctggtggtgctgtaacattaaagctggattagttgggggggaaaacactggtgttagtgggagtaactgccgcgattcattacgcaaccaaatggcgcagccgtgcatgcctgcctgcctcaggttttgtcgaccgcgctcctgctctgctccagcagccacaccacacccacaggccacagtgcagttaggctggcgcacagtacattactggcgcatgcagtgtgcggtgcggccatggccgtaggcccgtagctatagcagcgtggagcaacgtcctactctctctctatatatatacacctcgatctatcgatcggctctgaaactctgatggcttgcatttgcatggtgggcgcggcataacggcggcggcggcggcgcttgcagcacgcggtggggtacgtgacgggggaccagttctacggcgccaaggccagcctgaacgtgtggccggccaaggtggcgtcggcggcggagttcagcctgtcccagatctgggtcatctccggctccttcggcaacgacctcaacaccatcgaggccggatggcaggtgagccctgagctgtatggcgacagcagcccgaggttcttcacgtattggacgaccgatgcgtaccaggagactgggtgctacaacctgcactgctccggcttcgtccagacgaacagccggatcgccattggagccgccatctcgcctacctcggtctacaacggccggcagttcgacatcagcctgctcatatggaaggacccgcaccgggggaactggtggctgcagctggggtcgggcccgctggtggggtactggccgtcgctcctgttcacgcacctgggcgcccacgccgacatggtgcagttcggcggcgaggtggtgaactcgcgcccggcgggggcgcacacgcccacgcagatggggagcggccacttcccccgcgagggatccaaccgcgcagcctacttccgcaacctgcaggtcgtcgacgccgacaacagcctcgtcgccgccgccgcgctccgcctcgtcgccgaccgcccgggctgctacgacatccagggcggctacaacaccgcctgggggaactacttctactacggagggcccggcaggaacgtgcactgcccgtgatctgtctctgtctctgttggtagccgacgcccgacgacgtacgaccatgaatatacgtgcacagatagacatacagagagtgaagaagaacgtacggatcaccgaccctgccggagttgcatcgtcgtcgctcatcaaccggccggacatggatcgtataatagcaacactgctagtcatatataagctacatctagtccctcgtttagttactgcatgcatgctaatgagtttttaagcagcccgactgcgtatacgcggccgggacggtagcagagaggcaaaaggtttcgaactttcgatatttgatgtatgtgggcttctttcgtttgcattggtctgattgttttttttgtcttgggttatgtatatacatgaagaaatccacatatagtattttcttcatcaccatgtgttgtatagtactccccatcagcgtttactttctcgccgcaagatatcagcgagtttcgcctctctttttttttccgttttccccactgactgaaaacggatatggcccagttttaactagatttcgattcaaaatataaaaaaatacaaaagtcaaattttggtcaacaaaacgaaattcggatcacccaaaacgaaattgtgaaccctgctccccatgcatccattgtgttttttccttctaatttctaactactactacaacaacaaaaaacagtaaacctcctgatgttgagcttgtgatctaaattctgaataaggcggttaaattggctagcaaag

SEQ ID NO: 75570 - DNA, 1643 bp, Zea Mays
gtgcggccggggcaggctcgtgccggccggaagcggctcaaaacagcagcactgcactgcagcaggccggcgtccgaatccatcgtcatcaattcggcatttcttcccccgtacagcctaccaaccaactactacagcacagcacggagagagtcttgacctcggagcgagcgagagcgagagagagagctccacctcctgctcgtagctcctgctacgcggctgtatttatagcgagcgtcctggcctctcttctccctgctcgctcctagctggggtggggagggaagaagaggacaagcagcacgccaacgcgggagcataccgacagctccagggaacgattgaaggagtaggagaaagagaaagaacaagcgtgggatacagacaacgagaagaccgacgagccgcgacaccgccactgccaccccgctccgaagtcctagctcgtgctacaaaggaataaaccaaggccggcccatgtcttcatctagcggctgtaaccgcgggcgagcagtcctcccagtcactgcctccctcgttcccttcctgctcctcctcgtcgtcgtctcgtgccaggccgccctggtggtctccgcgacgcacacgcacgggcacggcggcgggaagcatgccggcgccgcgcgggcggccttccgtgccggggacgagcaggaggcgtacgcgaggatcatggcgcgcatggccaggatggacaaggactccaacatgacgatacaggttccttcccttcccatctcgtactcgtacatccattccctgcctgctgttccttggcccagctgtgcgcgcgcgctgccggttccggcttccggccaagcaagcctgcaaatccaccacctcgctgtcgtttacgtactctagctcgttcgtcgtgtctcgtgcgtgtgcgtgcgcgtgtgcagagccccgacggcgacgtcatccactgcgtgccggcgcacctgcagccggcgttcgaccaccccaggctgagagggcaggagcccgaggacgagcccgtggagaggcccatgtccaagggcggcgccgccgaggaggaggccggcgtgttcccgcaggcgtggagcgacggcggcagcaagcggtgcccggcggggacggtgccgatacggcggacggcggcgcgcgacgtgctgcgggccagctccgcgcgccggttcgggatgaaggcccgcggcggcggcagcagcagcagcaacgcccgccgcgactccaccagcagcggccatgagcacgcggtggggtacgtgacgggggaccagttctacggcgccaaggccagcctgaacgtgtggccggccaaggtggcgtcggcggcggagttcagcctgtcccagatctgggtcatctccggctccttcggcaacgacctcaacaccatcgaggccggatggcaggtgagccctgagctgtatggcgacagcagcccgaggttcttcacgtattggacgaccgatgcgtaccaggagactgggtgctacaacctgcactgctccggcttcgtccagacgaacagccggatcgccattggagccgccatctcgcctacctcggtctacaacggccggcagttcgacatcagcctgctcatatggaagactgacgtacgcgcgcgcgcg

SEQ ID NO: 75571 - DNA, 939 bp, Zea Mays
agccgaaacaaagtgatggatagattattcattccccgcacccgcaagatctcatcccatctttgtgcagtgcgtgcaatccaccattgctgctagtgctcctcacagctggcagcgagcagagagacacaccacaccattgctcttgctcctccggtcctcccaccgatggctgagacctgagacacatatcttactctttcccccacaccctgtgccccggcctatgcaatgcatgcagcaacttgatgaagggcgctggagcctgatggagagtgcatgccgaagaattcaacaagaggttcgcagtttttcagaggcacaggcactgggagtagacgacgatgagacccatcaaggaggatccgttatcgtaggacgttgtagtaggccatggcgctgccgctgcaggtcgatctcttgcattggctgtgttgtgggagtagtgagacatgggagttatggcccttgtagagggtacactacgtactacagtgcaggaactttgagagcagcccagacgacagccggccggccagggagtagtgaagcaacagcacaagcacaggaccagggggggactgatgactggctgtggggactggggagtaatgactgtggaggttgctgctagtgctagctatgatgccatccattacgtgccataaaatggcttttgctgcatctgctttcgcctttgcctttgttaagcaagcaaaaaaaaaaagggaaagtgagatcaaaggacgcggaaagaggagcagcttgcatttgggcagcatgtgcagattgtactaataggtgtggcttatacaggcagcacagggtatatgcatgtgtgatgtctaaagctgctttattatcaccgttttttttcatgaggtaaatacaaaaaaactgcttcgttctagagacacaagcagtgtgtgtaccagtacc

SEQ ID NO: 75572 - DNA, 2343 bp, Zea Mays
cgggtccgtcctccgtcggatagagaggggggcggggccttcgtctttcttggctgctggtttctcgaccactgccgccgcgtcttcctccctcgctgctgctgctgctgctgctgctgctgcggcggtattgcgcgttggagctggccactggtgttcgctcctcttccccccggcttgtttgctgaattcaatctgcggggttgcggccgcgggtgtcgatggggtggtggtggtggtgcctgccggtcgctgctctgctcgccgcgatcctgccgtcgtccgacgccacgctctcccctgccggcatcaactacgaagtggtggccctgatggccatcaagacggagctggaggacccctacaacgtgctcgacaactgggacattaactccgtcgacccctgcagctggaggatggtcacctgctcctccgacggctacgtctccgccttagggctgcctagccagaccttgtccgggaagctatcacccggcatcggcaacctcaccaggctgcaatctgtaacaatgggatttccggccctattcccggtacgataggaaggctggggatgctgaagactcttgacatgtcagataaccagctcacggggactatcccaagttcgcttggaaagctcaagaacctcaattatttgaagttgaacaataatagcttgtctggagttctgcctgattcacttgccagcattgatggttttgctctcgtagatctttcgtttaacaatctcagcggtccattacccaagatttctgcaagaacctttatatcaatatgatccagaagtttgtttgggccatctgaagcagtatgctttcaaggagctccgtgcagctactaataattttaactcaaagaacatcttaggtgaaggtggatatggcatagtatacaagggttatttacgtgatggctccgttgttgctgtcaaaaggctcaaggattataatgccgtcggtggggaaattcaattccaaactgaagttgaagtcataagcttggctgttcatcggaatctcctacgtcttattggattctgcactacagagagtgagaggttacttgtttatccatacatgccaaatggaagtgttgcttctcaattgcgggaacatatcaatgccaagccggctctagactggtcaaggaggaagagggtagcgctaggcacagcgaggggtctgctctaccttcacgagcaatgcgacccgaagataatccaccgagacgtgaaggcctccaacgtactcctcgacgagtacttcgaagcgatcgtgggagacttcggactggcgaagctcctggaccacagggagtcccatgtcacgaccgcggtgcgcgggaccgtcgggcatatagcgccggagtacctgtcgaccgggcagtcgtcggagaagaccgacgtgtttgggttcggggttctgctagtcgagctggtcaccggacagaaggcgctggatttcggaagagtcgcgaaccagaagggcggagtgctggactgggtcaagaagctccatcaagagaagcagctaggcgtgatggtggacaaggacctgggcagcagctacgacggggtcgagctggaggaaatggtccagctggctctgctatgcacgcagtaccacccgtcccaccggcccagaatgtccgaggtgatcaggatgctggaaggcgagcccgggctcgcggagagatgggaagcgtcgcagagcaacgtggacacgccgaagtccgtctcgtcggagctcctgcctcccaagtacgtggatttcgccgccgcggacgagtcctcgcttggcctggaagccatggagctgtccgggccaaggtgaccgaccatctggttgccaaggtcggtcatcgcacaggacaggacgcataggaaaacctatggttgtattgcattggagtcggttaggtgtagagagcccccccgacacaagggaaggcgtcaaattttctggtgggttgtaagggtgtgatctttctgtatatagctgtggtggcattcatcgtagtattgtacatacagcagcgctgtgtgaggtgagtcccatccttgttgcggcgcatctacttggtggcaaagagatgagatgaatgagtatatagaaattaaagttctcagtgcagtgcggttggtgcctgtctgagtttttgcttgctgaaggcgtgcgcagcgtagttggcatgcgtcagtttgtttgacgcataagctcatcaaactgtaacagggacccgttacaccggacctccggatagagtatgatgtactatgggttaaaaacgatcgggtaataagagatggtataaaaaaac

SEQ ID NO: 75573 - DNA, 2408 bp, Zea Mays
ctttcgcgctgcgtccgcggcggcatcattgggtgtccgtgtctggactggagaccgggtccgtcctccgtcggatagagaggggggcggggccttcgtctttcttggctgctggtttctcgaccactgccgccgcgtcttcctccctcgctgctgctgctgctgctgctgctgctgcggcggtattgcgcgttggagctggccactggtgttcgctcctcttccccccggcttgtttgctgaattcaatctgcggggttgcggccgcgggtgtcgatggggtggtggtggtggtgcctgccggtcgctgctctgctcgccgcgatcctgccgtcgtccgacgccacgctctcccctgccggcatcaactacgaagtggtggccctgatggccatcaagacggagctggaggacccctacaacgtgctcgacaactgggacattaactccgtcgacccctgcagctggaggatggtcacctgctcctccgacggctacgtctccgccttagggctgcctagccagaccttgtccgggaagctatcacccggcatcggcaacctcaccaggctgcaatctgtgctgttgcagaacaatgggatttccggccctattcccggtacgataggaaggctggggatgctgaagactcttgacatgtcagataaccagctcacggggactatcccaagttcgcttggaaagctcaagaacctcaattatttgaagttgaacaataatagcttgtctggagttctgcctgattcacttgccagcattgatggttttgctctcgtagatctttcgtttaacaatctcagcggtccattacccaagatttctgcaagaacctttatatcaatatgatccagaagtttgtttgggccatctgaagcagtatgctttcaaggagctccgtgcagctactaataattttaactcaaagaacatcttaggtgaaggtggatatggcatagtatacaagggttatttacgtgatggctccgttgttgctgtcaaaaggctcaaggattataatgccgtcggtggggaaattcaattccaaactgaagttgaagtcataagcttggctgttcatcggaatctcctacgtcttattggattctgcactacagagagtgagaggttacttgtttatccatacatgccaaatggaagtgttgcttctcaattgcgggaacatatcaatgccaagccggctctagactggtcaaggaggaagagggtagcgctaggcacagcgaggggtctgctctaccttcacgagcaatgcgacccgaagataatccaccgagacgtgaaggcctccaacgtactcctcgacgagtacttcgaagcgatcgtgggagacttcggactggcgaagctcctggaccacagggagtcccatgtcacgaccgcggtgcgcgggaccgtcgggcatatagcgccggagtacctgtcgaccgggcagtcgtcggagaagaccgacgtgtttgggttcggggttctgctagtcgagctggtcaccggacagaaggcgctggatttcggaagagtcgcgaaccagaagggcggagtgctggactgggtcaagaagctccatcaagagaagcagctaggcgtgatggtggacaaggacctgggcagcagctacgacggggtcgagctggaggaaatggtccagctggctctgctatgcacgcagtaccacccgtcccaccggcccagaatgtccgaggtgatcaggatgctggaaggcgagcccgggctcgcggagagatgggaagcgtcgcagagcaacgtggacacgccgaagtccgtctcgtcggagctcctgcctcccaagtacgtggatttcgccgccgcggacgagtcctcgcttggcctggaagccatggagctgtccgggccaaggtgaccgaccatctggttgccaaggtcggtcatcgcacaggacaggacgcataggaaaacctatggttgtattgcattggagtcggttaggtgtagagagcccccccgacacaagggaaggcgtcaaattttctggtgggttgtaagggtgtgatctttctgtatatagctgtggtggcattcatcgtagtattgtacatacagcagcgctgtgtgaggtgagtcccatccttgttgcggcgcatctacttggtggcaaagagatgagatgaatgagtatatagaaattaaagttctcagtgcagtgcggttggtgcctgtctgagtttttgcttgctgaaggcgtgcgcagcgtagttggcatgcgtcagtttgtttgacgcataagctcatcaaactgtaacagggacccgttacaccggacctccggatagagtatgatgtactatgggttaaaaacgatcgggtaataagagatggtataaaaaaac

SEQ ID NO: 75574 - DNA, 2767 bp, Zea Mays
ccgctgccctgccccaacactggctggctgcccaccatccttcctctgcggagctcgcgtgactcccctcgctctcgctttcgcgctgcgtccgcggcggcatcattgggtgtccgtgtctggactggagaccgggtccgtcctccgtcggatagagaggggggcggggccttcgtctttcttggctgctggtttctcgaccactgccgccgcgtcttcctccctcgctgctgctgctgctgctgctgctgctgcggcggtattgcgcgttggagctggccactggtgttcgctcctcttccccccggcttgtttgctgaattcaatctgcggggttgcggccgcgggtgtcgatggggtggtggtggtggtgcctgccggtcgctgctctgctcgccgcgatcctgccgtcgtccgacgccacgctctcccctgccggcatcaactacgaagtggtggccctgatggccatcaagacggagctggaggacccctacaacgtgctcgacaactgggacattaactccgtcgacccctgcagctggaggatggtcacctgctcctccgacggctacgtctccgccttagggctgcctagccagaccttgtccgggaagctatcacccggcatcggcaacctcaccaggctgcaatctgtaacaatgggatttccggccctattcccggtacgataggaaggctggggatgctgaagactcttgacatgtcagataaccagctcacggggactatcccaagttcgcttggaaagctcaagaacctcaattatttgaagttgaacaataatagcttgtctggagttctgcctgattcacttgccagcattgatggttttgctctcgtagatctttcgtttaacaatctcagcggtccattacccaagatttctgcaagaacctttatgattactgtttgcatggtcacgcttcgattttattgtttgtttatacagcatagctggaaatccaatgatttgtggtaataattctggagataagtgctcttctgtgtcacttgacccactctcttacccaccagatgatctgaaaaccacaacaaggcattggaaagagccatcatattgctacaatatgtggagtaactgttggttcagtagcttttatcgcctttgtagtcggtatacttctttggtggcgtcataggcgaaatcagcagatcttttttgatgttaatgatcaatatgatccagaagtttgtttgggccatctgaagcagtatgctttcaaggagctccgtgcagctactaataattttaactcaaagaacatcttaggtgaaggtggatatggcatagtatacaagggttatttacgtgatggctccgttgttgctgtcaaaaggctcaaggattataatgccgtcggtggggaaattcaattccaaactgaagttgaagtcataagcttggctgttcatcggaatctcctacgtcttattggattctgcactacagagagtgagaggttacttgtttatccatacatgccaaatggaagtgttgcttctcaattgcgggaacatatcaatgccaagccggctctagactggtcaaggaggaagagggtagcgctaggcacagcgaggggtctgctctaccttcacgagcaatgcgacccgaagataatccaccgagacgtgaaggcctccaacgtactcctcgacgagtacttcgaagcgatcgtgggagacttcggactggcgaagctcctggaccacagggagtcccatgtcacgaccgcggtgcgcgggaccgtcgggcatatagcgccggagtacctgtcgaccgggcagtcgtcggagaagaccgacgtgtttgggttcggggttctgctagtcgagctggtcaccggacagaaggcgctggatttcggaagagtcgcgaaccagaagggcggagtgctggactgggtcaagaagctccatcaagagaagcagctaggcgtgatggtggacaaggacctgggcagcagctacgacggggtcgagctggaggaaatggtccagctggctctgctatgcacgcagtaccacccgtcccaccggcccagaatgtccgaggtgatcaggatgctggaaggcgagcccgggctcgcggagagatgggaagcgtcgcagagcaacgtggacacgccgaagtccgtctcgtcggagctcctgcctcccaagtacgtggatttcgccgccgcggacgagtcctcgcttggcctggaagccatggagctgtccgggccaaggtgaccgaccatctggttgccaaggtcggtcatcgcacaggacaggacgcataggaaaacctatggttgtattgcattggagtcggttaggtgtagagagcccccccgacacaagggaaggcgtcaaattttctggtgggttgtaagggtgtgatctttctgtatatagctgtggtggcattcatcgtagtattgtacatacagcagcgctgtgtgaggtgagtcccatccttgttgcggcgcatctacttggtggcaaagagatgagatgaatgagtatatagaaattaaagttctcagtgcagtgcggttggtgcctgtctgagtttttgcttgctgaaggcgtgcgcagcgtagttggcatgcgtcagtttgtttgacgcataagctcatcaaactgtaacagggacccgttacaccggacctccggatagagtatgatgtactatgggttaaaaacgatcgggtaataagagatggtataaaaaaac

SEQ ID NO: 75575 - DNA, 2858 bp, Zea Mays
cgcggcagcggcaggagcagcagcatggtgctggactggactgataggtgggggggagtggcaggggccggcacagcctgctgcccctgcatccctgctcgttggcgtttccctcgatccctcccccctgccgctgccctgccccaacactggctggctgcccaccatccttcctctgcggagctcgcgtgactcccctcgctctcgctttcgcgctgcgtccgcggcggcatcattgggtgtccgtgtctggactggagaccgggtccgtcctccgtcggatagagaggggggcggggccttcgtctttcttggctgctggtttctcgaccactgccgccgcgtcttcctccctcgctgctgctgctgctgctgctgctgctgcggcggtattgcgcgttggagctggccactggtgttcgctcctcttccccccggcttgtttgctgaattcaatctgcggggttgcggccgcgggtgtcgatggggtggtggtggtggtgcctgccggtcgctgctctgctcgccgcgatcctgccgtcgtccgacgccacgctctcccctgccggcatcaactacgaagtggtggccctgatggccatcaagacggagctggaggacccctacaacgtgctcgacaactgggacattaactccgtcgacccctgcagctggaggatggtcacctgctcctccgacggctacgtctccgccttagggctgcctagccagaccttgtccgggaagctatcacccggcatcggcaacctcaccaggctgcaatctgtgctgttgcagaacaatgggatttccggccctattcccggtacgataggaaggctggggatgctgaagactcttgacatgtcagataaccagctcacggggactatcccaagttcgcttggaaagctcaagaacctcaattatttgaagttgaacaataatagcttgtctggagttctgcctgattcacttgccagcattgatggttttgctctcgtagatctttcgtttaacaatctcagcggtccattacccaagatttctgcaagaacctttatcatagctggaaatccaatgatttgtggtaataattctggagataagtgctcttctgtgtcacttgacccactctcttacccaccagatgatctgaaaaccacaacaaggcattggaaagagccatcatattgctacaatatgtggagtaactgttggttcagtagcttttatcgcctttgtagtcggtatacttctttggtggcgtcataggcgaaatcagcagatcttttttgatgttaatgatcaatatgatccagaagtttgtttgggccatctgaagcagtatgctttcaaggagctccgtgcagctactaataattttaactcaaagaacatcttaggtgaaggtggatatggcatagtatacaagggttatttacgtgatggctccgttgttgctgtcaaaaggctcaaggattataatgccgtcggtggggaaattcaattccaaactgaagttgaagtcataagcttggctgttcatcggaatctcctacgtcttattggattctgcactacagagagtgagaggttacttgtttatccatacatgccaaatggaagtgttgcttctcaattgcgggaacatatcaatgccaagccggctctagactggtcaaggaggaagagggtagcgctaggcacagcgaggggtctgctctaccttcacgagcaatgcgacccgaagataatccaccgagacgtgaaggcctccaacgtactcctcgacgagtacttcgaagcgatcgtgggagacttcggactggcgaagctcctggaccacagggagtcccatgtcacgaccgcggtgcgcgggaccgtcgggcatatagcgccggagtacctgtcgaccgggcagtcgtcggagaagaccgacgtgtttgggttcggggttctgctagtcgagctggtcaccggacagaaggcgctggatttcggaagagtcgcgaaccagaagggcggagtgctggactgggtcaagaagctccatcaagagaagcagctaggcgtgatggtggacaaggacctgggcagcagctacgacggggtcgagctggaggaaatggtccagctggctctgctatgcacgcagtaccacccgtcccaccggcccagaatgtccgaggtgatcaggatgctggaaggcgagcccgggctcgcggagagatgggaagcgtcgcagagcaacgtggacacgccgaagtccgtctcgtcggagctcctgcctcccaagtacgtggatttcgccgccgcggacgagtcctcgcttggcctggaagccatggagctgtccgggccaaggtgaccgaccatctggttgccaaggtcggtcatcgcacaggacaggacgcataggaaaacctatggttgtattgcattggagtcggttaggtgtagagagcccccccgacacaagggaaggcgtcaaattttctggtgggttgtaagggtgtgatctttctgtatatagctgtggtggcattcatcgtagtattgtacatacagcagcgctgtgtgaggtgagtcccatccttgttgcggcgcatctacttggtggcaaagagatgagatgaatgagtatatagaaattaaagttctcagtgcagtgcggttggtgcctgtctgagtttttgcttgctgaaggcgtgcgcagcgtagttggcatgcgtcagtttgtttgacgcataagctcatcaaactgtaacagggacccgttacaccggacctccggatagagtatgatgtactatgggttaaaaacgatcgggtaataagagatggtataaaaaaac

SEQ ID NO: 75576 - DNA, 2156 bp, Zea Mays
caacgcctattccgaaatgtggcttcgtacgagcagcgctcggaagctgcggtgagccgcccgcaatttgtgcctccctccgataacaggacaaggattgatcactcagagtcaagctctgcatctggagtgaacctttcacaaagtgctctgtccaccaatcaagtttctcagtatgccaatgggagccaaatgtcaacagaagcatatcgtgccaagcatgagattactatcgtcggcaatgaggcacctgcaccattcatgacatttcaatccacaggcttcccatcagagattctaagggaggttctgcaagcaggattctctgcaccaactcctatccaagctcaatcatggccaattgctctaaggggtcgtgatatagtagctgtggcgaagacagggaattggcgacacaaattcaagatgaagcaatcaagtttggcagatcttcaagaatatcttctacttgcttatatggaggtgctccaaaaggccctcagctaagagagttggagcgtggtgctgacattgttgtcgcaactcctgggagattaaatgacattttggaaatgaatagagtgagcctgcaccaagtatcatatcttgtccttgatgaagccgaccgtatgcttgatatgggatttgagccacaaataaggaaaattgtgaaacaaataccaccgaaacggcaaactcttatgtatactgccacatggccaagagaggttagaaaaatagcgtctgatttactggctaacccagttcaagttaacattggaaacactgatcagctagttgcaaataagtcaattacacagcatgtggaagttatcccacatatggagaaatcaagacgacttgatcagatcttgcgctcacaagatcctggatcaaaaagcataatattttgctccactaagaggatgtgtgatcagttagctcgaaacctatcacggcagtatcgtgcttctgctattcatggtgataaatcacaggctgagagggattctgtgttgaatgactttcgaagcggcaggtgtccagtacttgtagccactgatgtggccgctcgaggcttggacataaaggacatcagggtcgtggttaactatgatttcccaactggtgtggaggactatgtccatagaattgggaggacaggtagggctggtgcaacaggatctgcctacacattcttcggtgaccaggattcaaagtacgcttcagaccttgtgaagattttggagggtgcaaaccaatctgtgccgccacagttgaaagaaatggctcttcgtggaggatatggtggaagatcacgtcggtgggcatcttctgatgactcttatggtggtcagggatatggtgctaaaagatcaactgatagcttcaataataacaacttcggcaaccaggctggaggtggttcaagctttcactcgagctccagtggcggtcagtttggtgatactacgagcttccatggcagtgtccgcaacaatcagacgggggacaatgcgagctttccacccagctccagcaacaatcaggctggcgatggtctcagttttcatgaaaggttctatggatcacgtggaagggaccagagcagaacaagcaatgatggattccgtgccaggagcagaagtcctcctggcaagcccgtggaagtttccaactggtgattgcatccactaggtgcaatccaatttttgcgatggtgacgaaaccaagtagaagatggcaccctaacaagttatattatttccttttcttatcctgcttagatccaaggatgtgatggtctgaaccctaacggtctcctgctatcttgatttgacgtctgggagacgcttgattccgtgcctgtgggttgtaaagcgttaaaacttgactttgctagtgtactcccaatgatataacccaatcctgggtaaacaaacgcatggggatgaattttggacgaaaccatggacaactgatgtgtgtttaatgtcatgtacaatctatgtcgaaggctgttgtaaatgccgtccgcatagtttatattgagatgagtgtctgttattgcatgtgttcgccgtggtttgtaaacgcatgtgttgtagacagccacttgacgtagctgttcgccgtggtttggaccttggaggttg

SEQ ID NO: 75577 - DNA, 2818 bp, Zea Mays
ccgcctcctcccctactccggccgcagccgccgacgtcgccattcgcattctgcggcgccaatcgataggggtcagcgagtggctgggatggcgtcgtcggcgtccgcgccagcgtccacgggcccgcgctacgccccgccggatccgacgctgcccaagccgtggagggggctaatcgacggcaacacggggtacctctacttctggaacccggagacaaaggttacgcagtacgagcgtcccgtcgctgccgtgcccgccccccaatcgcagccgcttgtctactccaggcccgatgatgtgccgagaagcagcgcacctgccgagcagcgctcggaagctgcggtgagccgcccgcaatttgtgcctccctccgataacaggacaaggattgatcactcagagtcaagctctgcatctggagtgaacctttcacaaagtgctctgtccaccaatcaagtttctcagtatgccaatgggagccaaatgtcaacagaagcatatcgtgccaagcatgagattactatcgtcggcaatgaggcacctgcaccattcatgacatttcaatccacaggcttcccatcagagattctaagggaggctcttcaagtcaacaatccaagtcgtggttcgacctgtttgttgtcttgtacagcctcctgtggtttgaaacagctccctgttttattcattcctcagttgcatgatgtttggcttggttctgtgtaacttaaaaaatcacatcatgagaagcctttttctctttgctataactatattatgacttatccttacacagatctagtattcagataatactcatctctgaagggtatctaccttttgcaggttctgcaagcaggattctctgcaccaactcctatccaagctcaatcatggccaattgctctaaggggtcgtgatatagtagctgtggcgaagacaggttcaggaaaaacactaggctatcttctcccagggtttattcttttgaagcgcctgcagcataattcaagggaaggtccaacagtattagttttgtctccaaccagggaattggcgacacaaattcaagatgaagcaatcaagtttggcagatcttcaagaatatcttctacttgcttatatggaggtgctccaaaaggccctcagctaagagagttggagcgtggtgctgacattgttgtcgcaactcctgggagattaaatgacattttggaaatgaatagagtgagcctgcaccaagtatcatatcttgtccttgatgaagccgaccgtatgcttgatatgggatttgagccacaaataaggaaaattgtgaaacaaataccaccgaaacggcaaactcttatgtatactgccacatggccaagagaggttagaaaaatagcgtctgatttactggctaacccagttcaagttaacattggaaacactgatcagctagttgcaaataagtcaattacacagcatgtggaagttatcccacatatggagaaatcaagacgacttgatcagatcttgcgctcacaagatcctggatcaaaaagcataatattttgctccactaagaggatgtgtgatcagttagctcgaaacctatcacggcagtatcgtgcttctgctattcatggtgataaatcacaggctgagagggattctgtgttgaatgactttcgaagcggcaggtgtccagtacttgtagccactgatgtggccgctcgaggcttggacataaaggacatcagggtcgtggttaactatgatttcccaactggtgtggaggactatgtccatagaattgggaggacaggtagggctggtgcaacaggatctgcctacacattcttcggtgaccaggattcaaagtacgcttcagaccttgtgaagattttggagggtgcaaaccaatctgtgccgccacagttgaaagaaatggctcttcgtggaggatatggtggaagatcacgtcggtgggcatcttctgatgactcttatggtggtcagggatatggtgctaaaagatcaactgatagcttcaataataacaacttcggcaaccaggctggaggtggttcaagctttcactcgagcttgtataacagctccagtggcggtcagtttggtgatactacgagcttccatggcagtgtccgcaacaatcagacgggggacaatgcgagctttccacccagctccagcaacaatcaggctggcgatggtctcagttttcatgaaaggttctatggatcacgtggaagggaccagagcagaacaagcaatgatggattccgtgccaggagcagaagtcctcctggcaagcccgtggaagtttccaactggtgattgcatccactaggtgcaatccaatttttgcgatggtgacgaaaccaagtagaagatggcaccctaacaagttatattatttccttttcttatcctgcttagatccaaggatgtgatggtctgaaccctaacggtctcctgctatcttgatttgacgtctgggagacgcttgattccgtgcctgtgggttgtaaagcgttaaaacttgactttgctagtgtactcccaatgatataacccaatcctgggtaaacaaacgcatggggatgaattttggacgaaaccatggacaactgatgtgtgtttaatgtcatgtacaatctatgtcgaaggctgttgtaaatgccgtccgcatagtttatattgagatgagtgtctgttattgcatgtgttcgccgtggtttgtaaacgcatgtgttgtagacagccacttgacgtagctgttcgccgtggtttggaccttggaggttg

SEQ ID NO: 75578 - DNA, 2438 bp, Zea Mays
ccgcctcctcccctactccggccgcagccgccgacgtcgccattcgcattctgcggcgccaatcgataggggtcagcgagtggctgggatggcgtcgtcggcgtccgcgccagcgtccacgggcccgcgctacgccccgccggatccgacgctgcccaagccgtggagggggctaatcgacggcaacacggggtacctctacttctggaacccggagacaaaggttacgcagtacgagcgtcccgtcgctgccgtgcccgccccccaatcgcagccgcttgtctactccaggcccgatgatgtgccgagaagcagcgcacctgccgagcagcgctcggaagctgcggtgagccgcccgcaatttgtgcctccctccgataacaggacaaggattgatcactcagagtcaagctctgcatctggagtgaacctttcacaaagtgctctgtccaccaatcaagtttctcagtatgccaatgggagccaaatgtcaacagaagcatatcgtgccaagcatgagattactatcgtcggcaatgaggcacctgcaccattcatgacatttcaatccacaggcttcccatcagagattctaagggagcaggctcttcaagtcaacaatccaagtcgtggttcgacctgtttgttgtcttgttctgcaagcaggattctctgcaccaactcctatccaagctcaatcatggccaattgctctaaggggtcgtgatatagtagctgtggcgaagacagggaattggcgacacaaattcaagatgaagcaatcaagtttggcagatcttcaagaatatcttctacttgcttatatggaggtgctccaaaaggccctcagctaagagagttggagcgtggtgctgacattgttgtcgcaactcctgggagattaaatgacattttggaaatgaatagagtgagcctgcaccaagtatcatatcttgtccttgatgaagccgaccgtatgcttgatatgggatttgagccacaaataaggaaaattgtgaaacaaataccaccgaaacggcaaactcttatgtatactgccacatggccaagagaggttagaaaaatagcgtctgatttactggctaacccagttcaagttaacattggaaacactgatcagctagttgcaaataagtcaattacacagcatgtggaagttatcccacatatggagaaatcaagacgacttgatcagatcttgcgctcacaagatcctggatcaaaaagcataatattttgctccactaagaggatgtgtgatcagttagctcgaaacctatcacggcagtatcgtgcttctgctattcatggtgataaatcacaggctgagagggattctgtgttgaatgactttcgaagcggcaggtgtccagtacttgtagccactgatgtggccgctcgaggcttggacataaaggacatcagggtcgtggttaactatgatttcccaactggtgtggaggactatgtccatagaattgggaggacaggtagggctggtgcaacaggatctgcctacacattcttcggtgaccaggattcaaagtacgcttcagaccttgtgaagattttggagggtgcaaaccaatctgtgccgccacagttgaaagaaatggctcttcgtggaggatatggtggaagatcacgtcggtgggcatcttctgatgactcttatggtggtcagggatatggtgctaaaagatcaactgatagcttcaataataacaacttcggcaaccaggctggaggtggttcaagctttcactcgagcttgtataacagctccagtggcggtcagtttggtgatactacgagcttccatggcagcttcgataacagtgtccgcaacaatcagacgggggacaatgcgagctttccacccagctccagcaacaatcaggctggcgatggtctcagttttcatgaaaggttctatggatcacgtggaagggaccagagcagaacaagcaatgatggattccgtgccaggagcagaagtcctcctggcaagcccgtggaagtttccaactggtgattgcatccactagatccaaggatgtgatggtctgaaccctaacggtctcctgctatcttgatttgacgtctgggagacgcttgattccgtgcctgtgggttgtaaagcgttaaaacttgactttgctagtgtactcccaatgatataacccaatcctgggtaaacaaacgcatggggatgaattttggacgaaaccatggacaactgatgtgtgtttaatgtcatgtacaatctatgtcgaaggctgttgtaaatgccgtccgcatagtttatattgagatgagtgtctgttattgcatgtgttcgccgtggtttgtaaacgcatgtgttgtagacagccacttgacgtagctgttcgccgtggtttggaccttggaggttg

SEQ ID NO: 75579 - DNA, 2438 bp, Zea Mays
ccgcctcctcccctactccggccgcagccgccgacgtcgccattcgcattctgcggcgccaatcgataggggtcagcgagtggctgggatggcgtcgtcggcgtccgcgccagcgtccacgggcccgcgctacgccccgccggatccgacgctgcccaagccgtggagggggctaatcgacggcaacacggggtacctctacttctggaacccggagacaaaggttacgcagtacgagcgtcccgtcgctgccgtgcccgccccccaatcgcagccgcttgtctactccaggcccgatgatgtgccgagaagcagcgcacctgccgagcagcgctcggaagctgcggtgagccgcccgcaatttgtgcctccctccgataacaggacaaggattgatcactcagagtcaagctctgcatctggagtgaacctttcacaaagtgctctgtccaccaatcaagtttctcagtatgccaatgggagccaaatgtcaacagaagcatatcgtgccaagcatgagattactatcgtcggcaatgaggcacctgcaccattcatgacatttcaatccacaggcttcccatcagagattctaagggagcaggctcttcaagtcaacaatccaagtcgtggttcgacctgtttgttgtcttgtacagcaagcaggattctctgcaccaactcctatccaagctcaatcatggccaattgctctaaggggtcgtgatatagtagctgtggcgaagacagggaattggcgacacaaattcaagatgaagcaatcaagtttggcagatcttcaagaatatcttctacttgcttatatggaggtgctccaaaaggccctcagctaagagagttggagcgtggtgctgacattgttgtcgcaactcctgggagattaaatgacattttggaaatgaatagagtgagcctgcaccaagtatcatatcttgtccttgatgaagccgaccgtatgcttgatatgggatttgagccacaaataaggaaaattgtgaaacaaataccaccgaaacggcaaactcttatgtatactgccacatggccaagagaggttagaaaaatagcgtctgatttactggctaacccagttcaagttaacattggaaacactgatcagctagttgcaaataagtcaattacacagcatgtggaagttatcccacatatggagaaatcaagacgacttgatcagatcttgcgctcacaagatcctggatcaaaaagcataatattttgctccactaagaggatgtgtgatcagttagctcgaaacctatcacggcagtatcgtgcttctgctattcatggtgataaatcacaggctgagagggattctgtgttgaatgactttcgaagcggcaggtgtccagtacttgtagccactgatgtggccgctcgaggcttggacataaaggacatcagggtcgtggttaactatgatttcccaactggtgtggaggactatgtccatagaattgggaggacaggtagggctggtgcaacaggatctgcctacacattcttcggtgaccaggattcaaagtacgcttcagaccttgtgaagattttggagggtgcaaaccaatctgtgccgccacagttgaaagaaatggctcttcgtggaggatatggtggaagatcacgtcggtgggcatcttctgatgactcttatggtggtcagggatatggtgctaaaagatcaactgatagcttcaataataacaacttcggcaaccaggctggaggtggttcaagctttcactcgagcttgtataacagctccagtggcggtcagtttggtgatactacgagcttccatggcagcttcgataacagtgtccgcaacaatcagacgggggacaatgcgagctttccacccagctccagcaacaatcaggctggcgatggtctcagttttcatgaaaggttctatggatcacgtggaagggaccagagcagaacaagcaatgatggattccgtgccaggagcagaagtcctcctggcaagcccgtggaagtttccaactggtgattgcatccactagatccaaggatgtgatggtctgaaccctaacggtctcctgctatcttgatttgacgtctgggagacgcttgattccgtgcctgtgggttgtaaagcgttaaaacttgactttgctagtgtactcccaatgatataacccaatcctgggtaaacaaacgcatggggatgaattttggacgaaaccatggacaactgatgtgtgtttaatgtcatgtacaatctatgtcgaaggctgttgtaaatgccgtccgcatagtttatattgagatgagtgtctgttattgcatgtgttcgccgtggtttgtaaacgcatgtgttgtagacagccacttgacgtagctgttcgccgtggtttggaccttggaggttg

SEQ ID NO: 75580 - DNA, 2516 bp, Zea Mays
ctttttattgttcggtgacgaaaaaaaaaccccaattgtgtccgcctcctcccctactccggccgcagccgccgacgtcgccattcgcattctgcggcgccaatcgataggggtcagcgagtggctgggatggcgtcgtcggcgtccgcgccagcgtccacgggcccgcgctacgccccgccggatccgacgctgcccaagccgtggagggggctaatcgacggcaacacggggtacctctacttctggaacccggagacaaaggttacgcagtacgagcgtcccgtcgctgccgtgcccgccccccaatcgcagccgcttgtctactccaggcccgatgatgtgccgagaagcagcgcacctgccgagcagcgctcggaagctgcggtgagccgcccgcaatttgtgcctccctccgataacaggacaaggattgatcactcagagtcaagctctgcatctggagtgaacctttcacaaagtgctctgtccaccaatcaagtttctcagtatgccaatgggagccaaatgtcaacagaagcatatcgtgccaagcatgagattactatcgtcggcaatgaggcacctgcaccattcatgacatttcaatccacaggcttcccatcagagattctaagggaggttctgcaagcaggattctctgcaccaactcctatccaagctcaatcatggccaattgctctaaggggtcgtgatatagtagctgtggcgaagacagggaattggcgacacaaattcaagatgaagcaatcaagtttggcagatcttcaagaatatcttctacttgcttatatggaggtgctccaaaaggccctcagctaagagagttggagcgtggtgctgacattgttgtcgcaactcctgggagattaaatgacattttggaaatgaatagagtgagcctgcaccaagtatcatatcttgtccttgatgaagccgaccgtatgcttgatatgggatttgagccacaaataaggaaaattgtgaaacaaataccaccgaaacggcaaactcttatgtatactgccacatggccaagagaggttagaaaaatagcgtctgatttactggctaacccagttcaagttaacattggaaacactgatcagctagttgcaaataagtcaattacacagcatgtggaagttatcccacatatggagaaatcaagacgacttgatcagatcttgcgctcacaagatcctggatcaaaaagcataatattttgctccactaagaggatgtgtgatcagttagctcgaaacctatcacggcagtatcgtgcttctgctattcatggtgataaatcacaggctgagagggattctgtgttgaatgactttcgaagcggcaggtgtccagtacttgtagccactgatgtggccgctcgaggcttggacataaaggacatcagggtcgtggttaactatgatttcccaactggtgtggaggactatgtccatagaattgggaggacaggtagggctggtgcaacaggatctgcctacacattcttcggtgaccaggattcaaagtacgcttcagaccttgtgaagattttggagggtgcaaaccaatctgtgccgccacagttgaaagaaatggctcttcgtggaggatatggtggaagatcacgtcggtgggcatcttctgatgactcttatggtggtcagggatatggtgctaaaagatcaactgatagcttcaataataacaacttcggcaaccaggctggaggtggttcaagctttcactcgagcttgtataacagctccagtggcggtcagtttggtgatactacgagcttccatggcagcttcgataacagtgtccgcaacaatcagacgggggacaatgcgagctttccacccagctccagcaacaatcaggctggcgatggtctcagttttcatgaaaggttctatggatcacgtggaagggaccagagcagaacaagcaatgatggattccgtgccaggagcagaagtcctcctggcaagcccgtggaagtttccaactggtgattgcatccactaggtgcaatccaatttttgcgatggtgacgaaaccaagtagaagatggcaccctaacaagttatattatttccttttcttatcctgcttagatccaaggatgtgatggtctgaaccctaacggtctcctgctatcttgatttgacgtctgggagacgcttgattccgtgcctgtgggttgtaaagcgttaaaacttgactttgctagtgtactcccaatgatataacccaatcctgggtaaacaaacgcatggggatgaattttggacgaaaccatggacaactgatgtgtgtttaatgtcatgtacaatctatgtcgaaggctgttgtaaatgccgtccgcatagtttatattgagatgagtgtctgttattgcatgtgttcgccgtggtttgtaaacgcatgtgttgtagacagccacttgacgtagctgttcgccgtggtttggaccttggaggttg

SEQ ID NO: 75581 - DNA, 2507 bp, Zea Mays
cgcctttttattgttcggtgacgaaaaaaaaaccccaattgtgtccgcctcctcccctactccggccgcagccgccgacgtcgccattcgcattctgcggcgccaatcgataggggtcagcgagtggctgggatggcgtcgtcggcgtccgcgccagcgtccacgggcccgcgctacgccccgccggatccgacgctgcccaagccgtggagggggctaatcgacggcaacacggggtacctctacttctggaacccggagacaaaggttacgcagtacgagcgtcccgtcgctgccgtgcccgccccccaatcgcagccgcttgtctactccaggcccgatgatgtgccgagaagcagcgcacctgccgagcagcgctcggaagctgcggtgagccgcccgcaatttgtgcctccctccgataacaggacaaggattgatcactcagagtcaagctctgcatctggagtgaacctttcacaaagtgctctgtccaccaatcaagtttctcagtatgccaatgggagccaaatgtcaacagaagcatatcgtgccaagcatgagattactatcgtcggcaatgaggcacctgcaccattcatgacatttcaatccacaggcttcccatcagagattctaagggaggttctgcaagcaggattctctgcaccaactcctatccaagctcaatcatggccaattgctctaaggggtcgtgatatagtagctgtggcgaagacagggaattggcgacacaaattcaagatgaagcaatcaagtttggcagatcttcaagaatatcttctacttgcttatatggaggtgctccaaaaggccctcagctaagagagttggagcgtggtgctgacattgttgtcgcaactcctgggagattaaatgacattttggaaatgaatagagtgagcctgcaccaagtatcatatcttgtccttgatgaagccgaccgtatgcttgatatgggatttgagccacaaataaggaaaattgtgaaacaaataccaccgaaacggcaaactcttatgtatactgccacatggccaagagaggttagaaaaatagcgtctgatttactggctaacccagttcaagttaacattggaaacactgatcagctagttgcaaataagtcaattacacagcatgtggaagttatcccacatatggagaaatcaagacgacttgatcagatcttgcgctcacaagatcctggatcaaaaagcataatattttgctccactaagaggatgtgtgatcagttagctcgaaacctatcacggcagtatcgtgcttctgctattcatggtgataaatcacaggctgagagggattctgtgttgaatgactttcgaagcggcaggtgtccagtacttgtagccactgatgtggccgctcgaggcttggacataaaggacatcagggtcgtggttaactatgatttcccaactggtgtggaggactatgtccatagaattgggaggacaggtagggctggtgcaacaggatctgcctacacattcttcggtgaccaggattcaaagtacgcttcagaccttgtgaagattttggagggtgcaaaccaatctgtgccgccacagttgaaagaaatggctcttcgtggaggatatggtggaagatcacgtcggtgggcatcttctgatgactcttatggtggtcagggatatggtgctaaaagatcaactgatagcttcaataataacaacttcggcaaccaggctggaggtggttcaagctttcactcgagctccagtggcggtcagtttggtgatactacgagcttccatggcagcttcgataacagtgtccgcaacaatcagacgggggacaatgcgagctttccacccagctccagcaacaatcaggctggcgatggtctcagttttcatgaaaggttctatggatcacgtggaagggaccagagcagaacaagcaatgatggattccgtgccaggagcagaagtcctcctggcaagcccgtggaagtttccaactggtgattgcatccactaggtgcaatccaatttttgcgatggtgacgaaaccaagtagaagatggcaccctaacaagttatattatttccttttcttatcctgcttagatccaaggatgtgatggtctgaaccctaacggtctcctgctatcttgatttgacgtctgggagacgcttgattccgtgcctgtgggttgtaaagcgttaaaacttgactttgctagtgtactcccaatgatataacccaatcctgggtaaacaaacgcatggggatgaattttggacgaaaccatggacaactgatgtgtgtttaatgtcatgtacaatctatgtcgaaggctgttgtaaatgccgtccgcatagtttatattgagatgagtgtctgttattgcatgtgttcgccgtggtttgtaaacgcatgtgttgtagacagccacttgacgtagctgttcgccgtggtttggaccttggaggttg

SEQ ID NO: 75582 - DNA, 2332 bp, Zea Mays
ccccaggcccccactgcaggcccaccaaaagaaaagatcacgacgcgacccgctcgctctcgctctcgggccccagtccgatcgggtcggtgcctacccacccccgctggccgccgcacccaggcgaggcgaggcaaggcgcgtcccgaacaacggaaccaactgcaccgaccgagtcaatcaatccggcgagtgaccgagtggggtaggttgtgtgcggcatgacgaccacgcgcgaccgtggcgccggcggcggatcggcgtcgagggtcggtgacggggacgtcgacctgggcgagggctgggactggggcgccatcccgcggctcctctcctccgcctgcctcttcctctgctccggagcagaggctgttttggttgctgcgataagactgtaaagcaactgggtgaactgtccagaaacttgatcacccaggaccaaattaccattggagagccattttggagcacaaccaccatcgaggttgaaccagcagatctcagtggtgttacttcagtcaatacatctaacttggcctctggaactggtagcagtcataaccttcctggacttggtaataatggacttgttctgtgggaacatacaaggcaggagtggactgaaactagaagtctgcggctgaaggtgaagcaggttcgtgaaccagtattgaggtatgagtgaatgaaatgacaaccagaacccaaaaagtttacctttacccatatcacgtttctgtcagacaagtatgtattctataaagtacatttattttaccaaatgcactttggcccttcttcatattaaaagcaaagggttatgctgggatcaccagcttttcagatcaaacctcagaataacatgttcgtctatcatcattttagctttcagtaacaattttgtctgcattcttatggaaacataaatattttcatctataatttagtttatatttagaggcataattttgttctcctgaagtttgaaattattgtgatggacctgttcttatccaggtgatatcagctgtattggctttgatggtttcagtttctactgaatcttccaattgtgtgctgttagtctaatttatcacttcattcatgttgtgcactatatgttgctcaagcccaatatgttctttcatgcactccctacgatttcacaatatttgctcatcatcctcactagcgtcattgggaacacttctacacctattttaattgtagggattaggaagtgattaagtgattgtaaaacaatatctgataaggttatattgagcttggtcatgcatactgtaaatggttatatctcatgtgacctgtaagttctacaacatattgtctaagaaacttccataagcaacaaatagcgtacctttgaatcaaatttgatggcagctgctcattttacaagaacaatgcagtgaaccagctatgatgttaattgaataagaaaacggacagtcagtcttatttctctacaatttgtttccggtgaaatagatacaaggtttttattccattctgcataatatgctgatatcttattttgcttctgattgtgtatttcgtttgtgcaaccccaagaagctttaaggaatgctatcttattgactggagatttctgtgattgtgctaaaaaatctatatttccatatgcagttggaatgcagcatatgagagtctgcttggatcaaataagccatttcctcaacccattcctcttcatgagatggtcgatttccttgtggacatctgggagcaggaggggctgtatgactagcgcaaatgatttcatgggataacatctgggataacacatagttgttcctcaagagaggggaaaaagaatgacatagagggtgtaggcttgggatgtggtgatgagttggcctgtcatacttgttttttgtcaatggaggcctgctgtacttgcagaatacagagctgtggttgtaagcttgtaagaagtcctgatactaatagtggctttgtttaatttgtcaaagaaaggtgtgtgaggttgagttgtgacaaaagtggattaggcctgctgatgggtttggattgaaatgagtttaaagggctgtgttttcatgtggttgcattttggttgggtagaaatgggttgatttactaagcgagctggggtggattaggtttaatagaaaattaagttgatgggttagtattgacttttttgggaggtttgaatgggcttaacctatgagtgtgttgtagtatacgtatatattggtttgaaaggaaattaatcgctgagtgtaacatgtacacttaaagtggggcccacgtgtttatattagca

SEQ ID NO: 75583 - DNA, 1314 bp, Zea Mays
ccccaggcccccactgcaggcccaccaaaagaaaagatcacgacgcgacccgctcgctctcgctctcgggccccagtccgatcgggtcggtgcctacccacccccgctggccgccgcacccaggcgaggcgaggcaaggcgcgtcccgaacaacggaaccaactgcaccgaccgagtcaatcaatccggcgagtgaccgagtggggtaggttgtgtgcggcatgacgaccacgcgcgaccgtggcgccggcggcggatcggcgtcgagggtcggtgacggggacgtcgacctgggcgagggctgggactggggcgccatcccgcggctcctctcctccgcctgcctcttcctctgctccggaggctgttttggttgctgcgataagactgtaaagcaactgggtgaactgtccagaaacttgatcacccaggaccaaattaccattggagagccattttggagcacaaccaccatcgaggttgaaccagcagatctcagtggtgttacttcagtcaatacatctaacttggcctctggaactggtagcagtcataaccttcctggacttggtaataatggacttgttctgtgggaacatacaaggcaggagtggactgaaactagaagtctgcggctgaaggtgaagcagttggaatgcagcatatgagagtctgcttggatcaaataagccatttcctcaacccattcctcttcatgagatggtcgatttccttgtggacatctgggagcaggaggggctgtatgactagcgcaaatgatttcatgggataacatctgggataacacatagttgttcctcaagagaggggaaaaagaatgacatagagggtgtaggcttgggatgtggtgatgagttggcctgtcatacttgttttttgtcaatggaggcctgctgtacttgcagaatacagagctgtggttgtaagcttgtaagaagtcctgatactaatagtggctttgtttaatttgtcaaagaaaggtgtgtgaggttgagttgtgacaaaagtggattaggcctgctgatgggtttggattgaaatgagtttaaagggctgtgttttcatgtggttgcattttggttgggtagaaatgggttgatttactaagcgagctggggtggattaggtttaatagaaaattaagttgatgggttagtattgacttttttgggaggtttgaatgggcttaacctatgagtgtgttgtagtatacgtatatattggtttgaaaggaaattaatcgctgagtgtaacatgtacacttaaagtggggcccacgtgtttatattagca

SEQ ID NO: 75584 - DNA, 2327 bp, Zea Mays
ccccaggcccccactgcaggcccaccaaaagaaaagatcacgacgcgacccgctcgctctcgctctcgggccccagtccgatcgggtcggtgcctacccacccccgctggccgccgcacccaggcgaggcgaggcaaggcgcgtcccgaacaacggaaccaactgcaccgaccgagtcaatcaatccggcgagtgaccgagtggggtaggttgtgtgcggcatgacgaccacgcgcgaccgtggcgccggcggcggatcggcgtcgagggtcggtgacggggacgtcgacctgggcgagggctgggactggggcgccatcccgcggctcctctcctccgcctgcctcttcctctgctccggaggctgttttggttgctgcgataagactgtaaagcaactgggtgaactgtccagaaacttgatcacccaggaccaaattaccattggagagccattttggagcacaaccaccatcgaggttgaaccagcagatctcagtggtgttacttcagtcaatacatctaacttggcctctggaactggtagcagtcataaccttcctggacttggtaataatggacttgttctgtgggaacatacaaggcaggagtggactgaaactagaagtctgcggctgaaggtgaagcaggttcgtgaaccagtattgaggtatgagtgaatgaaatgacaaccagaacccaaaaagtttacctttacccatatcacgtttctgtcagacaagtatgtattctataaagtacatttattttaccaaatgcactttggcccttcttcatattaaaagcaaagggttatgctgggatcaccagcttttcagatcaaacctcagaataacatgttcgtctatcatcattttagctttcagtaacaattttgtctgcattcttatggaaacataaatattttcatctataatttagtttatatttagaggcataattttgttctcctgaagtttgaaattattgtgatggacctgttcttatccaggtgatatcagctgtattggctttgatggtttcagtttctactgaatcttccaattgtgtgctgttagtctaatttatcacttcattcatgttgtgcactatatgttgctcaagcccaatatgttctttcatgcactccctacgatttcacaatatttgctcatcatcctcactagcgtcattgggaacacttctacacctattttaattgtagggattaggaagtgattaagtgattgtaaaacaatatctgataaggttatattgagcttggtcatgcatactgtaaatggttatatctcatgtgacctgtaagttctacaacatattgtctaagaaacttccataagcaacaaatagcgtacctttgaatcaaatttgatggcagctgctcattttacaagaacaatgcagtgaaccagctatgatgttaattgaataagaaaacggacagtcagtcttatttctctacaatttgtttccggtgaaatagatacaaggtttttattccattctgcataatatgctgatatcttattttgcttctgattgtgtatttcgtttgtgcaaccccaagaagctttaaggaatgctatcttattgactggagatttctgtgattgtgctaaaaaatctatatttccatatgcagttggaatgcagcatatgagagtctgcttggatcaaataagccatttcctcaacccattcctcttcatgagatggtcgatttccttgtggacatctgggagcaggaggggctgtatgactagcgcaaatgatttcatgggataacatctgggataacacatagttgttcctcaagagaggggaaaaagaatgacatagagggtgtaggcttgggatgtggtgatgagttggcctgtcatacttgttttttgtcaatggaggcctgctgtacttgcagaatacagagctgtggttgtaagcttgtaagaagtcctgatactaatagtggctttgtttaatttgtcaaagaaaggtgtgtgaggttgagttgtgacaaaagtggattaggcctgctgatgggtttggattgaaatgagtttaaagggctgtgttttcatgtggttgcattttggttgggtagaaatgggttgatttactaagcgagctggggtggattaggtttaatagaaaattaagttgatgggttagtattgacttttttgggaggtttgaatgggcttaacctatgagtgtgttgtagtatacgtatatattggtttgaaaggaaattaatcgctgagtgtaacatgtacacttaaagtggggcccacgtgtttatattagca

SEQ ID NO: 75585 - DNA, 1052 bp, Zea Mays
gtcgtcgacccaaggaaaaatccatcataggatgcctttgttgaatacttcccattggcggcgagacaaaaaagagcagaggctgttttggttgctgcgataagactgtaaagcaactgggtgaactgtccagaaacttgatcacccaggaccaaattaccattggagagccattttggagcacaaccaccatcgaggttgaaccagcagatctcagtggtgttacttcagtcaatacatctaacttggcctctggaactggtagcagtcataaccttcctggacttggtaataatggacttgttctgtgggaacatacaaggcaggagtggactgaaactagaagtctgcggctgaaggtgaagcaggttcgtgaaccagtattgagttggaatgcagcatatgagagtctgcttggatcaaataagccatttcctcaacccattcctcttcatgagatggtcgatttccttgtggacatctgggagcaggaggggctgtatgactagcgcaaatgatttcatgggataacatctgggataacacatagttgttcctcaagagaggggaaaaagaatgacatagagggtgtaggcttgggatgtggtgatgagttggcctgtcatacttgttttttgtcaatggaggcctgctgtacttgcagaatacagagctgtggttgtaagcttgtaagaagtcctgatactaatagtggctttgtttaatttgtcaaagaaaggtgtgtgaggttgagttgtgacaaaagtggattaggcctgctgatgggtttggattgaaatgagtttaaagggctgtgttttcatgtggttgcattttggttgggtagaaatgggttgatttactaagcgagctggggtggattaggtttaatagaaaattaagttgatgggttagtattgacttttttgggaggtttgaatgggcttaacctatgagtgtgttgtagtatacgtatatattggtttgaaaggaaattaatcgctgagtgtaacatgtacacttaaagtggggcccacgtgtttatattagca

SEQ ID NO: 75586 - DNA, 3237 bp, Zea Mays
atacccgactccgatcttccaccccgctgccgcctgccggcgtgcgtgacccgggtcccattccatatccggtgccattttttaatactactagtctcgttcgatcggaatcggcttcccgtcttggctgcatttttctatccccgcgtggccgcgtgtagtcctagtctctcgccagcaccatcatcatcaatcacggcggcgaccccgccccgcctcgatcgcccacgctgcccgactggaaccggtaatccacttcgctgtgccgcctcgctcagatcccacgttggctgttgttgttgctctgctctcctcggccgggaaaggacgctgctgctgctgctgctaggctgacagcgacgacgagggggccatggctcagatcttgctccacggcacgctccacgccaccatcttcgaggccgagtcgctctccaacccgcaccgcgccaccggcggcgcccccaagttcatccgcaagcttgtggaagggattgaggataccgtgggtatcggcaagggcaccaccaagatatacgccaccgttgatctggagaaggcccgcgtggggcgcacccggatggtctccaacgagcccgtgaaccctcgctggtacgagtccttccacatctactgcgcgcacatggccgccgacgtagtattcaccgtcaagatcgacaaccccatcggggcctcgctcatcgggagggcttacctgcctgtcgaggacatcctgggcggagacgagatcgacaagtggcttgagatatgcgatgagaagcgcgagcctattggggacagcaagatccacgtgaagcttcagtacttcgacgtcggcaaggaccgcaactgggccaggggtgtccggagcaccaagtaccctggtgttccttacaccttcttctcgcagaggcaggggtgcaaggttactctgtaccaggacgctcatgtcccggacaacttcgttcccaggatcccgctcgccgatggcaagaactacgagccacacaggtgctgggaggatatctttgatgccataagcaaggcccagcatctgatttacatcactggctggtccgtgtacaccgagatcaccttggttcgggacaccagcaggccgaaacctggaggcgatgttactcttggggagttgctcaagaggaaggccagcgaaggtgtccgtgtccttatgctagtgtgggatgataggacttcggtcggcttgcttaagaaggatggcttgatggctacccatgatgaggagactgcaaattacttccatggcacggacgtcaactgtgtcctgtgccctcgcaaccctgatgattctggcagctttgtccaggacctgcagatatcaactatgttcacgcaccatcagaagatagtagtggtagaccatgagttgccaaacgagggctcccagcagaggaggatcgtcagcttcgttggcggaattgacctttgtgatggaaggtatgatacccagtatcactccttgtttaggacacttgacactgtccatcatgatgacttccaccagccaaactttgagggtgggtcaatcaagaaaggtggtccgagagagccatggcatgatatccactcacggctggaagggccaattgcttgggatgttctttacaactttgagcagaggtggaggaagcagggtggtaaggacctccttgtacgtctcagggatctttctgacattattattcccccttctcctgtgatgttcccggaggacagagatacctggaatgttcagctctttagatccattgacggcggtgctgcttttggcttccccgagactcctgatgaagctgcaagagctgggcttgtgagtggaaaggatcaaatcatcgaccggagtatccaggatgcatacataaatgccatacggagggcgaagaacttcatctacattgagaatcagtacttccttggaagctcatatgactggaagccggaaggcatcaagccagaagatatcgattgtcttcacttgattccgaaggagctctcattgaagattgtcagcaagattgaggctggggagcggttcactgtttatgttgtggtgccaatgtggcctgagggtgttccagaaagtgcttccgttcaggcaatccttgactggcaaaggagaacaatggatatgatgtacactgacatcacacaagctctcgaagccaatggaatccaagcaaaccccaaggactatctcactttcttctgcttaggtaaccgtgaggtgaagcaggagggagaatatcaacctgaggaacacccagaacctggcactgattacatccgggctcaagaggctaggaggtttatgatctatgttcatgccaaaatgatgatagtggacgatgaatacatcatcattgggtccgccaacatcaaccagaggtccatggacggtgccagggactccgagatagccatgggcgcgtaccagccgtaccacctggcgactaggcagcctgcccgtggccagatccatggcttccggatgtctctttggtacgaacacctggggatgctggacgacgtcttccagcgccccgagagcgtagagtgcgtgcagaaggtgaacaagatcgccgagaagtactgggacctgtactcgagtgatgacctggagcaggacctcccgggccacctcctcagctacccgatcggtgtcactgccgacggcaccgttactgagctgcccgggatggagaacttccctgacacccgtgcccgcgtcctcggcaacaagtcggattacctcccgcccatcctcaccacataggctgcaggctgcaggcagcgccatggcttctctgtttgtgtttgagatactgaaagttcagatagcagtgtttttatagttattgagtgataataagtgcattgtgcatggtgggacgataggagttagagttgttcataaatcataactactatgtactgcaccagatgacgagattgtgttgccccttgtctggtgtagcttgtgtagctttctgcgttgcagtgctgtttgtaaaggcgacttcagagttcagaattaaaacatggttgttttttcaagtgtgctgctaaaggcctgtatggattcgttgatgtggtgctagtacaacaatatggataatctctcatctgcctgtaaagacatctaagggctagttggtaattccattttcttaagagatttttatttttctaagagaaatt

SEQ ID NO: 75587 - DNA, 1027 bp, Zea Mays
cctctccgcgttcctcgtttcgctagcataagcaacccgtctggaccctcacccgccgcaacgccgaggagacgagaggaggggaggcgcgccagcggaagcggaaacctcgggtgtcgtcgaccaacctcgtcgatccggttgcgacgcggtgtgctagaataactaccgaccatggtggaggaggagatcaccgagggcttgaagaacctcaccgtcaccggagacgcggcggcttcgggcggagaagggcagaggaggggcggcggcatcagcagcaaccgcatccaggtgtccaacaccaagaagcccctcttcttctacgtaaacctcgccaagaggtatatgcagcagcacggcgatgtggagttgtccgctcttggaatggcgacagttgtgaccgtggcagaaattctgaagaataatggatttgctgttgaaaagagacatctactgttgacataaacgacgaatcacgagggcgtccattccaaaaggccaagattgagataatcttgggaaagagtgacagattcaatgagttgatggctgctgctgccgaagagaggggagaagttgaagaaggcgaagagcaggcttgaaagaaaaaaaaaacagtaccgacgacaagcggctgttgttgtggtctgttagttttgcttaatttaatgccatgcgcatgagagctggcatgcgttctcgctcatctacattgccatggcaatgtctgcaaactcatggattgatggatggatgctggtttcttccaattttgacagcttcatttgtttctttggctacgcatgttttgccagtctgacgttctccttacgaaatatggcgtgctttgttgactagacagaccatggttccttccggaactaatgattctgcagacactgttggtcttcgggatcatttgacagctagtagttcatttgtttcttttggctacactgttggatccccgaagaactccacacggaactgctcaaattcttcccatgttcgacatgggtcttttttg

SEQ ID NO: 75588 - DNA, 1088 bp, Zea Mays
cgcccacctcttccgtcctcctgtttcccgtcccgcacagcgctacgcacacagactatatttctctctctctctcgtcctctatcgctcgtccgatctgcatctgcttttcttcccccccctccgcgtgtcccctgtcccttccggcgtgcgcgaagatttgattttttttttgtcggggagaaggcggagtaagacagaccaggccgcgggaggaaggagatcctgatctgttcttggagtggggaggcgaggagaggagaggaggaagatggcggcgcaggagcaggagcacgagaagcagcaggcgaagacgagcaccacgagctcgctcccctccagcagcgagcgctcctccagctccgcccccaacaaccttagggaaggagctgaagctgccggcgcaggcgtggagagcgacgaggagatacggcgggtgccggagctgggcggcgcgtcggcgtcggcgtcggcctcgtcgggcgcgggcaaggaggacggcgcgcgggcggtggccgcgggggcgcaggggcaccctccggcggccgggaagaagcgcggccgcgccccgggggacaaggagcagaaccggctgaagcggctgctgcggaaccgcgtgtcggcgcagcaggcgcgggagcggaagaaggcgtacctgacggagctggaggcgcgggccaaggacctggagctccgcaatgcggagctcgagcagcgggtgtccacgctccagaacgagaacaacacgctccgccagattctgaagaacacgacggcgcacgcgagcaagaggagcggcggcggcggcaagggtggagacggcggcaagaagcaccacttcgccaagagctaatgagaattgagggactgagggagggagctggttcgtgctctgctcgcgctcgcctcacctgaccattgttggtggtggttgatgttgctgttgctgatgaccaaatcccgtctccccggccgctgctgtgctgggactgactactcaccactgctgtagggatgtggttgtttttgggggcgttttgtactggtcttgaaaggagaagcctttatggaatagatagatctttcgg

SEQ ID NO: 75589 - DNA, 809 bp, Zea Mays
cgcccacctcttccgtcctcctgtttcccgtcccgcacagcgctacgcacacagactatatttctctctctctctcgtcctctatcgctcgtccgatctgcatctgcttttcttcccccccctccgcgtgtcccctgtcccttccggcgtgcgcgaagatttgattttttttttgtcggggagaaggcggagtaagacagaccaggccgcgggaggaaggagatcctgatctgttcttggagtggggaggcgaggagaggagaggaggaagatggcggcgcaggagcaggagcacgagaagcagcaggcgaagacgagcaccacgagctcgctcccctccagcagcgagcgctcctccagctccgcccccaacaaccttagggaaggagattctgaagaacacgacggcgcacgcgagcaagaggagcggcggcggcggcaagggtggagacggcggcaagaagcaccacttcgccaagagctaatgagaattgagggactgagggagggagctggttcgtgctctgctcgcgctcgcctcacctgaccattgttggtggtggttgatgttgctgttgctgatgacgtattctctttttttttctccttttttcccctaatttctactgtacctgtgttcctcttgtctcgctgattcactgttttttaacgtagcaaatcccgtctccccggccgctgctgtgctgggactgactactcaccactgctgtagggatgtggttgtttttgggggcgttttgtactggtcttgaaaggagaagcctttatggaatagatagatctttcgg

SEQ ID NO: 75590 - DNA, 1074 bp, Zea Mays
ccagcgcccacctcttccgtcctcctgtttcccgtcccgcacagcgctacgcacacagactatatttctctctctctctcgtcctctatcgctcgtccgatctgcatctgcttttcttcccccccctccgcgtgtcccctgtcccttccggcgtgcgcgaagatttgattttttttttgtcggggagaaggcggagtaagacagaccaggccgcgggaggaaggagatcctgatctgttcttggagtggggaggcgaggagaggagaggaggaagatggcggcgcaggagcaggagcacgagaagcagcaggcgaagacgagcaccacgagctcgctcccctccagcagcgagcgctcctccagctccgcccccaacaaccttagggaaggaggcgtggagagcgacgaggagatacggcgggtgccggagctgggcggcgcgtcggcgtcggcgtcggcctcgtcgggcgcgggcaaggaggacggcgcgcgggcggtggccgcgggggcgcaggggcaccctccggcggccgggaagaagcgcggccgcgccccgggggacaaggagcagaaccggctgaagcggctgctgcggaaccgcgtgtcggcgcagcaggcgcgggagcggaagaaggcgtacctgacggagctggaggcgcgggccaaggacctggagctccgcaatgcggagctcgagcagcgggtgtccacgctccagaacgagaacaacacgctccgccagattctgaagaacacgacggcgcacgcgagcaagaggagcggcggcggcggcaagggtggagacggcggcaagaagcaccacttcgccaagagctaatgagaattgagggactgagggagggagctggttcgtgctctgctcgcgctcgcctcacctgaccattgttggtggtggttgatgttgctgttgctgatgaccaaatcccgtctccccggccgctgctgtgctgggactgactactcaccactgctgtagggatgtggttgtttttgggggcgttttgtactggtcttgaaaggagaagcctttatggaatagatagatctttcgg

SEQ ID NO: 75591 - DNA, 2860 bp, Zea Mays
cggaaactgacgaggcgtttccgtttccggcattcctcgcaccacgtgcaatcgagccggaacgaaccccaaacagtcccaaatgctcgatccggcggatcgatcgcgtccaatctggagcccgccagcggataatccgggccttgtgacccgatcccgactggcacgggaagcgtcggcccccaaatcatcactgcctgcatcgtctcggcacggcatcccgggccgccgcctcctcgtgtctcggcataaatctgcggcctccatccgtccggcggctgctccgatcacagtaccagcgctaggcctagggtttggtggtctcaagcggaccgagaacatggaaagggagcgcaacgccgccaccgctggtgctggccgctgggaggcgccggacggggtgatcgtgctgcccgtggggtcggcggcgccgcagcagggccgccaaaaggagcaccagtaccagcagagaaagcgtgagatggagcgggagcgggagcagcaggacccgggggcgagggagggggttttggggctggacccgcagccgccagagaaggtgtactacaagacgaggctgtgcgagaagttcgaggcgggcaagtgcgcgtacgagggtgggtgcaccttcgcgcacggctccgaggagttgcggccgccgctgccgctgcccctgctgacctcgctcgtccgacggaagtcgccgctgccgtcgtcgtcgccaggtgccgctgccagcagcccccacggtgggtactgcgttagggtgtgcttcgagttcagggacacgggggcctgccaccgtggggataggtgcgccttcgtccacgcttccacgacagcgcagagatgccctttcctggggggccaaggtctatggagtatgctctgaggaattcgtcgtcgtatgcaaaggcgtactcgccggggtccacggccgccgcgtaccgtaacagcagcagcaccagcaccagcaactatgcaccggctaccacaagggcgttccaatccgtttctgccgacgcggccggagagggcggttgcaaggccacccgtctggagctccttggtcgcaagaagatgaacgacatctacggcgactggccggaacaggactgagagcgcgtaccatgcatcacctgctcgatcgaagctaccatgtctaccttcctgcctttgatcaccgtgatcgacaacatccagaataatgaactgaacaatctgatgtttcgatttgaacttatttgaacatattgtgcttgttctttgtttcctgctgaatccctgcctgtaatccgtctgatcagacctctgcattcctgccaccatttctactttcaataatttgaagtgctgtgctgttgctttcactccgagctatctgtcgtcctctgttgcctttgggccaaatggttccatggtttcgacacgacccattgggctcccacatcatttcttgttgcgtgtgtgtgtgatgttgtgccagtcagaggggggaggaccgggagaggaacagagagttgtgggtctgtgcatttgcagggcggtagaattggattccaaggacaaggggcagagggtagtgtttgttagttgttacaacatgtctagcgtctccgccaccctgcacttcggcttcttcccacaagcgatggggaaatgagtcagtattttgcatacttgaagccaggagatgatgttgaagtcaaatggtattatgacatgaaattttattggttttctacatatgctgttttgtcactcatgcattttttttataggcccattgtaaagctcggatacagcccaaacatgaaaaaaaaatcggatggtaacatagactcaacttgacgtagtccttgaccttttgaattcatccctgcaaggataatgatggatggtttgttcttgtatttgattaaaatgtttttttagcttttaccttgattcgagagtaaccctatatccacactatagctgttgaataatgtgcatgtgtttgcttccatatcgctggtggcactggtatagcaccaatgctgcaggttgtcaaggctatccttaaaaaccctgctgcaggtacagtggcgggcctaggatttagagagtgggtattcgaatttttttataggatgatttttttgaaagattaattaagcatacacgctatggtcataactgattcaataactagtctattaaactcaaatttcatgaaactatttcaaaagttttaaatcgaaatgtatctgtttgttgttgctcggttcctggctggttgcttgtcctctttggcattttctaatcgctaatgtcccacctacagcccagtactgcaagcagcaaagcagggaaggtcaaggtcgggtggtcactggtttggtgggcttggacattggcacaataggaccttgccccctggctgtctgtcctggcacacggtgacaccctgactacggtggattgaagtctcggatgacgcgacgaggccagatgcaacacaatgacagttagtcggtcaagtataggtacctagctgcgctgcggagccacaatagcgcaacggaggtgctggtgtctccatggcacgtggggctgcaagatgtggctgatgcatctgatgactttgccacggtgcgactacaatagggtttagggtttttttgccgtgaggtactgaggtgggctttgtcgcttcgttgggtctcatggtccataacaaactataaagttggttaggtatgagaagtaggaaggagatattttggtctaaattaacataatttctttatttatttgattcattttctattcatgcatatacactatatatatgtatatatattgaagtacttttgac

SEQ ID NO: 75592 - DNA, 1191 bp, Zea Mays
ccacgatcagaaggatccggagttccggacgggcggacggccactgcaacgagctcgcctgtcgcctcgccccggcgccccgcgacaacgagacctcctcctccgctcagccgcagaagccacctcgccgccggcaggtgccaagaggccgttcgagtacgggagaacgcatgtggtgaggcccaagggcacgcacaaggccaccattgtctggctccacggccttggtgacaatggaaccagctggtctcaactgctggaaacgcttccccttcctaatataaaatggatatgcccaactgcaccttcaagacctgtgtcattgtttggcgggttcccctgcacagcatggtttgatgttgctgacctttctgaggatgctcccgatgacactgaggggatggatgcctcagcagcacatgttgcaaatttgttgtcaactgagcccgctgatatcaagcttggtgttggtggctttagtatgggtgctgctactgctctgtactctgcaacttgctttgctcatggaaaatatgggaacggcaatccataccctgtgaacctaagtcttgccgttggtcttagtggctggcttccatgtgccaggaccttgaagaacagaattgaagcctcaccagaggctgcacaaagggcttcaacaatacctcttttgctctgtcatggaaaagctgatgatgtagttctctacaagcacgggcagagatctactgatgccttgaaggcaaatggcttttccaatgtgctcttcaagtcatacaatagtcttggtcactacactgttccagaggagatggatgaagtttgcaaatggctcacagcaaatttggggctcggcacttcgtcatcttgatcgcgagaaagactcgcggtgtcggtgtcttctccagggtagtaaatgggctaatagcaaatttgggcttgggtatacggccatgttctagcttttcttcacgcagacgtgtctgcgagtgctgtacgcttataatttctatattctggtctacgtcgatttggttgacacggatattgtttgtttcaaatattctgttttccggtttggaattgtgatttgcttcctccgtatggcatcgagatgtctgcaaaggttttaccgtgactgccgaatcgttttgtttgtctattgtatataatattattgccagggacgga

SEQ ID NO: 75593 - DNA, 1270 bp, Zea Mays
ccacgatcagaaggatccggagttccggacgggcggacggccactgcaacgagctcgcctgtcgcctcgccccggcgccccgcgacaacgagacctcctcctccgctcagccgcagaagccacctcgccgccggcagcagcgttggcggaaaaggggtggaggcgcggcgattgttcgcgggatgagctacggcggcagcagctccctcgcgcccggtgccaagaggccgttcgagtacgggagaacgcatgtggtgaggcccaagggcacgcacaaggccaccattgtctggctccacggccttggtgacaatggaaccagctggtctcaactgctggaaacgcttccccttcctaatataaaatggatatgcccaactgcaccttcaagacctgtgtcattgtttggcgggttcccctgcacagcatggtttgatgttgctgacctttctgaggatgctcccgatgacactgaggggatggatgcctcagcagcacatgttgcaaatttgttgtcaactgagcccgctgatatcaagcttggtgttggtggctttagtatgggtgctgctactgctctgtactctgcaacttgctttgctcatggaaaatatgggaacggcaatccataccctgtgaacctaagtcttgccgttggtcttagtggctggcttccatgtgccaggaccttgaagaacagaattgaagcctcaccagaggctgcacaaagggcttcaacaatacctcttttgctctgtcatggaaaagctgatgatgtagttctctacaagcacgggcagagatctactgatgccttgaaggcaaatggcttttccaatgtgctcttcaagtcatacaatagtcttggtcactacactgttccagaggagatggatgaagtttgcaaatggctcacagcaaatttggggctcggcacttcgtcatcttgatcgcgagaaagactcgcggtgtcggtgtcttctccagggtagtaaatgggctaatagcaaatttgggcttgggtatacggccatgttctagcttttcttcacgcagacgtgtctgcgagtgctgtacgcttataatttctatattctggtctacgtcgatttggttgacacggatattgtttgtttcaaatattctgttttccggtttggaattgtgatttgcttcctccgtatggcatcgagatgtctgcaaaggttttaccgtgactgccgaatcgttttgtttgtctattgtatataatattattgccagggacgga

SEQ ID NO: 75594 - DNA, 1078 bp, Zea Mays
ccacgatcagaaggatccggagttccggacgggcggacggccactgcaacgagctcgcctgtcgcctcgccccggcgccccgcgacaacgagacctcctcctccgctcagccgcagaagccacctcgccgccggcagccgtcgttgtcgctgggattgcagcagcgttggcggaaaaggggtggaggcgcggcgattgttcgcgggatgagctacggcggcagcagctccctcgcgcccggtgccaagaggccgttcgagtacgggagaacgcatgtggtgaggcccaagggcacgcacaaggccaccattgtctggctccacggccttggtgacaatggaaccagctggtctcaactgctggaaacgcttccccttcctaatataaaatggatatgcccaactgcaccttcaagacctgtgtcattgtttggcgggttcccctgcacagcatggtttgatgttgctgacctttctgaggatgctcccgatgacactgaggggatggatgcctcagcagcacatgttgcaaatttgttgtcaactgagcccgctgatatcaagcttggtgttggtggctttagtatgggtgctgctactgctctgtactctgcaacttgctttgctcatggaaaatatgggaacggcaatccataccctgtgaacctaagtcttggtcactacactgttccagaggagatggatgaagtttgcaaatggctcacagcaaatttggggctcggcacttcgtcatcttgatcgcgagaaagactcgcggtgtcggtgtcttctccagggtagtaaatgggctaatagcaaatttgggcttgggtatacggccatgttctagcttttcttcacgcagacgtgtctgcgagtgctgtacgcttataatttctatattctggtctacgtcgatttggttgacacggatattgtttgtttcaaatattctgttttccggtttggaattgtgatttgcttcctccgtatggcatcgagatgtctgcaaaggttttaccgtgactgccgaatcgttttgtttgtctattgtatataatattattgccagggacgga

SEQ ID NO: 75595 - DNA, 1210 bp, Zea Mays
attgccataccaacgtgcatgtgcgtccttttgtgattattgcagctgcagagaagcctgtgctcccaaacgccgaggcccccccgtgccgcacgcacaggtcagtgacgtcagccagtggtcacaaacagaagcgagcaactgaccgaccaacccccacgatcagaaggatccggagttccggacgggcggacggccactgcaacgagctcgcctgtcgcctcgccccggcgccccgcgacaacgagacctcctcctccgctcagccgcagaagccacctcgccgccggcagcagcgttggcggaaaaggggtggaggcgcggcgattgttcgcgggatgagctacggcggcagcagctccctcgcgcccggtgccaagaggccgttcgagtacgggagaacgcatgtggtgaggcccaagggcacgcacaaggccaccattgtctggctccacggccttggtgacaatggaaccagctggtctcaactgctggaaacgcttccccttcctaatataaaatggatatgcccaactgcaccttcaagacctgtgtcattgtttggcgggttcccctgcacagcatggtttgatgttgctgacctttctgaggatgctcccgatgacactgaggggatggatgcctcagcagcacatgttgcaaatttgttgtcaactgagcccgctgatatcaagcttggtgttggtggctttagtatgggtgctgctactgctctgtactctgcaacttgctttgctcatggaaaatatgggaacggcaatccataccctgtgaacctaagtcttggtcactacactgttccagaggagatggatgaagtttgcaaatggctcacagcaaatttggggctcggcacttcgtcatcttgatcgcgagaaagactcgcggtgtcggtgtcttctccagggtagtaaatgggctaatagcaaatttgggcttgggtatacggccatgttctagcttttcttcacgcagacgtgtctgcgagtgctgtacgcttataatttctatattctggtctacgtcgatttggttgacacggatattgtttgtttcaaatattctgttttccggtttggaattgtgatttgcttcctccgtatggcatcgagatgtctgcaaaggttttaccgtgactgccgaatcgttttgtttgtctattgtatataatattattgccagggacgga

SEQ ID NO: 75596 - DNA, 1548 bp, Zea Mays
cccaaacggtttctgtaaacagttcagggagttgtttactggcaacctcccgagtcagctatggataagatcgaaaagatcatcagggaaccaatagtcagtaaatatggttctgatgatgggcttcctgagcttcgagaagcacttctcgaaaagctaagcagagagaataagcttaccaaatcatcagtcatggtcactgctggtgcaaatcaggcttttgtgaacttggtcctcactctctgtgatgctggtgattccgttgtcatgtttgcaccgtattatttcaatgcctacatgtcattccagatgacaggtgttactgacatattagttggtggctgcgatcccaagacacttcatcctgatgttgattggttggagaaggttctgaaagaaaatgagcctatccctaaacttgtcactgttgtgaatccggggaacccctctggagcttttattccaaggcctatgcttgagaggatttcagatctgtgcaaaaatgctggtgcatggcttgtggttgacaatacctatgagtactttatgtatgatggaatggagcactactgcttagaagatgctcatattgtcaacctcttctcgttctcaaaggcttatggaatgatggggtggcgtgtaggatacattgcatttccaaatgaagctgatggcttccacgatcagctcctcaaggtgcaagacaacataccgatctgcgcctccatcatcgggcagcgcctggcgctctactcgctggaggccggccccgagtggatcaaagaacgggtgaaagacctggtgaaaaaccgggcgctgctggtggaggcgctgtccccgctcggcgaggacaacgtcaagggcggggagggcgccatctacctctgggcaaagctaccggacagctgctcggacgacttcgaggctgtcaggtggctcgcgaacaagcacggcgtcgccgtgatccccgggagcgccagcggaggacccgggtacatccgcgtctccttcggagggctcaaggaagaagacaccaggctggctgctgagaggctcaggcgcggcctgcaggagctggtgaccgatggaatggtacagtgacggctccatgggtgtaagtaaaagctccaattttccaacggtgtaattccgccgtgattaattcgggagaagaaaaggaacttgttttcaagaatgcactgcgttgctcggacgagagacgggacggaataaaatgcgtctggtctgcagagtcacctatgttatgaatcatatgtagtgcatatgtcatgagtgacagagtgagtaattgtttctgttcgacttccagttctacatattactgatcgatggcagcaactgtacacagtcaaaggtataaccgtataagcaagaaccgtgagctgttcttgacgtgcagagcttgcctgttagcaaatatttctgtccagataacgacagcatctgccttcagaaccagcgtcacattctgtaatggcatggatgagtgtctccaagaaagataaatctactatatctacatgagcg

SEQ ID NO: 75597 - DNA, 1801 bp, Zea Mays
cggcgcggcgcgacgcgagttgcccgggcgccccggccttgtgcttctgcattggaccgcgatccaaatccagggaggatccgaacaggacaacagttcttgcttcttcctcttggaggaggagggctgcagcctgcaggggccggagagagcaggaggaggcggagacatgggtagcttcgctaagctggcgaggagggcggtggagacggacgctccggtcatggtgaagatacaagaactgctccgaggggccaaggatgtgatgtcgcttgcgcagggagttgtttactggcaacctcccgagtcagctatggataagatcgaaaagatcatcagggaaccaatagtcagtaaatatggttctgatgatgggcttcctgagcttcgagaagcacttctcgaaaagctaagcagagagaataagcttaccaaatcatcagtcatggtcactgctggtgcaaatcaggcttttgtgaacttggtcctcactctctgtgatgctggtgattccgttgtcatgtttgcaccgtattatttcaatgcctacatgtcattccagatgacaggtgttactgacatattagttggtggctgcgatcccaagacacttcatcctgatgttgattggttggagaaggttctgaaagaaaatgagcctatccctaaacttgtcactgttgtgaatccggggaacccctctggagcttttattccaaggcctatgcttgagaggatttcagatctgtgcaaaaatgctggtgcatggcttgtggttgacaatacctatgagtactttatgtatgatggaatggagcactactgcttagaagatgctcatattgtcaacctcttctcgttctcaaaggcttatggaatgatggggtggcgtgtaggatacattgcatttccaaatgaagctgatggcttccacgatcagctcctcaaggtgcaagacaacataccgatctgcgcctccatcatcgggcagcgcctggcgctctactcgctggaggccggccccgagtggatcaaagaacgggtgaaagacctggtgaaaaaccgggcgctgctggtggaggcgctgtccccgctcggcgaggacaacgtcaagggcggggagggcgccatctacctctgggcaaagctaccggacagctgctcggacgacttcgaggctgtcaggtggctcgcgaacaagcacggcgtcgccgtgatccccgggagcgccagcggaggacccgggtacatccgcgtctccttcggagggctcaaggaagaagacaccaggctggctgctgagaggctcaggcgcggcctgcaggagctggtgaccgatggaatggtacagtgacggctccatgggtgtaagtaaaagctccaattttccaacggtgtaattccgccgtgattaattcgggagaagaaaaggaacttgttttcaagaatgcactgcgttgctcggacgagagacgggacggaataaaatgcgtctggtctgcagagtcacctatgttatgaatcatatgtagtgcatatgtcatgagtgacagagtgagtaattgtttctgttcgacttccagttctacatattactgatcgatggcagcaactgtacacagtcaaaggtataaccgtataagcaagaaccgtgagctgttcttgacgtgcagagcttgcctgttagcaaatatttctgtccagataacgacagcatctgccttcagaaccagcgtcacattctgtaatggcatggatgagtgtctccaagaaagataaatctactatatctacatgagcg

SEQ ID NO: 75598 - DNA, 1278 bp, Zea Mays
tccgcgcgctccaggacaagttcttctcccacttcaccatcattcgccgacgacgagaggaagctggtggacgcggtgaacgggacggagtacgtgcccacgtacgaggacaaggatggcgactggatgctcgtcggcgacgtcccctggaagtgagctccttcgctctgtctcttttactttccctgatctaattagctggttatctacgcagtttggctgtgctgagtagatttgcaaaaaaaaaaaacatgactgagttgattgagacttaaaagaggtgctgttggagtgttggtgttgccggataggaaggattgttaggaagccccctttccccattggattatgacaccctccctttgctgctcccttactccacttgttagcgcactgccgtcattactgcgacaatgcagtcacactgatcaaattgaactccgtttgatgcttctcgcaccgaatgtctcgctgctgctgctactggttcttctagctttttaacgtatccatgtacagaatcccttggtttgaaaagaattggctttggataagggctgtcttcctagctctattccccacttatagataggttgatccttctagaaaaatattctgtctcgatcaatgagacgagccgggcctgtccgagtttattttcatttataattttcttccttggtcatactgtgttttttttttgttttttgcaggatgttcgtggagacctgccggcgccttcgcctgatgaaaggttcagaggccgttaacttggcaccaagagccgcccgatgaggcgcaagcgcaactccagcgtcaccagtacgcactggcttttagtggcttggcttgttggaggaacgagggaacgtacttcgtcgctgttttgaggatcttcacttgacatatatatagcaatgtgtacagctgtcacctgctgcttttgcctgaggaaagtttgtagttccattactttacttatctgtagtgtctatctatctatctatagatccgaagctttgatatacacatggcggctacaatgtatttttgatgaataagaccagaccagagtaccagacacaccgaaccgaacccgttcttccgcagctccacgcgcggttggcattttgagggttatgtggtggtgttttgcaatttgcagtaggcgtgaaggctgatgtcgtagctgccaattatttatacatcttgatctgtgttgagctatggttttttgtttaatcgatcttggtttaaatcgcgacatgcatgtcaaac

SEQ ID NO: 75599 - DNA, 1790 bp, Zea Mays
gtgaccgcggtccgcggcccactataaactcaaccacctccggagtccggacctcccccgttggccttctccttccccttcgccctgcctccctctctcagtctctctccggcctccctcgcccacagagacagagcggaagccgccgagctcggagcccagcactttgcacgccgccgccggccatgtcggtggatacggagcggagctccaccgagtcgtccgcggcctccgggctcggctacgaggacaccgcgctcgccctcaccctccgcctcccgggctccgaccccggccgttcctccccgctcgccgcgccctccgacgccgcgccgtctcccaagacgcgggtggtggggtggccgccggtgaggtcgtaccgcaagaacgcgctcgccgactccagcaaggccaaccggtcagccagtttcgtgaaggtggccgtcgacggcgcggcctacctgcggaaggtggacctccaggcgtacggcggctacgaccagctcctccgcgcgctccaggacaagttcttctcccacttcaccatcaggaagttcgccgacgacgagaggaagctggtggacgcggtgaacgggacggagtacgtgcccacgtacgaggacaaggatggcgactggatgctcgtcggcgacgtcccctggaagtgagctccttcgctctgtctcttttactttccctgatctaattagctggttatctacgcagtttggctgtgctgagtagatttgcaaaaaaaaaaaacatgactgagttgattgagacttaaaagaggtgctgttggagtgttggtgttgccggataggaaggattgttaggaagccccctttccccattggattatgacaccctccctttgctgctcccttactccacttgttagcgcactgccgtcattactgcgacaatgcagtcacactgatcaaattgaactccgtttgatgcttctcgcaccgaatgtctcgctgctgctgctactggttcttctagctttttaacgtatccatgtacagaatcccttggtttgaaaagaattggctttggataagggctgtcttcctagctctattccccacttatagataggttgatccttctagaaaaatattctgtctcgatcaatgagacgagccgggcctgtccgagtttattttcatttataattttcttccttggtcatactgtgttttttttttgttttttgcaggatgttcgtggagacctgccggcgccttcgcctgatgaaaggttcagaggccgttaacttggcaccaagagccgcccgatgaggcgcaagcgcaactccagcgtcaccagtacgcactggcttttagtggcttggcttgttggaggaacgagggaacgtacttcgtcgctgttttgaggatcttcacttgacatatatatagcaatgtgtacagctgtcacctgctgcttttgcctgaggaaagtttgtagttccattactttacttatctgtagtgtctatctatctatctatagatccgaagctttgatatacacatggcggctacaatgtatttttgatgaataagaccagaccagagtaccagacacaccgaaccgaacccgttcttccgcagctccacgcgcggttggcattttgagggttatgtggtggtgttttgcaatttgcagtaggcgtgaaggctgatgtcgtagctgccaattatttatacatcttgatctgtgttgagctatggttttttgtttaatcgatcttggtttaaatcgcgacatgcatgtcaaac

SEQ ID NO: 75600 - DNA, 2293 bp, Zea Mays
aggcccacatggcagcctctgcactgcaggatctcatcccctccggctgcccgtgcccagccgtcgtggcgcgacggcggcggtcggtctggtagggctcccctcctttccaccagatcagaacagatagtcatagatcagtgtcacaccacgacccgccagccggaccgccacttgccaaccaacgcctttccctcctcctccgcctccgggcgctagcgggaatggacgccgccgagctgcccctcgtctaccacatcggtctggtgctggccgcgctctgggccgccgccgccgtcggcttccgcggctccctcctctacctcctcgccttcctctacctctacatggtaaatgctcgctgtgcagtgagactgcggaagaggatacaacatgaagagatgaaatctgcctaccaacgaaggctcctctctgatgcagaatcagcacgctggttaaaccatgcaatcgacaagatgtggcctgtctgtatggagaagatcgtttcaaaacttctacggcccatcataccatggttcttggataagttcaaaccttggacagtcagcaaagcaagtattcaggaactttacatgggcaggaatccaccaatctttacctccatgagagttctaccagagacatcagatgatgaccatttggttcttgagctgggattgaattttctttctgctgaagatatgagtgctgtacttgctatgcagctgcacaagagtgtgggacttggaatgactgcaaagatgcatttaacaagcatgcatgtcgagggaaagatattagttggtgtgaaatttgttcggagttggccatttcttggccgtgtaagactatgttttgtggagccaccttattttcagatggctgtgaaaccactcattaatcacgggctcgatgtcactgagtttccaggaatttcaggatggctggataagttgatggatactgcatttgggcagacattagttgagcccaatgtgatagtaataaatgtggaaaaatttgcatctactccttcagaaaataactggttcagcattgaggagagacctcctattgcatatgtgaagcttgagattctagaaggaactgacatgaagccatctgatataaatggactagcggacccatatgtgaaaggtcaccttggtcctttcaaattccaaacacagatacagaggaaaacattgtcccctaagtggtttgaagaatttaaaataccaatcacatcatgggaggcaacgaatgaacttgtcatggaagttcgtgataaggaccccatgtttgatgactcacttgggcaatgtaccattagtttacatgatctgagaggtggacaaagacatgacaaatggatatcactgaataatgtgaagaaaggaaggattcacttggcagtaacaattgatgatatatccgaggaccaaaatacatcaagtttggaccaatcattgaagcaagcggatactgaactaccagtatcaacatctgtttgtagcgaagtggatgctagtgaacctcctgaagaaaagaaagtcttaatggatgaagtggagcacataaacattgatggacaagaacagcctggaggtttatatgtacatcgccctggcactggggttccaaggacatgggaatcccggaaaggacgagcacgaaacccagacacacagattcaccaagaggttgacaagcaaaaggaagtcccaacaccaaaagggagtgggcaagggggtctatttaacgtaggctcctttttccggtggaactcgaggaaggggagctccagaaatctcgatgccagccctcctgcaactccgggttctcagagcgtgacagagcttgatccaaagctccctcaaactccacgtcccaacctgaaggagctaggcgagaagcggacgtcgataaagatcgtagtggacgaagaagcaagcccggcagacaaggtgggaggtgcggagaactcaggagaagatgtggcgaaggtgatagagaaaaatgcaggtgaaccgggcaggtcactgacaagcacattgagcaggaagatttgcagaaggagagcagatgataggctatcagatatccccgagaagattgaagctcgtggatctaagccggtgagtgaagggcctattcttgttagaggtgagccaatgataacagtggaccatccgacgacggaacatagcgatggaggtggcactgagcaagatgcggtgggagcaaaggttgctactcagacctcataaggattgcgacttaagctcaggag

SEQ ID NO: 75601 - DNA, 3268 bp, Zea Mays
attttccaaaaccgtgggttactgttactgattctatgcccccaaggtaaatgctcgctgtgcagtgagactgcggaagaggatacaacatgaagagatgaaatctgcctaccaacgaaggctcctctctgatgcagaatcagcacgctggttaaaccatgcaatcgacaagatgtggcctgtctgtatggagaagatcgtttcaaaacttctacggcccatcataccatggttcttggataagttcaaaccttggacagtcagcaaagcaagtattcaggaactttacatgggcaggaatccaccaatctttacctccatgagagttctaccagagacatcagatgatgaccatttggttcttgagctgggattgaattttctttctgctgaagatatgagtgctgtacttgctatgcagctgcacaagagtgtgggacttggaatgactgcaaagatgcatttaacaagcatgcatgtcgagggaaagatattagttggtgtgaaatttgttcggagttggccatttcttggccgtgtaagactatgttttgtggagccaccttattttcagatggctgtgaaaccactcattaatcacgggctcgatgtcactgagtttccaggaatttcaggatggctggataagttgatggatactgcatttgggcagacattagttgagcccaatgtgatagtaataaatgtggaaaaatttgcatctactccttcagaaaataactggttcagcattgaggagagacctcctattgcatatgtgaagcttgagattctagaaggaactgacatgaagccatctgatataaatggactagcggacccatatgtgaaaggtcaccttggtcctttcaaattccaaacacagatacagaggaaaacattgtcccctaagtggtttgaagaatttaaaataccaatcacatcatgggaggcaacgaatgaacttgtcatggaagttcgtgataaggaccccatgtttgatgactcacttgggcaatgtaccattagtttacatgatctgagaggtggacaaagacatgacaaatggatatcactgaataatgtgaagaaaggaaggattcacttggcagtaacaattgatgatatatccgaggaccaaaatacatcaagtttggaccaatcattgaagcaagcggatactgaactaccagtatcaacatctgtttgtagcgaagtggatgctagtgaacctcctgaagaaaagaaagtcttaatggatgaagtggagcacataaacattgatggacaagaacagcctggaggtttatatgtacatcgccctggcactggggttccaaggacatgggaatcccggaaaggacgagcacgaaacccagacacacagattcaccaagaggttgacaagcaaaaggaagtcccaacaccaaaagggagtgggcaagggggtctatttaacgtaggctcctttttccggtggaactcgaggaaggggagctccagaaatctcgatgccagccctcctgcaactccgggttctcagagcgtgacagagcttgatccaaagctccctcaaactccacgtcccaacctgaaggagctaggcgagaagcggacgtcgataaagatcgtagtggacgaagaagcaagcccggcagacaaggtgggaggtgcggagaactcaggagaagatgtggcgaaggtgatagagaaaaatgcaggtgaaccgggcaggtcactgacaagcacattgagcaggaagatttgcagaaggagagcagatgataggctatcagatatccccgagaagattgaagctcgtggatctaagccggtgagtgaagggcctattcttgttagaggtgagccaatgataacagtggaccatccgacgacggaacatagcgatggaggtggcactgagcaagatgcggtgggagcaaaggttgctactcagacctcataaggattgcgacttaaggcaacagaagaaatgcaaagcccggcccagtaaaccatcatcgtctttcacggcccatcaaagaggcatccgcgttcgcacattgcagtagcttcccacacccccctccagagccggcacgttctctagactatatttcctatcttattcattttcttctatgggataatactcttgttaatatgagttatacataagcttgtcgctgcacaataatgtaatttatagggtcttattgctgaagtatccatcatcagtacatttatggatgtagtttttagctctgatctatatatcggttgataagataagaagttttctttgaaaaggaaataatccagaataatgtggcggggtcactgttcaattggtctacaacttgtttgccaaagaattggggggccttggtattctggatttagaacgttttgcaagagcgctatgactaagatggttgtggttgcgatggaaggtcaaagaaatagcccactggcatgcaattactatgtgacaagattgatgtggatctcttcaatacatccataattgtgaacattggcaatgggaagatggcaaatttctgggatcaagttggattgaaggacaggctctgaggaatattacaccaagtctatacaagaaagcaaggaggaagaacattacggtgttcaaagcacttcgaaacaattaccggatacagttttgttctcgttacaagcaggaggaggaagtgagagaattcgtctccatgtggcatgcaattagcaacacacaagacctaaatgatctagaagacaccatatcttagcgacggacgacaattgggcaatacaacacaagtagtgcctacaaaattcagttcacaacgaacttctgtagatttaaaatcagtcccatttggaaagcaagaacggaaccaaaatgtggtttttcgcatggacgttgttgcacaacagaattgtaattacagacaaccttcaaaaaaggggatgacctttgatgaggacatcacttctatacatacaatgaatggaccgataacacgatctcgtgcacgatagctaaatctccaggtacgttctaccctagtcaattgtgtttcagagcttacgcttggggccatggatgttttgatgattaggtaccttggagagaaccagcaaggacttgggaaaggccaaggtgttgaggaggaggagcaagggcgtccacaacaggaaggagatcaagtttgagtcggctgcgactccatctcgagttccaggaccagtctgcactaaaatggac

SEQ ID NO: 75602 - DNA, 3781 bp, Zea Mays
aggcccacatggcagcctctgcactgcaggatctcatcccctccggctgcccgtgcccagccgtcgtggcgcgacggcggcggtcggtctggtagggctcccctcctttccaccagatcagaacagatagtcatagatcagtgtcacaccacgacccgccagccggaccgccacttgccaaccaacgcctttccctcctcctccgcctccgggcgctagcgggaatggacgccgccgagctgcccctcgtctaccacatcggtctggtgctggccgcgctctgggccgccgccgccgtcggcttccgcggctccctcctctacctcctcgccttcctctacctctacatggtaaatgctcgctgtgcagtgagactgcggaagaggatacaacatgaagagatgaaatctgcctaccaacgaaggctcctctctgatgcagaatcagcacgctggttaaaccatgcaatcgacaagatgtggcctgtctgtatggagaagatcgtttcaaaacttctacggcccatcataccatggttcttggataagttcaaaccttggacagtcagcaaagcaagtattcaggaactttacatgggcaggaatccaccaatctttacctccatgagagttctaccagagacatcagatgatgaccatttgatattagttggtgtgaaatttgttcggagttggccatttcttggccgtgtaagactatgttttgtggagccaccttattttcagatggctgtgaaaccactcattaatcacgggctcgatgtcactgagtttccaggaatttcaggatggctggataagttgatggatactgcatttgggcagacattagttgagcccaatgtgatagtaataaatgtggaaaaatttgcatctactccttcagaaaataactggttcagcattgaggagagacctcctattgcatatgtgaagcttgagattctagaaggaactgacatgaagccatctgatataaatggactagcggacccatatgtgaaaggtcaccttggtcctttcaaattccaaacacagatacagaggaaaacattgtcccctaagtggtttgaagaatttaaaataccaatcacatcatgggaggcaacgaatgaacttgtcatggaagttcgtgataaggaccccatgtttgatgactcacttgggcaatgtaccattagtttacatgatctgagaggtggacaaagacatgacaaatggatatcactgaataatgtgaagaaaggaaggattcacttggcagtaacaattgatgatatatccgaggaccaaaatacatcaagtttggaccaatcattgaagcaagcggatactgaactaccagtatcaacatctgtttgtagcgaagtggatgctagtgaacctcctgaagaaaagaaagtcttaatggatgaagtggagcacataaacattgatggacaagaacagcctggaggtttatatgtacatcgccctggcactggggttccaaggacatgggaatcccggaaaggacgagcacgaaacccagacacacagattcaccaagaggttgacaagcaaaaggaagtcccaacaccaaaagggagtgggcaagggggtctatttaacgtaggctcctttttccggtggaactcgaggaaggggagctccagaaatctcgatgccagccctcctgcaactccgggttctcagagcgtgacagagcttgatccaaagctccctcaaactccacgtcccaacctgaaggagctaggcgagaagcggacgtcgataaagatcgtagtggacgaagaagcaagcccggcagacaaggtgggaggtgcggagaactcaggagaagatgtggcgaaggtgatagagaaaaatgcaggtgaaccgggcaggtcactgacaagcacattgagcaggaagatttgcagaaggagagcagatgataggctatcagatatccccgagaagattgaagctcgtggatctaagccggtgagtgaagggcctattcttgttagaggtgagccaatgataacagtggaccatccgacgacggaacatagcgatggaggtggcactgagcaagatgcggtgggagcaaaggttgctactcagacctcataaggattgcgacttaaggtcagcagttcttgttcttgtaatctttgctggtcgatttggttcgggcatgggaccttgctttctgtttatagatcagtgtccatagttgcgaagggtatccatttagaaatggctgaaaaatatagtaacaaagagcagcgtgttgtgcagtgatatacgctcatgttgataagatggctctgttagatcttgtttacttatgtaaagaaacatgaattgcatatatttcttgacataaataatgtaaaacgtatttttttggttgcattctttcctctacgcatatgatattttgcccggttttatcatgtaataatttcccaagattttcagctcaggcaacagaagaaatgcaaagcccggcccagtaaaccatcatcgtctttcacggcccatcaaagaggcatccgcgttcgcacattgcagtagcttcccacacccccctccagagccggcacgttctctagactatatttcctatcttattcattttcttctatgggataatactcttgttaatatgagttatacataagcttgtcgctgcacaataatgtaatttatagggtcttattgctgaagtatccatcatcagtacatttatggatgtagtttttagctctgatctatatatcggttgataagataagaagttttctttgaaaaggaaataatccagaataatgtggcggggtcactgttcaattggtctacaacttgtttgccaaagaattggggggccttggtattctggatttagaacgttttgcaagagcgctatgactaagatggttgtggttgcgatggaaggtcaaagaaatagcccactggcatgcaattactatgtgacaagattgatgtggatctcttcaatacatccataattgtgaacattggcaatgggaagatggcaaatttctgggatcaagttggattgaaggacaggctctgaggaatattacaccaagtctatacaagaaagcaaggaggaagaacattacggtgttcaaagcacttcgaaacaattaccggatacagttttgttctcgttacaagcaggaggaggaagtgagagaattcgtctccatgtggcatgcaattagcaacacacaagacctaaatgatctagaagacaccatatcttagcgacggacgacaattgggcaatacaacacaagtagtgcctacaaaattcagttcacaacgaacttctgtagatttaaaatcagtcccatttggaaagcaagaacggaaccaaaatgtggtttttcgcatggacgttgttgcacaacagaattgtaattacagacaaccttcaaaaaaggggatgacctttgatgaggacatcacttctatacatacaatgaatggaccgataacacgatctcgtgcacgatagctaaatctccaggtacgttctaccctagtcaattgtgtttcagagcttacgcttggggccatggatgttttgatgattaggtaccttggagagaaccagcaaggacttgggaaaggccaaggtgttgaggaggaggagcaagggcgtccacaacaggaaggagatcaagtttgagtcggctgcgactccatctcgagttccaggaccagtctgcactaaaatggac

SEQ ID NO: 75603 - DNA, 3364 bp, Zea Mays
aggcccacatggcagcctctgcactgcaggatctcatcccctccggctgcccgtgcccagccgtcgtggcgcgacggcggcggtcggtctggtagggctcccctcctttccaccagatcagaacagatagtcatagatcagtgtcacaccacgacccgccagccggaccgccacttgccaaccaacgcctttccctcctcctccgcctccgggcgctagcgggaatggacgccgccgagctgcccctcgtctaccacatcggtctggtgctggccgcgctctgggccgccgccgccgtcggcttccgcggctccctcctctacctcctcgccttcctctacctctacatggtaaatgctcgctgtgcagtgagactgcggaagaggatacaacatgaagagatgaaatctgcctaccaacgaaggctcctctctgatgcagaatcagcacgctggttaaaccatgcaatcgacaagatgtggcctgtctgtatggagaagatcgtttcaaaacttctacggcccatcataccatggttcttggataagttcaaaccttggacagtcagcaaagcaagtattcaggaactttacatgggcaggaatccaccaatctttacctccatgagagttctaccagagacatcagatgatgaccatttggttcttgagctgggattgaattttctttctgctgaagatatgagtgctgtacttgctatgcagctgcacaagagtgtgggacttggaatgactgcaaagatgcatttaacaagcatgcatgtcgagggaaagatattagttggtgtgaaatttgttcggagttggccatttcttggccgtgtaagactatgttttgtggagccaccttattttcagatggctgtgaaaccactcattaatcacgggctcgatgtcactgagtttccaggaatttcaggatggctggataagttgatggatactgcatttgggcagacattagttgagcccaatgtgatagtaataaatgtggaaaaatttgcatctactccttcagaaaataactggttcagcattgaggagagacctcctattgcatatgtgaagcttgagattctagaaggaactgacatgaagccatctgatataaatggactagcggacccatatgtgaaaggtcaccttggtcctttcaaattccaaacacagatacagaggaaaacattgtcccctaagtggtttgaagaatttaaaataccaatcacatcatgggaggcaacgaatgaacttgtcatggaagttcgtgataaggaccccatgtttgatgactcacttgggcaatgtaccattagtttacatgatctgagaggtggacaaagacatgacaaatggatatcactgaataatgtgaagaaaggaaggattcacttggcagtaacaattgatgatatatccgaggaccaaaatacatcaagtttggaccaatcattgaagcaagcggatactgaactaccagtatcaacatctgtttgtagcgaagtggatgctagtgaacctcctgaagaaaagaaagtcttaatggatgaagtggagcacataaacattgatggacaagaacagcctggaggtttatatgtacatcgccctggcactggggttccaaggacatgggaatcccggaaaggacgagcacgaaacccagacacacagattcaccaagaggttgacaagcaaaaggaagtcccaacaccaaaagggagtgggcaagggggtctatttaacgtaggctcctttttccggtggaactcgaggaaggggagctccagaaatctcgatgccagccctcctgcaactccgggttctcagagcgtgacagagcttgatccaaagctccctcaaactccacgtcccaacctgaaggagctaggcgagaagcggacgtcgataaagatcgtagtggacgaagaagcaagcccggcagacaaggtgggaggtgcggagaactcaggagaagatgtggcgaaggtgatagagaaaaatgcaggtgaaccgggcaggtcactgacaagcacattgagcaggaagatttgcagaaggagagcagatgataggctatcagatatccccgagaagattgaagctcgtggatctaagccggtgagtgaagggcctattcttgttagaggtgagccaatgataacagtggaccatccgacgacggaacatagcgatggaggtggcactgagcaagatgcggtgggagcaaaggttgctactcagacctcataaggattgcgacttaagctcaggcaacagaagaaatgcaaagcccggcccagtaaaccatcatcgtctttcacggcccatcaaagaggcatccgcgttcgcacattgcagtagcttcccacacccccctccagagccggaaataatccagaataatgtggcggggtcactgttcaattggtctacaacttgtttgccaaagaattggggggccttggtattctggatttagaacgttttgcaagagcgctatgactaagatggttgtggttgcgatggaaggtcaaagaaatagcccactggcatgcaattactatgtgacaagattgatgtggatctcttcaatacatccataattgtgaacattggcaatgggaagatggcaaatttctgggatcaagttggattgaaggacaggctctgaggaatattacaccaagtctatacaagaaagcaaggaggaagaacattacggtgttcaaagcacttcgaaacaattaccggatacagttttgttctcgttacaagcaggaggaggaagtgagagaattcgtctccatgtggcatgcaattagcaacacacaagacctaaatgatctagaagacaccatatcttagcgacggacgacaattgggcaatacaacacaagtagtgcctacaaaattcagttcacaacgaacttctgtagatttaaaatcagtcccatttggaaagcaagaacggaaccaaaatgtggtttttcgcatggacgttgttgcacaacagaattgtaattacagacaaccttcaaaaaaggggatgacctttgatgaggacatcacttctatacatacaatgaatggaccgataacacgatctcgtgcacgatagctaaatctccaggtacgttctaccctagtcaattgtgtttcagagcttacgcttggggccatggatgttttgatgattaggtaccttggagagaaccagcaaggacttgggaaaggccaaggtgttgaggaggaggagcaagggcgtccacaacaggaaggagatcaagtttgagtcggctgcgactccatctcgagttccaggaccagtctgcactaaaatggac

SEQ ID NO: 75604 - DNA, 3436 bp, Zea Mays
aggcccacatggcagcctctgcactgcaggatctcatcccctccggctgcccgtgcccagccgtcgtggcgcgacggcggcggtcggtctggtagggctcccctcctttccaccagatcagaacagatagtcatagatcagtgtcacaccacgacccgccagccggaccgccacttgccaaccaacgcctttccctcctcctccgcctccgggcgctagcgggaatggacgccgccgagctgcccctcgtctaccacatcggtctggtgctggccgcgctctgggccgccgccgccgtcggcttccgcggctccctcctctacctcctcgccttcctctacctctacatggtaaatgctcgctgtgcagtgagactgcggaagaggatacaacatgaagagatgaaatctgcctaccaacgaaggagcaaagcaagtattcaggaactttacatgggcaggaatccaccaatctttacctccatgagagttctaccagagacatcagatgatgaccatttggttcttgagctgggattgaattttctttctgctgaagatatgagtgctgtacttgctatgcagctgcacaagagtgtgggacttggaatgactgcaaagatgcatttaacaagcatgcatgtcgagggaaagatattagttggtgtgaaatttgttcggagttggccatttcttggccgtgtaagactatgttttgtggagccaccttattttcagatggctgtgaaaccactcattaatcacgggctcgatgtcactgagtttccaggaatttcaggatggctggataagttgatggatactgcatttgggcagacattagttgagcccaatgtgatagtaataaatgtggaaaaatttgcatctactccttcagaaaataactggttcagcattgaggagagacctcctattgcatatgtgaagcttgagattctagaaggaactgacatgaagccatctgatataaatggactagcggacccatatgtgaaaggtcaccttggtcctttcaaattccaaacacagatacagaggaaaacattgtcccctaagtggtttgaagaatttaaaataccaatcacatcatgggaggcaacgaatgaacttgtcatggaagttcgtgataaggaccccatgtttgatgactcacttgggcaatgtaccattagtttacatgatctgagaggtggacaaagacatgacaaatggatatcactgaataatgtgaagaaaggaaggattcacttggcagtaacaattgatgatatatccgaggaccaaaatacatcaagtttggaccaatcattgaagcaagcggatactgaactaccagtatcaacatctgtttgtagcgaagtggatgctagtgaacctcctgaagaaaagaaagtcttaatggatgaagtggagcacataaacattgatggacaagaacagcctggaggtttatatgtacatcgccctggcactggggttccaaggacatgggaatcccggaaaggacgagcacgaaacccagacacacagattcaccaagaggttgacaagcaaaaggaagtcccaacaccaaaagggagtgggcaagggggtctatttaacgtaggctcctttttccggtggaactcgaggaaggggagctccagaaatctcgatgccagccctcctgcaactccgggttctcagagcgtgacagagcttgatccaaagctccctcaaactccacgtcccaacctgaaggagctaggcgagaagcggacgtcgataaagatcgtagtggacgaagaagcaagcccggcagacaaggtgggaggtgcggagaactcaggagaagatgtggcgaaggtgatagagaaaaatgcaggtgaaccgggcaggtcactgacaagcacattgagcaggaagatttgcagaaggagagcagatgataggctatcagatatccccgagaagattgaagctcgtggatctaagccggtgagtgaagggcctattcttgttagaggtgagccaatgataacagtggaccatccgacgacggaacatagcgatggaggtggcactgagcaagatgcggtgggagcaaaggttgctactcagacctcataaggattgcgacttaagctcaggcaacagaagaaatgcaaagcccggcccagtaaaccatcatcgtctttcacggcccatcaaagaggcatccgcgttcgcacattgcagtagcttcccacacccccctccagagccggcacgttctctagactatatttcctatcttattcattttcttctatgggataatactcttgttaatatgagttatacataagcttgtcgctgcacaataatgtaatttatagggtcttattgctgaagtatccatcatcagtacatttatggatgtagtttttagctctgatctatatatcggttgataagataagaagttttctttgaaaaggaaataatccagaataatgtggcggggtcactgttcaattggtctacaacttgtttgccaaagaattggggggccttggtattctggatttagaacgttttgcaagagcgctatgactaagatggttgtggttgcgatggaaggtcaaagaaatagcccactggcatgcaattactatgtgacaagattgatgtggatctcttcaatacatccataattgtgaacattggcaatgggaagatggcaaatttctgggatcaagttggattgaaggacaggctctgaggaatattacaccaagtctatacaagaaagcaaggaggaagaacattacggtgttcaaagcacttcgaaacaattaccggatacagttttgttctcgttacaagcaggaggaggaagtgagagaattcgtctccatgtggcatgcaattagcaacacacaagacctaaatgatctagaagacaccatatcttagcgacggacgacaattgggcaatacaacacaagtagtgcctacaaaattcagttcacaacgaacttctgtagatttaaaatcagtcccatttggaaagcaagaacggaaccaaaatgtggtttttcgcatggacgttgttgcacaacagaattgtaattacagacaaccttcaaaaaaggggatgacctttgatgaggacatcacttctatacatacaatgaatggaccgataacacgatctcgtgcacgatagctaaatctccaggtacgttctaccctagtcaattgtgtttcagagcttacgcttggggccatggatgttttgatgattaggtaccttggagagaaccagcaaggacttgggaaaggccaaggtgttgaggaggaggagcaagggcgtccacaacaggaaggagatcaagtttgagtcggctgcgactccatctcgagttccaggaccagtctgcactaaaatggac

SEQ ID NO: 75605 - DNA, 3579 bp, Zea Mays
aggcccacatggcagcctctgcactgcaggatctcatcccctccggctgcccgtgcccagccgtcgtggcgcgacggcggcggtcggtctggtagggctcccctcctttccaccagatcagaacagatagtcatagatcagtgtcacaccacgacccgccagccggaccgccacttgccaaccaacgcctttccctcctcctccgcctccgggcgctagcgggaatggacgccgccgagctgcccctcgtctaccacatcggtctggtgctggccgcgctctgggccgccgccgccgtcggcttccgcggctccctcctctacctcctcgccttcctctacctctacatggtaaatgctcgctgtgcagtgagactgcggaagaggatacaacatgaagagatgaaatctgcctaccaacgaaggctcctctctgatgcagaatcagcacgctggttaaaccatgcaatcgacaagatgtggcctgtctgtatggagaagatcgtttcaaaacttctacggcccatcataccatggttcttggataagttcaaaccttggacagtcagcaaagcaagtattcaggaactttacatgggcaggaatccaccaatctttacctccatgagagttctaccagagacatcagatgatgaccatttgctgcacaagagtgtgggacttggaatgactgcaaagatgcatttaacaagcatgcatgtcgagggaaagatattagttggtgtgaaatttgttcggagttggccatttcttggccgtgtaagactatgttttgtggagccaccttattttcagatggctgtgaaaccactcattaatcacgggctcgatgtcactgagtttccaggaatttcaggatggctggataagttgatggatactgcatttgggcagacattagttgagcccaatgtgatagtaataaatgtggaaaaatttgcatctactccttcagaaaataactggttcagcattgaggagagacctcctattgcatatgtgaagcttgagattctagaaggaactgacatgaagccatctgatataaatggtgaggatgaattgtgcagcttctgtgttactcttaattggtgtaacacaattgatgatccaatgcacaggactagcggacccatatgtgaaaggtcaccttggtcctttcaaattccaaacacagatacagaggaaaacattgtcccctaagtggtttgaagaatttaaaataccaatcacatcatgggaggcaacgaatgaacttgtcatggaagttcgtgataaggaccccatgtttgatgactcacttgggcaatgtaccattagtttacatgatctgagaggtggacaaagacatgacaaatggatatcactgaataatgtgaagaaaggaaggattcacttggcagtaacaattgatgatatatccgaggaccaaaatacatcaagtttggaccaatcattgaagcaagcggatactgaactaccagtatcaacatctgtttgtagcgaagtggatgctagtgaacctcctgaagaaaagaaagtcttaatggatgaagtggagcacataaacattgatggacaagaacagcctggaggtttatatgtacatcgccctggcactggggttccaaggacatgggaatcccggaaaggacgagcacgaaacccagacacacagattcaccaagaggttgacaagcaaaaggaagtcccaacaccaaaagggagtgggcaagggggtctatttaacgtaggctcctttttccggtggaactcgaggaaggggagctccagaaatctcgatgccagccctcctgcaactccgggttctcagagcgtgacagagcttgatccaaagctccctcaaactccacgtcccaacctgaaggagctaggcgagaagcggacgtcgataaagatcgtagtggacgaagaagcaagcccggcagacaaggtgggaggtgcggagaactcaggagaagatgtggcgaaggtgatagagaaaaatgcaggtgaaccgggcaggtcactgacaagcacattgagcaggaagatttgcagaaggagagcagatgataggctatcagatatccccgagaagattgaagctcgtggatctaagccggtgagtgaagggcctattcttgttagaggtgagccaatgataacagtggaccatccgacgacggaacatagcgatggaggtggcactgagcaagatgcggtgggagcaaaggttgctactcagacctcataaggattgcgacttaaggcaacagaagaaatgcaaagcccggcccagtaaaccatcatcgtctttcacggcccatcaaagaggcatccgcgttcgcacattgcagtagcttcccacacccccctccagagccggcacgttctctagactatatttcctatcttattcattttcttctatgggataatactcttgttaatatgagttatacataagcttgtcgctgcacaataatgtaatttatagggtcttattgctgaagtatccatcatcagtacatttatggatgtagtttttagctctgatctatatatcggttgataagataagaagttttctttgaaaaggaaataatccagaataatgtggcggggtcactgttcaattggtctacaacttgtttgccaaagaattggggggccttggtattctggatttagaacgttttgcaagagcgctatgactaagatggttgtggttgcgatggaaggtcaaagaaatagcccactggcatgcaattactatgtgacaagattgatgtggatctcttcaatacatccataattgtgaacattggcaatgggaagatggcaaatttctgggatcaagttggattgaaggacaggctctgaggaatattacaccaagtctatacaagaaagcaaggaggaagaacattacggtgttcaaagcacttcgaaacaattaccggatacagttttgttctcgttacaagcaggaggaggaagtgagagaattcgtctccatgtggcatgcaattagcaacacacaagacctaaatgatctagaagacaccatatcttagcgacggacgacaattgggcaatacaacacaagtagtgcctacaaaattcagttcacaacgaacttctgtagatttaaaatcagtcccatttggaaagcaagaacggaaccaaaatgtggtttttcgcatggacgttgttgcacaacagaattgtaattacagacaaccttcaaaaaaggggatgacctttgatgaggacatcacttctatacatacaatgaatggaccgataacacgatctcgtgcacgatagctaaatctccaggtacgttctaccctagtcaattgtgtttcagagcttacgcttggggccatggatgttttgatgattaggtaccttggagagaaccagcaaggacttgggaaaggccaaggtgttgaggaggaggagcaagggcgtccacaacaggaaggagatcaagtttgagtcggctgcgactccatctcgagttccaggaccagtctgcactaaaatggac

SEQ ID NO: 75606 - DNA, 3373 bp, Zea Mays
aggcccacatggcagcctctgcactgcaggatctcatcccctccggctgcccgtgcccagccgtcgtggcgcgacggcggcggtcggtctggtagggctcccctcctttccaccagatcagaacagatagtcatagatcagtgtcacaccacgacccgccagccggaccgccacttgccaaccaacgcctttccctcctcctccgcctccgggcgctagcgggaatggacgccgccgagctgcccctcgtctaccacatcggtctggtgctggccgcgctctgggccgccgccgccgtcggcttccgcggctccctcctctacctcctcgccttcctctacctctacatggtaaatgctcgctgtgcagtgagactgcggaagaggatacaacatgaagagatgaaatctgcctaccaacgaaggagcaaagcaagtattcaggaactttacatgggcaggaatccaccaatctttacctccatgagagttctaccagagacatcagatgatgaccatttgctgcacaagagtgtgggacttggaatgactgcaaagatgcatttaacaagcatgcatgtcgagggaaagatattagttggtgtgaaatttgttcggagttggccatttcttggccgtgtaagactatgttttgtggagccaccttattttcagatggctgtgaaaccactcattaatcacgggctcgatgtcactgagtttccaggaatttcaggatggctggataagttgatggatactgcatttgggcagacattagttgagcccaatgtgatagtaataaatgtggaaaaatttgcatctactccttcagaaaataactggttcagcattgaggagagacctcctattgcatatgtgaagcttgagattctagaaggaactgacatgaagccatctgatataaatggactagcggacccatatgtgaaaggtcaccttggtcctttcaaattccaaacacagatacagaggaaaacattgtcccctaagtggtttgaagaatttaaaataccaatcacatcatgggaggcaacgaatgaacttgtcatggaagttcgtgataaggaccccatgtttgatgactcacttgggcaatgtaccattagtttacatgatctgagaggtggacaaagacatgacaaatggatatcactgaataatgtgaagaaaggaaggattcacttggcagtaacaattgatgatatatccgaggaccaaaatacatcaagtttggaccaatcattgaagcaagcggatactgaactaccagtatcaacatctgtttgtagcgaagtggatgctagtgaacctcctgaagaaaagaaagtcttaatggatgaagtggagcacataaacattgatggacaagaacagcctggaggtttatatgtacatcgccctggcactggggttccaaggacatgggaatcccggaaaggacgagcacgaaacccagacacacagattcaccaagaggttgacaagcaaaaggaagtcccaacaccaaaagggagtgggcaagggggtctatttaacgtaggctcctttttccggtggaactcgaggaaggggagctccagaaatctcgatgccagccctcctgcaactccgggttctcagagcgtgacagagcttgatccaaagctccctcaaactccacgtcccaacctgaaggagctaggcgagaagcggacgtcgataaagatcgtagtggacgaagaagcaagcccggcagacaaggtgggaggtgcggagaactcaggagaagatgtggcgaaggtgatagagaaaaatgcaggtgaaccgggcaggtcactgacaagcacattgagcaggaagatttgcagaaggagagcagatgataggctatcagatatccccgagaagattgaagctcgtggatctaagccggtgagtgaagggcctattcttgttagaggtgagccaatgataacagtggaccatccgacgacggaacatagcgatggaggtggcactgagcaagatgcggtgggagcaaaggttgctactcagacctcataaggattgcgacttaagctcaggcaacagaagaaatgcaaagcccggcccagtaaaccatcatcgtctttcacggcccatcaaagaggcatccgcgttcgcacattgcagtagcttcccacacccccctccagagccggcacgttctctagactatatttcctatcttattcattttcttctatgggataatactcttgttaatatgagttatacataagcttgtcgctgcacaataatgtaatttatagggtcttattgctgaagtatccatcatcagtacatttatggatgtagtttttagctctgatctatatatcggttgataagataagaagttttctttgaaaaggaaataatccagaataatgtggcggggtcactgttcaattggtctacaacttgtttgccaaagaattggggggccttggtattctggatttagaacgttttgcaagagcgctatgactaagatggttgtggttgcgatggaaggtcaaagaaatagcccactggcatgcaattactatgtgacaagattgatgtggatctcttcaatacatccataattgtgaacattggcaatgggaagatggcaaatttctgggatcaagttggattgaaggacaggctctgaggaatattacaccaagtctatacaagaaagcaaggaggaagaacattacggtgttcaaagcacttcgaaacaattaccggatacagttttgttctcgttacaagcaggaggaggaagtgagagaattcgtctccatgtggcatgcaattagcaacacacaagacctaaatgatctagaagacaccatatcttagcgacggacgacaattgggcaatacaacacaagtagtgcctacaaaattcagttcacaacgaacttctgtagatttaaaatcagtcccatttggaaagcaagaacggaaccaaaatgtggtttttcgcatggacgttgttgcacaacagaattgtaattacagacaaccttcaaaaaaggggatgacctttgatgaggacatcacttctatacatacaatgaatggaccgataacacgatctcgtgcacgatagctaaatctccaggtacgttctaccctagtcaattgtgtttcagagcttacgcttggggccatggatgttttgatgattaggtaccttggagagaaccagcaaggacttgggaaaggccaaggtgttgaggaggaggagcaagggcgtccacaacaggaaggagatcaagtttgagtcggctgcgactccatctcgagttccaggaccagtctgcactaaaatggac

SEQ ID NO: 75607 - DNA, 3304 bp, Zea Mays
aggcccacatggcagcctctgcactgcaggatctcatcccctccggctgcccgtgcccagccgtcgtggcgcgacggcggcggtcggtctggtagggctcccctcctttccaccagatcagaacagatagtcatagatcagtgtcacaccacgacccgccagccggaccgccacttgccaaccaacgcctttccctcctcctccgcctccgggcgctagcgggaatggacgccgccgagctgcccctcgtctaccacatcggtctggtgctggccgcgctctgggccgccgccgccgtcggcttccgcggctccctcctctacctcctcgccttcctctacctctacatggtaaatgctcgctgtgcagtgagactgcggaagaggatacaacatgaagagatgaaatctgcctaccaacgaaggagcaaagcaagtattcaggaactttacatgggcaggaatccaccaatctttacctccatgagagttctaccagagacatcagatgatgaccatttgatattagttggtgtgaaatttgttcggagttggccatttcttggccgtgtaagactatgttttgtggagccaccttattttcagatggctgtgaaaccactcattaatcacgggctcgatgtcactgagtttccaggaatttcaggatggctggataagttgatggatactgcatttgggcagacattagttgagcccaatgtgatagtaataaatgtggaaaaatttgcatctactccttcagaaaataactggttcagcattgaggagagacctcctattgcatatgtgaagcttgagattctagaaggaactgacatgaagccatctgatataaatggactagcggacccatatgtgaaaggtcaccttggtcctttcaaattccaaacacagatacagaggaaaacattgtcccctaagtggtttgaagaatttaaaataccaatcacatcatgggaggcaacgaatgaacttgtcatggaagttcgtgataaggaccccatgtttgatgactcacttgggcaatgtaccattagtttacatgatctgagaggtggacaaagacatgacaaatggatatcactgaataatgtgaagaaaggaaggattcacttggcagtaacaattgatgatatatccgaggaccaaaatacatcaagtttggaccaatcattgaagcaagcggatactgaactaccagtatcaacatctgtttgtagcgaagtggatgctagtgaacctcctgaagaaaagaaagtcttaatggatgaagtggagcacataaacattgatggacaagaacagcctggaggtttatatgtacatcgccctggcactggggttccaaggacatgggaatcccggaaaggacgagcacgaaacccagacacacagattcaccaagaggttgacaagcaaaaggaagtcccaacaccaaaagggagtgggcaagggggtctatttaacgtaggctcctttttccggtggaactcgaggaaggggagctccagaaatctcgatgccagccctcctgcaactccgggttctcagagcgtgacagagcttgatccaaagctccctcaaactccacgtcccaacctgaaggagctaggcgagaagcggacgtcgataaagatcgtagtggacgaagaagcaagcccggcagacaaggtgggaggtgcggagaactcaggagaagatgtggcgaaggtgatagagaaaaatgcaggtgaaccgggcaggtcactgacaagcacattgagcaggaagatttgcagaaggagagcagatgataggctatcagatatccccgagaagattgaagctcgtggatctaagccggtgagtgaagggcctattcttgttagaggtgagccaatgataacagtggaccatccgacgacggaacatagcgatggaggtggcactgagcaagatgcggtgggagcaaaggttgctactcagacctcataaggattgcgacttaagctcaggcaacagaagaaatgcaaagcccggcccagtaaaccatcatcgtctttcacggcccatcaaagaggcatccgcgttcgcacattgcagtagcttcccacacccccctccagagccggcacgttctctagactatatttcctatcttattcattttcttctatgggataatactcttgttaatatgagttatacataagcttgtcgctgcacaataatgtaatttatagggtcttattgctgaagtatccatcatcagtacatttatggatgtagtttttagctctgatctatatatcggttgataagataagaagttttctttgaaaaggaaataatccagaataatgtggcggggtcactgttcaattggtctacaacttgtttgccaaagaattggggggccttggtattctggatttagaacgttttgcaagagcgctatgactaagatggttgtggttgcgatggaaggtcaaagaaatagcccactggcatgcaattactatgtgacaagattgatgtggatctcttcaatacatccataattgtgaacattggcaatgggaagatggcaaatttctgggatcaagttggattgaaggacaggctctgaggaatattacaccaagtctatacaagaaagcaaggaggaagaacattacggtgttcaaagcacttcgaaacaattaccggatacagttttgttctcgttacaagcaggaggaggaagtgagagaattcgtctccatgtggcatgcaattagcaacacacaagacctaaatgatctagaagacaccatatcttagcgacggacgacaattgggcaatacaacacaagtagtgcctacaaaattcagttcacaacgaacttctgtagatttaaaatcagtcccatttggaaagcaagaacggaaccaaaatgtggtttttcgcatggacgttgttgcacaacagaattgtaattacagacaaccttcaaaaaaggggatgacctttgatgaggacatcacttctatacatacaatgaatggaccgataacacgatctcgtgcacgatagctaaatctccaggtacgttctaccctagtcaattgtgtttcagagcttacgcttggggccatggatgttttgatgattaggtaccttggagagaaccagcaaggacttgggaaaggccaaggtgttgaggaggaggagcaagggcgtccacaacaggaaggagatcaagtttgagtcggctgcgactccatctcgagttccaggaccagtctgcactaaaatggac

SEQ ID NO: 75608 - DNA, 3577 bp, Zea Mays
aggcccacatggcagcctctgcactgcaggatctcatcccctccggctgcccgtgcccagccgtcgtggcgcgacggcggcggtcggtctggtagggctcccctcctttccaccagatcagaacagatagtcatagatcagtgtcacaccacgacccgccagccggaccgccacttgccaaccaacgcctttccctcctcctccgcctccgggcgctagcgggaatggacgccgccgagctgcccctcgtctaccacatcggtctggtgctggccgcgctctgggccgccgccgccgtcggcttccgcggctccctcctctacctcctcgccttcctctacctctacatggtaaatgctcgctgtgcagtgagactgcggaagaggatacaacatgaagagatgaaatctgcctaccaacgaaggctcctctctgatgcagaatcagcacgctggttaaaccatgcaatcgacaagatgtggcctgtctgtatggagaagatcgtttcaaaacttctacggcccatcataccatggttcttggataagttcaaaccttggacagtcagcaaagcaagtattcaggaactttacatgggcaggaatccaccaatctttacctccatgagagttctaccagagacatcagatgatgaccatttggttcttgagctgggattgaattttctttctgctgaagatatgagtgctgtacttgctatgcagctgcacaagagtgtgggacttggaatgactgcaaagatgcatttaacaagcatgcatgtcgagggaaagatattagttggtgtgaaatttgttcggagttggccatttcttggccgtgtaagactatgttttgtggagccaccttattttcagatggctgtgaaaccactcattaatcacgggctcgatgtcactgagtttccaggaatttcaggatggctggataagttgatggatactgcatttgggcagacattagttgagcccaatgtgatagtaataaatgtggaaaaatttgcatctactccttcagaaaataactggttcagcattgaggagagacctcctattgcatatgtgaagcttgagattctagaaggaactgacatgaagccatctgatataaatggactagcggacccatatgtgaaaggtcaccttggtcctttcaaattccaaacacagatacagaggaaaacattgtcccctaagtggtttgaagaatttaaaataccaatcacatcatgggaggcaacgaatgaacttgtcatggaagttcgtgataaggaccccatgtttgatgactcacttgggcaatgtaccattagtttacatgatctgagaggtggacaaagacatgacaaatggatatcactgaataatgtgaagaaaggaaggattcacttggcagtaacaattgatgatatatccgaggaccaaaatacatcaagtttggaccaatcattgaagcaagcggatactgaactaccagtatcaacatctgtttgtagcgaagtggatgctagtgaacctcctgaagaaaagaaagtcttaatggatgaagtggagcacataaacattgatggacaagaacagcctggaggtttatatgtacatcgccctggcactggggttccaaggacatgggaatcccggaaaggacgagcacgaaacccagacacacagattcaccaagaggttgacaagcaaaaggaagtcccaacaccaaaagggagtgggcaagggggtctatttaacgtaggctcctttttccggtggaactcgaggaaggggagctccagaaatctcgatgccagccctcctgcaactccgggttctcagagcgtgacagagcttgatccaaagctccctcaaactccacgtcccaacctgaaggagctaggcgagaagcggacgtcgataaagatcgtagtggacgaagaagcaagcccggcagacaaggtgggaggtgcggagaactcaggagaagatgtggcgaaggtgatagagaaaaatgcaggtgaaccgggcaggtcactgacaagcacattgagcaggaagatttgcagaaggagagcagatgataggctatcagatatccccgagaagattgaagctcgtggatctaagccggtgagtgaagggcctattcttgttagaggtgagccaatgataacagtggaccatccgacgacggaacatagcgatggaggtggcactgagcaagatgcggtgggagcaaaggttgctactcagacctcataaggattgcgacttaagctcaggcaacagaagaaatgcaaagcccggcccagtaaaccatcatcgtctttcacggcccatcaaagaggcatccgcgttcgcacattgcagtagcttcccacacccccctccagagccggcacgttctctagactatatttcctatcttattcattttcttctatgggataatactcttgttaatatgagttatacataagcttgtcgctgcacaataatgtaatttatagggtcttattgctgaagtatccatcatcagtacatttatggatgtagtttttagctctgatctatatatcggttgataagataagaagttttctttgaaaaggaaataatccagaataatgtggcggggtcactgttcaattggtctacaacttgtttgccaaagaattggggggccttggtattctggatttagaacgttttgcaagagcgctatgactaagatggttgtggttgcgatggaaggtcaaagaaatagcccactggcatgcaattactatgtgacaagattgatgtggatctcttcaatacatccataattgtgaacattggcaatgggaagatggcaaatttctgggatcaagttggattgaaggacaggctctgaggaatattacaccaagtctatacaagaaagcaaggaggaagaacattacggtgttcaaagcacttcgaaacaattaccggatacagttttgttctcgttacaagcaggaggaggaagtgagagaattcgtctccatgtggcatgcaattagcaacacacaagacctaaatgatctagaagacaccatatcttagcgacggacgacaattgggcaatacaacacaagtagtgcctacaaaattcagttcacaacgaacttctgtagatttaaaatcagtcccatttggaaagcaagaacggaaccaaaatgtggtttttcgcatggacgttgttgcacaacagaattgtaattacagacaaccttcaaaaaaggggatgacctttgatgaggacatcacttctatacatacaatgaatggaccgataacacgatctcgtgcacgatagctaaatctccaggtacgttctaccctagtcaattgtgtttcagagcttacgcttggggccatggatgttttgatgattaggtaccttggagagaaccagcaaggacttgggaaaggccaaggtgttgaggaggaggagcaagggcgtccacaacaggaaggagatcaagtttgagtcggctgcgactccatctcgagttccaggaccagtctgcactaaaatggac

SEQ ID NO: 75609 - DNA, 865 bp, Zea Mays
ttataagttgtcagagttgtcattgagtgtgatttgctcaacatgccagctgtttcacagcttgagaaggacgaaaagtatcagttggtgtatgaactactaaagatattccttactaagaagcttgattcctacttggagtttcaaagtgcaaactctgacttgctgaaagattatggtctcgtccatgacgaatgtgtaaccaaaatgcgcctcatgtctttgcttgatctgagcagccgatgctctggtgaaatcccttattctgcaatcactgttgaactcaggatcaatgatgacgaggtggagcaatggattgtgaaggcaattgcatccaagatattggattgcaaggttgaccagcttaaccagactgtcattgtcagtcggcacacagagaggatctttgggatggaacattggcatgctctgcgcacaaagctcggagcttggaggggaaacattgccagagctatcaacacaatacaagctaacaaagtcaccgaagagggggcacaagggatgcaaggcttggcgatccactgattcagggcagatcagcgggttcgtgaattgagattatagcgtgggagattagaagggcaacctttttttgtataagacaagctgtaatggtttatttacttagatcccgtaaccatgcctggttattccttgtatttggtcagacacgccgcgcattacacatcccaagtttttaccctcgacgtggtctgtcctgataaatttccttccctgatatttttttgccctttccaagctttgatcagtcatgtgtgttccattggagcatctgatgttatccttctattatgttcactcaagatggttgggcttgtacatc

SEQ ID NO: 75610 - DNA, 928 bp, Zea Mays
ggagctgtttggggataagatccaggaagatatatgctcccaccaattccgaacttagggcttgattggatcccaaacagagctaaaaattagcccactttacgaaaataaattcaacatgagctaattcggggctaataagggctgacagactctaaccactaaattagctaccattagttcttattagtccacgtttagcctttctaattggtattcaaaaatatgcgccaagtcgccaactgttagcccccgtatatccaaaaaggtccttatattatcacggatgccattatatcctaatcagccaggtacataagttggttcatttttttcatggatcataatttggcacatgtaggctccttcgctgtgctagtgccacagtgacgcggtactgtttatgtgcccaaggattgtattgactcttaacaacagtctccttcctaataatctactccctctgtcccaatatattgttcattttagctctttacttttgtgtccatattcaaatagatgacaatgaatctagacacatatataatacacatacatcaaatattgtatgaatccattaacaccctaaaacaaatactattttgggacggagggagtactaactagtaactacatagatagaagtacaagaacaatagataggatactggttgacttaaaccttatgctcgtaatctaattactgtacttattaagaaaaataaaaattccaaaccctacctaaccctaatgcagtaagtactgttaaagtgccggtgtcactgcctgcttatgagctacccaaatagctaagcagccagaaaattgccataatcactgtcaacatttcagccgatgttcctctttgataagtccatgggatagaatataagcagtcaaaaaacaaagatacggatttaagttcaag

SEQ ID NO: 75611 - DNA, 1925 bp, Zea Mays
catcaaggtcctcgtcgtcactctcaacgtcctgcagcatatatagaagcaaatacatctaagaatacaatcagagaggctaactacaaggacaataagccaaacatgttccatctcgttcaggtgggtaaggcttgcctgttggctgaaccgtttacgttcagtacaatttggctcagtgtcaatgtggtagtttttcttgcactgaacaacaacaacaacaacaaagtcttttagtcacaggcaagttcacgtacgctggagttaaaacccactagtcaagggtcagccacatggatagttgtttttcatgtacccctattcaatgctaaatctttgagtatatttcaacctttcaagtctctttttcctaacatgtcaacttcggtcttactctcttcccattgcgatcgtgccttagtatcccactacgcactggtgactttgtgtgtctctgaaggtttacgttggacatgtccaaatcatctcaaccgatgttgtacaagcttttattcaattggtgctacccctagcctttaacgtatatcattgttccagactagatcccttcttgtatggccataaatccaatgcaccatacgcagtttcacaacacttatcttatgaacatgtcgtctttttgtaagcaacattctacaccatacaacatagcaggtctaatcgtcatcttataaaacttgtcttttagcttttgtggtaccctcttgtcatataaaatgttggatgtttgatgtcacttcatccatcctactttgattatatggctaacatcttcatcaatattcatgtctctctgtagcattaatcataaatacctattcctaggtaatacttgaccttgcaaactatcatctccttcctcatgtgtagtagtgacgaaatcagatctcatatattcagttttagttctactgagtctaaaacctttgagctctagagtctcccaccacaactctagtttgttatttattcctacccgactttcatcaactagcactacatcgtcggcaaaaaagcatacatcaagggatatccctctgtatgcaccttgccatcaccaaggcaaaaaggtaagaactaagaactcaaagatgatcattgatgcagtcctattctaatcaggaagtcgtatcattgttgtacaagtccttaatgagtccaacgtacttctttggaactttatgtttgtccaaagtagtaaagtacatcacataatattccttgtatttcgtcataagacttctccaaatcaacgaaaatcatgtgtaggtccttttgctccctatattgctccatcacttgcttattaagaaaatggtttcgaggcgtgaaaccaaactggttcaaggagatccttgttattcctctcaaccaatgctcgataactctctctcatagcttcgcttatcaacttaatttttcggtaattagtacaactttaaatgtctcccttattcttgtaaatcggtaccactatacttcactcgccaggcatcttgttcggtcggaagattggttgaccaacttggttaaccatactatagctatatccccgaggtatccccatacctcaattaggatagcattagggatcatcttgtcaggcatcctttgattgccatattggccacaggaaataagtgcatctgttaccgatgccaatggaacggcataatgcacacgtaaacctacctagcgttgcatgcccttactcccagggttccacgccaactgtcaactaaccagtacgtataggttaaacagcaacgaacagtctggaggtataagaatatttcactggtgcattccacaaccaaatcacaaggcatacagagaaggtgggggaaacagacctcctgaagggcggcgcggacagcatcctcgacgtcctcctcctccttggc

SEQ ID NO: 75612 - DNA, 391 bp, Zea Mays
acgcagcctgcagtgcctgagctaccaagaatttcagagcaaggtcaccagaatgccttacaaaagacgacttcgacattggagggtctcattgcggacgattcacaccaccagccctcctctgcccacagcgaagatggagctgctaataatgggtctagggatatcagtggggattcttcatctgttgatttgaaaagcccagtcccactagggacacatgcagatgtcatggaagacgaaggatggatcacaattccatgcaaggcatttcctgaaagttggaacgacatatcagaaatggttcagttgcaagctctggaccgttccttcctttttccaggcgagcaggttcctatactggcgtgcctgtcagcttctaagcaagatg

SEQ ID NO: 75613 - DNA, 364 bp, Zea Mays
accttgaagccctggaggcgtcaagcgtcggtggcggaccagagtgggcgacaagcctccttgtgccggtggcgtcagcaggggcgaccgcggcaaagcgcttagtgtctcacagacggatcggggaaaaaagatgagagagtcgccgagcggcgagaaggtccgagccacggatcggccccaaattgagcagaggaatcgaatccgaggacgggggagcgccgatctgtgccaaaagccccttgcctgggcgatccaatgcgggcgaattaggatttcgtcggtgccacgggaacctagggtttgctcttctcgagctttttttcctcttttttccgtggcttgttttccgttttgtttgttt

SEQ ID NO: 75614 - DNA, 1492 bp, Zea Mays
atccactcttcatcatcgctgtccatgtcatataacacacgggattgatcaagagcaatttcaacatctgttccgatgtgaacaagataagcttcagattgcacaaaggataccacatcattatcatcatggatttcaaccaaatggacaccagggattggaatgtttctcacagaagcagctctgatgttatggctatagcactcatcgtgcatttgcttgaaaatcaaccactggcttctgtcaggaaattccaggcaccattcagcaccacctttccacatcatggcatgtgtatagcggtttgtggccccaggctgcaaaacttgacagaccttgtgagcatacttggtcccttcagcaagtttcacgcatatcctcctttcactctgaccatcggaatccattgtgatctgggtatcatactccctccaacctctatcacccactgtaacaagaacatttgcaacgcaagtcaatgactccgggctgctatgcccacttctagaactatcaggaagtttctttgcatcatttatctttgcactaacatgagattgtatcttgcggaaatgacctttgttttttatgccaagttcctcacttttaggagaaactgagtatgaaacttgacttcgtggtttcttagaaccaccagcaaagccagtcaacacgtggtcttctggcagtaattttgaaccatctccaaaagcacgtgatatagatgtaaaccggttcctatgggaagtagttctaggggcagtaggtgtaacacagccaattggatgttcattcaattcctgaaccaagttagatataggttgcttttctttttcatcgttgtcaagaggtttatcatttgctttgtcaatatttatggaaagacgactctctgcagacttctgtgaagagcaaataacactaaggttggaggaaaatgacttgtcaggaccagcacaaggcccattttgatcttcacacttcctgtgaattatatttgcatcaccaatactgctgccattacattctgtgcttacattcctttcagcaatattggattccctactagcagagctagatggatttgcacaactagcagaagccatatccaatggactatcaggtgatgaaccgagattaagtgaacaaacttgaggtggagcatgaaaaactgtgtcagatgcatgttctgttaccaactgctgctgatcctcatccaaagtacatgacatggattgctgagaaccattagtcaaattgctttctgttaacatttttttatggtgccaaggcagtagtgaaggtgcagttgtcatgtccagaacactttgagtaaatctacaatgttcatccaaacaacaaatgataggttcgcgatctgaataattagactctggaagaaagtcctgaacatcaaaaccctgtttaacagaaatatttaaacaatgatcagttgattttatacaaaaatagagttctagcacaatgtttt

SEQ ID NO: 75615 - DNA, 1389 bp, Zea Mays
acgcgacctgcgcagcgtgcagcagcacaacttggcccagcgactggaagagacaaggcaagaatcatgtctttctgcaacacatggacgtgcattttccttataaattcaattggtgccgtacgacgttctgggcccaacttcttttttgtggagacttcaaatgggcaaagagcgatacatgtggcccgaactccgtgttcgtgtcttcattcacatcacagcattgtcttagcttatggtagagtagatgaaccagaggagccacatgtcagcttcagaaggcactaacatcctgtactatactgtgtgcctttcattcatctctcccaaaggcccaaacgaagccagtctatggggtgactcaaccatgagacaacatagccgctattcagacaaaacgctagattgtaccaacagatagctgaacctacaccctggcccattcttcaccgggcaaaaagattaaccgggaggtctaaaaagggcaaaaaggaaggggaaaaaaatactatgtacaggacactggagattcaaaggagaaaacaaaaggggaaatgatgctatctactgactcgaccaaatggcactcctaccatcaggaaacgatgagtcgagatcaagctgtatgcatgcatgcgccaagggctcacggcaaaaggcccaaaaaaataggggagtcagcgctcctcgttcctcgaatcccttcggccgtcccgggtcgtgtccctgccagatgatttgatcgcgtcggcaatcatgagggctaccgtggccctgtggagggcgaggtcagccttctgcatcaggcagtgggccttctccctcttgagcctcgccatggcggcggcgtgctgcgctgcgcccgcggcgtcccgcagcttcagctcctcgacgtcgacgcgggaggagcccgggaagaggtgcttcgagttctgccagtcgtggatagcagcgttccagtggtcgtgcgcgctccgtttcgctctctgggggcggcaggaaggtgatggctggtggtcgtcggagaaagcaagggctgcgctccttttggtgctactgttgttcctggaaaatcttggtgtggagcttcgttctgaggactcgaatgcccgaggagaatctgttcttgtagagaacctgggagagtaccctgttggggagtaaagagaaccagtgtcatacgattcgcttatcctcccatccccagtgcattcattgtatctcctgcctgatactggacaagaggaagatacatcagcaaacaggaataggcaaaggagtcattagagcatctccaagtacttaaaacaactccctaatttgtttttcacaaaaaggaaagaacagccctccaacagttttgcatctgaattctctaaagataag

SEQ ID NO: 75616 - DNA, 742 bp, Zea Mays
cttgttcggcgcgcggccatgcatggcggcggtcctgctatggatgatgatcgcgcccgtcatctggaagacgaggcaggtgggatcggcggcggagacgtgagcagtttttccgctgattctgagtttctgacagccggaatctatatatacatacaaacacaagagcaaatcaaagggacgggaaacgggaagaggtggtgcgtgctaactcctatgcatcgcattcctggatgttcattggtcaatgatgatgctgcactgctgcagctcgggtagtttttgctaagctggaggtgcagcagacaagacaacaagaaagaggaggcaactaaggagtagtactatactgatgccactagtccatcgtggagctcggttcaggaagctcatcgatctcgttgtacttgtaccgaactatctcaaaaaacatagtgcctgtttgtctggattgctgctcggccacaagcacagctgtctggcccggggcaccatccaaacaatcccatatagagcgtgtttggacgcagtcatgcgcttgggttttgcttttgcctgtctgtgcccggcagattcatgggcctgtaagcaaacacgtcccaattatctgaactcggaattatttacgcctcggcaagattcatcaactcaatttttttgtgaacaatcttattgtgttactaggtgaatgcccgtgcgttgctacggagtaaacatattatgataagatatattgaaattc

SEQ ID NO: 75617 - DNA, 1596 bp, Zea Mays
gcagggctgaaggtctgccagggcgcgctctactgcctgggcgcggagggcgtgctgcgggtcagcctcggctgcttcgtcttcttcttcgtcatgttcctgtccaccgtgaaggccaggaaggtgcacgactgccgcaactcgtggcactccgagtggtggccggccaagctcgccctctggctcggcctcaccgccgtcaccttcctcgcgccgtcgccgctcgtccagctctacggtggcgcatttcggagcaggggctttcctggtgatccagctgatcagcgtcaccaggttcatcatgtggctcaacgactggtgccgcgcagagatgacccagaagagataccacttgcagattcaggcggtgtccatcgtcacgtacgtggggtcgctcctggggatcgtgctcatgtacgtgtggtacgcgcccagcccggcctgcaggctcaacatcctcttcatcaccgtcacgctggcgctcgtgcagctcatgaccttcgtctccatgagctccaaggtgaaggcagggtacgtggcgccggggctgatggggatctacgtcgtgttcctgtgctggtcggcgatcagaagcgagccgcacacggaggtttgcaacaggaaggcagaagtcgccacgagcgcagactgggtgaacatcgcgagctttgtgatcgccgtcgtcgtcatcgtggcggcgaccttctcgacggggatcgactccaagtgcctccagttcaagcaggcggagggggagtcggaggaggaggaggaggacgacatcccctacggcctcggcttcttccacctggtgttctccatgggcgccatgtacttcgccatgatcttcgtcggctggaacgcgaacgcgagccacaccatggagaggtggacgatcgacgtcgggtgggcgagcacgtgggtgcgcgtcggcaacgagtggctggcggcaatcgtgtacatatggatgatgatcgcgcccgtcatctggaagacgaggcaggtgggatcggcggcggagacgtgagcagtttttccgctgattctgagtttctgacagccggaatctatatatacatacaaacacaagagcaaatcaaagggacgggaaacgggaagaggtgctcgggtagtttttgctaagctggaggtgcagcagacaagacaacaagaaagaggaggcaactaaggagtagtactatactgatgccactagtccatcgtggagctcggttcaggaagctcatcgatctcgttgtacttgtaccgaactatctcaaaaaacatagtgcctgtttgtctggattgctgctcggccacaagcacagctgtctggcccggggcaccatccaaacaatcccatatagagcgtgtttggacgcagtcatgcgcttgggttttgcttttgcctgtctgtgcccggcagattcatgggcctgtaagcaaacacgtcccaattatctgaactcggaattatttacgcctcggcaagattcatcaactcaatttttttgtgaacaatcttattgtgttactaggtgaatgcccgtgcgttgctacggagtaaacatattatgataagatatattgaaattc

SEQ ID NO: 75618 - DNA, 1931 bp, Zea Mays
gcaatgtgatgtgatgtcagtcgagcgagacgaaaaagaagggagctgtgctaaaatttcttggaggggagggggtagagatgacgtttggtagcgccgacatggaggccggcggcggcggcgagcgccgccacggacaacaggaggaacagtcatccgacgagcggcgcgcgcggttcgcggaggactggggctgctgcgcctgcgcctgcgcggggctattcctggggcccaacccgatggtggcgcgctacatgtacgcgctcatcttcctcgtcaccaacctcctcgcctggacgctccgcgactacggcgactccgcgctcgccgagctgcagcggctgaaggtctgccagggcgcgctctactgcctgggcgcggagggcgtgctgcgggtcagcctcggctgcttcgtcttcttcttcgtcatgttcctgtccaccgtgaaggccaggaaggtgcacgactgccgcaactcgtggcactccgagtggtggccggccaagctcgccctctggctcggcctcaccgccgtcaccttcctcgcgccgtcgccgctcgtccagctctacggtggcgcatttcggagcaggggctttcctggtgatccagctgatcagcgtcaccaggttcatcatgtggctcaacgactggtgccgcgcagagatgacccagaagagataccacttgcagattcaggcggtgtccatcgtcacgtacgtggggtcgctcctggggatcgtgctcatgtacgtgtggtacgcgcccagcccggcctgcaggctcaacatcctcttcatcaccgtcacgctggcgctcgtgcagctcatgaccttcgtctccatgagctccaaggtgaaggcagggtacgtggcgccggggctgatggggatctacgtcgtgttcctgtgctggtcggcgatcagaagcgagccgcacacggaggtttgcaacaggaaggcagaagtcgccacgagcgcagactgggtgaacatcgcgagctttgtgatcgccgtcgtcgtcatcgtggcggcgaccttctcgacggggatcgactccaagtgcctccagttcaagcaggcggagggggagtcggaggaggaggaggaggacgacatcccctacggcctcggcttcttccacctggtgttctccatgggcgccatgtacttcgccatgatcttcgtcggctggaacgcgaacgcgagccacaccatggagaggtggacgatcgacgtcgggtgggcgagcacgtgggtgcgcgtcggcaacgagtggctggcggcaatcgtgtacatatggatgatgatcgcgcccgtcatctggaagacgaggcaggtgggatcggcggcggagacgtgagcagtttttccgctgattctgagtttctgacagccggaatctatatatacatacaaacacaagagcaaatcaaagggacgggaaacgggaagaggtgctcgggtagtttttgctaagctggaggtgcagcagacaagacaacaagaaagaggaggcaactaaggagtagtactatactgatgccactagtccatcgtggagctcggttcaggaagctcatcgatctcgttgtacttgtaccgaactatctcaaaaaacatagtgcctgtttgtctggattgctgctcggccacaagcacagctgtctggcccggggcaccatccaaacaatcccatatagagcgtgtttggacgcagtcatgcgcttgggttttgcttttgcctgtctgtgcccggcagattcatgggcctgtaagcaaacacgtcccaattatctgaactcggaattatttacgcctcggcaagattcatcaactcaatttttttgtgaacaatcttattgtgttactaggtgaatgcccgtgcgttgctacggagtaaacatattatgataagatatattgaaattc

SEQ ID NO: 75619 - DNA, 2015 bp, Zea Mays
cgcgatgttggtggatgctttggcgtaaaggaaaggaacacgtcgtttccgaccgccagcgacgaggatgagctaggatgcaatgtgatgtgatgtcagtcgagcgagacgaaaaagaagggagctgtgctaaaatttcttggaggggagggggtagagatgacgtttggtagcgccgacatggaggccggcggcggcggcgagcgccgccacggacaacaggaggaacagtcatccgacgagcggcgcgcgcggttcgcggaggactggggctgctgcgcctgcgcctgcgcggggctattcctggggcccaacccgatggtggcgcgctacatgtacgcgctcatcttcctcgtcaccaacctcctcgcctggacgctccgcgactacggcgactccgcgctcgccgagctgcagcggctgaaggtctgccagggcgcgctctactgcctgggcgcggagggcgtgctgcgggtcagcctcggctgcttcgtcttcttcttcgtcatgttcctgtccaccgtgaaggccaggaaggtgcacgactgccgcaactcgtggcactccgagtggtggccggccaagctcgccctctggctcggcctcaccgccgtcaccttcctcgcgccgtcgccgctcgtccagctctacgggaaggtggcgcatttcggagcaggggctttcctggtgatccagctgatcagcgtcaccaggttcatcatgtggctcaacgactggtgccgcgcagagatgacccagaagagataccacttgcagattcaggcggtgtccatcgtcacgtacgtggggtcgctcctggggatcgtgctcatgtacgtgtggtacgcgcccagcccggcctgcaggctcaacatcctcttcatcaccgtcacgctggcgctcgtgcagctcatgaccttcgtctccatgagctccaaggtgaaggcagggtacgtggcgccggggctgatggggatctacgtcgtgttcctgtgctggtcggcgatcagaagcgagccgcacacggaggtttgcaacaggaaggcagaagtcgccacgagcgcagactgggtgaacatcgcgagctttgtgatcgccgtcgtcgtcatcgtggcggcgaccttctcgacggggatcgactccaagtgcctccagttcaagcaggcggagggggagtcggaggaggaggaggaggacgacatcccctacggcctcggcttcttccacctggtgttctccatgggcgccatgtacttcgccatgatcttcgtcggctggaacgcgaacgcgagccacaccatggagaggtggacgatcgacgtcgggtgggcgagcacgtgggtgcgcgtcggcaacgagtggctggcggcaatcgtgtacatatggatgatgatcgcgcccgtcatctggaagacgaggcaggtgggatcggcggcggagacgtgagcagtttttccgctgattctgagtttctgacagccggaatctatatatacatacaaacacaagagcaaatcaaagggacgggaaacgggaagaggtgctcgggtagtttttgctaagctggaggtgcagcagacaagacaacaagaaagaggaggcaactaaggagtagtactatactgatgccactagtccatcgtggagctcggttcaggaagctcatcgatctcgttgtacttgtaccgaactatctcaaaaaacatagtgcctgtttgtctggattgctgctcggccacaagcacagctgtctggcccggggcaccatccaaacaatcccatatagagcgtgtttggacgcagtcatgcgcttgggttttgcttttgcctgtctgtgcccggcagattcatgggcctgtaagcaaacacgtcccaattatctgaactcggaattatttacgcctcggcaagattcatcaactcaatttttttgtgaacaatcttattgtgttactaggtgaatgcccgtgcgttgctacggagtaaacatattatgataagatatattgaaattc

SEQ ID NO: 75620 - DNA, 1157 bp, Zea Mays
cacgtgcctcgtgctttttggccatctataggccagtgtgatttcactgcaactgtgttccctcgctctcctccctcctccctcttcacctcagcacgggctctcttccctccgcttcctcccgtctcctctcctctctcgcacaatgccattgcgcggtgcgtgagagggagtcagacacacagacgaggaggaagagggggtagccagccagccaaaggcgaaagcgagaagaagaagaaaaaagcggcgagaaggcattctgcagcgccgactgccgggaccaggagatgcagctggaggaagaggaagccgagaacagcacgagcggcgcgtccccgctgtcctcctgctcctcctcctcctccttccacgacgacgacatcttcatggccggcatggtggtcgcgacgtgatctccacccggccggccggccggcgcaccgcgggcgttcccccctctctccccacttctccttgcacggcaacgccaacggggcaggcgatcgtagccgatcgttcactcacccaacccaccggtgcacgtcgccgccgtcagtctgttccttcggtgcagcaaactgtacgtgacggaggagccgagaagaaacggcgctgtgctctgctgctctgctcatggtgggtggggcattgtcgctactcgctagtcctggtaatccgcagagatctgcggggttttttttatcagaaagagagggagagagagaggatgcctcgtcggcctcgcctgtgtgcctgagcctgccactgtagttttgatccaaaggctgccggctggccggccagtggtgcgccccccatcattcctttcctagctcgcttttcttctcgctttcttcctactcgtagcagcagtgactgtctctatccgtgtgtgcgcatcgcattgccatgccacacccccctagcggctagcgtctccgagataatgacatcgagctgctttgagtcatttccgttgctcttttgatctttttttccctctgtgcagccagccgacctggagtgaactgaaagggacatacagagagagcacatgcaatgatcccatgcatggtggttttgagggcacttgatttccactcgagaccaactgaatgactccgcacagtaaataaaaacataaagagttgcag

SEQ ID NO: 75621 - DNA, 2775 bp, Zea Mays
gcctgtggtacggtggaagccttgatcaatgttgcagttgtgtctcaattgggtgatggacaggatatcctcttttggaaggatcggtggctgaatggtagaagcatcagtgaggtggcacctgaggttcttgagcatgtatctaagtgtgttgtttccaaaaggctggtaaaagatgctctaacaaatctgaattgggtggctgatataaggggtgcactttcagttagggcgcttgcacaggttttggatctctgtgacttgctggagggcttagttcttcaacctgggattcctgataagcattcttggaagttcagcgcgtcgggggattactcctctagttctgcctaccaggttcttctccttggagctgttgagtttaggccggctgaacggagtgctctgtccctctgcaggggatggctgctttgactcttggtgggagaagagtgccgaggtggtgggcaagcctttgtcggatggtttcaactcgctgaaattgcaggaatgccctttgggaacatacaaaaatgttactggatcttctaaatctttatgctttccatgccctccgggtgaactccctcatcgtgctatatacacaaatgttcgaggaggtgctgctgaaactccatgtccatacagatgcgtgtctgacagatatcgcatgcctcactgttatacagctctggaggagttaatatatacttttgggggaccttggctatttggtctatttctttcaggcctccttatcttgttagctcttgttttaagtgttgctcgtatgaagtttgttggcactgatgagttacctgggccggcaccaactcatcaagggtcccaaattgatcattcctttcccttcctagaatcactaaatgaggtcattgaaactaatagggctgaagagtcacaaggtcatgtacacaggatgtatttcatgggtcccaacaccttcagtgaaccttggcatctcccacacagtccgccagaacaaataacagagatcgtatatgaagatgcatttaatagatttgtcgatgagataaacacccttgcagcttatcaatggtgggaaggatctatttacagtatcctctgtatacttgcctaccccctggcttggtcatggcagcagtggcgtaggagaaagaaattacagagacttcgtgaatttgttcgctctgaatatgatcattcatgcttaaagtcttgccgttcacgtgcactctacgaaggcctcaaggtgactgcaaccccagatctaatgctagggtatttagatttcttccttgggggagatgaaaaaaggcctgatcttccacctcgtcttcgtcaaaggtttccaatgtccctgatctttggaggtgatggaagttacatggctccgttttcacttaatagtgacagtgtgcttactagtcttatgagccaggctgttccctcatggatatggcaccgtcttgtagctggattgaatgcacagctgcgtttggtccgtggtggaaatctgaaagtaacgtttcttccggtcatcaactggcttgaatctcatgcaaatccctctttagctgagaatggtatccgtgttgatcttgcctggttccaagctacagcattagggtactgccaacttggtcttcttgtttatgctgttgaaggagaagctgcacttaccgaacctgatggaagccctagagtaaaaatagagcaacacacacccacacagaacatgctcgctgatactcaactaagtcagtccaggattaaggatgctctaatgcgcaaaaggatcactggtggagttctcaatagtaatagcttaaggacactaaaagacaggagagatttgttttacccattttctcatatcttgcacaattcgaaaccagttgggcatcaggatcttgttggtttggtaatctcaatactgcttcttgcagatttcagcttagttttgcttacttttctccagctgtattcatattctatggtcgatgttctcttggttttgtttattctaccgcttgggattttgtcgccttttcctgccggtataaatgctctatttagtcatggaccgaggcggtcagcaggccttgctcgtgtgtatgcattgtggaacataacttcactggtcaatgttgttgtggctttcatatgtggttttgtacattataagttatcaaccaaaacacacccgagcgtgcagccctggaacctgggaacggatgaaagcggttggtggctcttcccaaccggactcatgctgttgaaatgcattcaagcaaggcttgttgattggcacgttgctaatttagagattcaagaccgtgcgatgggtaaaacaattatattattaacatgttccatggtcttcgctgacagcaaggctggtaaagctgtgagaaatcggtgtggtctgggtgatgtgccgtttgcagctttgcaattcatcgagggatgcaaaaaccttctgacatatctgacgctgtgtcacttgcagacctgtagtggtggatggatggctaagtgggtcacctaaacaaaaccgggtgctatgtactcggcagagaatgtcctcgacgatggatggacaactttaggggctgtttggaactggttttaagtctaaaaccaccgtaaattacggatctgtaaaattttacaatcctagatccaagttgtctgctttgatggacggtaacatgtgtggtttgacaacagtattatgtcttccgaaccggaaaataaaaattttgcccgtcg

SEQ ID NO: 75622 - DNA, 3193 bp, Zea Mays
gtggcgcttcgagctaggtggccttggctccagagaaccgatcactctaagccttggtcggttctccctgttcaggcctgtggtacggtggaagccttgatcaatgttgcagttgtgtctcaattgggtgatggacaggatatcctcttttggaaggatcggtggctgaatggtagaagcatcagtgaggtggcacctgaggttcttgagcatgtatctaagtgtgttgtttccaaaaggctggtaaaagatgctctaacaaatctgaattgggtggctgatataaggggtgcactttcagttagggcgcttgcacaggttttggatctctgtgacttgctggagggcttagttcttcaacctgggattcctgataagcattcttggaagttcagcgcgtcgggggattactcctctagttctgcctaccaggttcttctccttggagctgttgagtttaggccggctgaacggagtgctctgtccctctgcaggggatggctgctttgactcttggtgggagaagagtgccgaggtggtgggcaagcctttgtcggatggtttcaactcgctgaaattgcaggaatgccctttgggaacatacaaaaatgttactggatcttctaaatctttatgctttccatgccctccgggtgaactccctcatcgtgctatatacacaaatgttcgaggaggtgctgctgaaactccatgtccatacagatgcgtgtctgacagatatcgcatgcctcactgttatacagctctggaggagttaatatatacttttgggggaccttggctatttggtctatttctttcaggcctccttatcttgttagctcttgttttaagtgttgctcgtatgaagtttgttggcactgatgagttacctgggccggcaccaactcatcaagggtcccaaattgatcattcctttcccttcctagaatcactaaatgaggtcattgaaactaatagggctgaagagtcacaaggtcatgtacacaggatgtatttcatgggtcccaacaccttcagtgaaccttggcatctcccacacagtccgccagaacaaataacagagatcgtatatgaagatgcatttaatagatttgtcgatgagataaacacccttgcagcttatcaatggtgggaaggatctatttacagtatcctctgtatacttgcctaccccctggcttggtcatggcagcagtggcgtaggagaaagaaattacagagacttcgtgaatttgttcgctctgaatatgatcattcatgcttaaagtcttgccgttcacgtgcactctacgaaggcctcaaggtgactgcaaccccagatctaatgctagggtatttagatttcttccttgggggagatgaaaaaaggcctgatcttccacctcgtcttcgtcaaaggtttccaatgtccctgatctttggaggtgatggaagttacatggctccgttttcacttaatagtgacagtgtgcttactagtcttatgagccaggctgttccctcatggatatggcaccgtcttgtagctggattgaatgcacagctgcgtttggtccgtggtggaaatctgaaacattagggtactgccaacttggtcttcttgtttatgctgttgaaggagaagctgcacttaccgaacctgatggaagccctagagtaaaaatagagcaacacacacccacacagaacatgctcgctgatactcaactaagtcagtccaggattaaggatgctctaatgcgcaaaaggatcactggtggagttctcaatagtaatagcttaaggacactaaaagacaggagagatttgttttacccattttctcatatcttgcacaattcgaaaccagttgggcatcaggatcttgttggtttggtaatctcaatactgcttcttgcagatttcagcttagttttgcttacttttctccagctgtattcatattctatggtcgatgttctcttggttttgtttattctaccgcttgggattttgtcgccttttcctgccggtataaatgctctatttagtcatggaccgaggcggtcagcaggccttgctcgtgtgtatgcattgtggaacataacttcactggtcaatgttgttgtggctttcatatgtggttttgtacattataagttatcaaccaaaacacacccgagcgtgcagccctggaacctgggaacggatgaaagcggttggtggctcttcccaaccggactcatgctgttgaaatgcattcaagcaaggcttgttgattggcacgttgctaatttagagattcaagaccgtgcggtatatagcaatgacccaaacatattttggcagtcatgacccctgttgtaactgagggtccttctgggaagctttttacaactcgattttttgggagttgataaaaggaagagtgcgggcaaaggcctttctttattgaccaggcaaaagaaggaactacagaggttatatagatgcgtacttccgcatcccccgctgatcatgtgcagttgcaaacggtgttctgttgtatatataaaaggtgttcttgatccattctttgtaggatttagacaccatagagtttgtttataagcaatgtgaaagctaacctaaagagacatggggggatgtggatttgttgttcttttgctaccatgccctggcccttgatgtttgttgagatgggcagaggggcaactcaagtcatcgagatgcaaacgcctcttgttgtatgcgatcagatgggtaaaacaattatattattaacatgttccatggtcttcgctgacagcaaggctggtaaagctgtgagaaatcggtgtggtctgggtgatgtgccgtttgcagctttgcaattcatcgagggatgcaaaaaccttctgacatatctgacgctgtgtcacttgcagacctgtagtggtggatggatggctaagtgggtcacctaaacaaaaccgggtgctatgtactcggcagagaatgtcctcgacgatggatggacaactttaggggctgtttggaactggttttaagtctaaaaccaccgtaaattacggatctgtaaaattttacaatcctagatccaagttgtctgctttgatggacggtaacatgtgtggtttgacaacagtattatgtcttccgaaccggaaaataaaaattttgcccgtcg

SEQ ID NO: 75623 - DNA, 4732 bp, Zea Mays
acgggtcgtttttataaatcttgttggtctattatcaagcttgatgtgatggcagctgtctcacgtgtttgggattgcaatttcagaaattttgggctgctcaattcagccctcattacccttttgccaaagcttgagggtgcagcccttgtgaaggacttccgtccgatcagcctcatacatagcttcgccaagctggtaacaaagatgatggcaaataggctggctggacacttgggtgcaatggtttcacccaatcagacggcttttatcaaaaaaaggttcattcttgacaacttcatattggtgcagcgtacggccagatatctccatcaacaaagacaagctcgtatcctcttcaagttagacatttctaaggcttttgattcggtgtcatggccgtttctcattgaggttttgaggaaaatggggtttgggcagatttggtgtgatgttgtgtgtggactgttggcttcttcctccacaagaattttgctaaatggcgttcctggggagatcatttcacaccagaggggccttaggcaaggagacccactatcccctatgttgttcattttggttatggatgttctgaacttgctcattcaaaaggcttccgatgaagggttacttcagcagttatcttctgggactttacatcacaggctttctctctacgcggatgacgcggtggtttttcttaggccggtggcttcagacatcagtttggtcctggagatccttcggctttttggggaagcctcggggctcaagaccaatgtcctgaaaagtagtgtgttccccattcgttgtaccgaagatgatttgttgcgggtccaagcttctctcccctgccccatttctgattttccgtgtcaatatcttggactgcccctgtccttgggaaagctttcaaaggcccagttacaggcattggtggacaaggcagctagtgttctcccaggttggaaggccgacctgatgacaaaggcgggtcgtgctgtttatgttcagtttgttctcacagcaaaaatgatttatgctgcgatggctttggacctccctatttggaccatcaaagctattgacaagataagaagaggtttcctttggaaaggaagaaaacaagccaatggtggtcactgtttagtggcgtggggtaaggtcactaggcctaaagctctgggcggccttgggatcactgatctttggcttttgagcgtggcgcttcgagctaggtggccttggctccagagaaccgatcactctaagccttggtcggttctccctgttcaggcctgtggtacggtggaagccttgatcaatgttgcagttgtgtctcaattgggtgatggacaggatatcctcttttggaaggatcggtggctgaatggtagaagcatcagtgaggtggcacctgaggttcttgagcatgtatctaagtgtgttgtttccaaaaggctggtaaaagatgctctaacaaatctgaattgggtggctgatataaggggtgcactttcagttagggcgcttgcacaggttttggatctctgtgacttgctggagggcttagttcttcaacctgggattcctgataagcattcttggaagttcagcgcgtcgggggattactcctctagttctgcctaccaggttcttctccttggagctgttgagtttaggccggctgaacggatttggaagacctgggcaccaaggaaatgcaaattttttatgtggctggttgtgcatgatagatgttggacagctgacaggttggcaaaaaggggaatggatcatcccgtctgctgtccgctttgtgaccaggcggatgaaactattaatcacttattggtcgagtgcagctttgcgaggcagttttggttccttttccttcggtctggggacttccaggtgctctgtccctctgcaggggatggctgctttgactcttggtgggagaagagtgccgaggtggtgggcaagcctttgtcggatggtttcaactcgctgaaattgcaggaatgccctttgggaacatacaaaaatgttactggatcttctaaatctttatgctttccatgccctccgggtgaactccctcatcgtgctatatacacaaatgttcgaggaggtgctgctgaaactccatgtccatacagatgcgtgtctgacagatatcgcatgcctcactgttatacagctctggaggagttaatatatacttttgggggaccttggctatttggtctatttctttcaggcctccttatcttgttagctcttgttttaagtgttgctcgtatgaagtttgttggcactgatgagttacctgggccggcaccaactcatcaagggtcccaaattgatcattcctttcccttcctagaatcactaaatgaggtcattgaaactaatagggctgaagagtcacaaggtcatgtacacaggatgtatttcatgggtcccaacaccttcagtgaaccttggcatctcccacacagtccgccagaacaaataacagagatcgtatatgaagatgcatttaatagatttgtcgatgagataaacacccttgcagcttatcaatggtgggaaggatctatttacagtatcctctgtatacttgcctaccccctggcttggtcatggcagcagtggcgtaggagaaagaaattacagagacttcgtgaatttgttcgctctgaatatgatcattcatgcttaaagtcttgccgttcacgtgcactctacgaaggcctcaaggtgactgcaaccccagatctaatgctagggtatttagatttcttccttgggggagatgaaaaaaggcctgatcttccacctcgtcttcgtcaaaggtttccaatgtccctgatctttggaggtgatggaagttacatggctccgttttcacttaatagtgacagtgtgcttactagtcttatgagccaggctgttccctcatggatatggcaccgtcttgtagctggattgaatgcacagctgcgtttggtccgtggtggaaatctgaaagtaacgtttcttccggtcatcaactggcttgaatctcatgcaaatccctctttagctgagaatggtatccgtgttgatcttgcctggttccaagctacagcattagggtactgccaacttggtcttcttgtttatgctgttgaaggagaagctgcacttaccgaacctgatggaagccctagagtaaaaatagagcaacacacacccacacagaacatgctcgctgatactcaactaagtcagtccaggattaaggatgctctaatgcgcaaaaggatcactggtggagttctcaatagtaatagcttaaggacactaaaagacaggagagatttgttttacccattttctcatatcttgcacaattcgaaaccagttgggcatcaggatcttgttggtttggtaatctcaatactgcttcttgcagatttcagcttagttttgcttacttttctccagctgtattcatattctatggtcgatgttctcttggttttgtttattctaccgcttgggattttgtcgccttttcctgccggtataaatgctctatttagtcatggaccgaggcggtcagcaggccttgctcgtgtgtatgcattgtggaacataacttcactggtcaatgttgttgtggctttcatatgtggttttgtacattataagttatcaaccaaaacacacccgagcgtgcagccctggaacctgggaacggatgaaagcggttggtggctcttcccaaccggactcatgctgttgaaatgcattcaagcaaggcttgttgattggcacgttgctaatttagagattcaagaccgtgcggtatatagcaatgacccaaacatattttggcagtcatgacccctgttgtaactgagggtccttctgggaagctttttacaactcgattttttgggagttgataaaaggaagagtgcgggcaaaggcctttctttattgaccaggcaaaagaaggaactacagaggttatatagatgcgtacttccgcatcccccgctgatcatgtgcagttgcaaacggtgttctgttgtatatataaaaggtgttcttgatccattctttgtaggatttagacaccatagagtttgtttataagcaatgtgaaagctaacctaaagagacatggggggatgtggatttgttgttcttttgctaccatgccctggcccttgatgtttgttgagatgggcagaggggcaactcaagtcatcgagatgcaaacgcctcttgttgtatgcgatcagatgggtaaaacaattatattattaacatgttccatggtcttcgctgacagcaaggctggtaaagctgtgagaaatcggtgtggtctgggtgatgtgccgtttgcagctttgcaattcatcgagggatgcaaaaaccttctgacatatctgacgctgtgtcacttgcagacctgtagtggtggatggatggctaagtgggtcacctaaacaaaaccgggtgctatgtactcggcagagaatgtcctcgacgatggatggacaactttaggggctgtttggaactggttttaagtctaaaaccaccgtaaattacggatctgtaaaattttacaatcctagatccaagttgtctgctttgatggacggtaacatgtgtggtttgacaacagtattatgtcttccgaaccggaaaataaaaattttgcccgtcg

SEQ ID NO: 75624 - DNA, 3841 bp, Zea Mays
gtggcaagatcagtgcctctgggggtgatggtttggctgggggaggtggagggcgagtttctattaacgtttttagtagacatgatgacacccagatttttgttcatgcagggggaaggagttcaggctgtccagataatgcaggagctgctggaactctttatgaagcagtaccaaagagtcttattgtcagcaacaacaatttgagtacacagacagatactcttcttttagagtttccaaatcaaccactgtggacaaatgtttttgtaagaaatcgtgccaaagttgctgtccccttgctctggagtcgcgttcaggtccaagggcaacttagccttctttctggtgctattctaacttttggtctcactggttatccatactcggagtttgaactgatggctgaggagcttcttatgagtgactcaataattaaggtgttcggtgctttgagaatgtctgtaaagatgctcctaatgtggaactccagaatggaaattgatggcggtggagattcgatagttgcaacttctttgttagatgctagcaacctgatagttctgaaggaatcatctgtgatacactctaatgctaatcttggagtccgtggccaaggtgtcctgaatttgtctggggacggagacacaattgaggcacaacgccttattctatcgctgttctacagcatacaagttggacctggttctgttttacggggcccacttgtaaacagaagtagcgatgatgtggccccaaagctgaattgtgaagcagatagctgtcctgtggaaataatacatccaccagaagattgcaatctaaattcttcattgtcgtttacccttcaggtatgccgtgttgaagatattgatgtatggggtgtcgtacaaggaactgtaattcatttcaatagggcaagaagtgtcactgtgcatacatctgggaccatcagcgcaacaggctttggctgtcgatctggagtaggacaagggaaaatgttaagaagcggtgtatgtggtggtggtggacatggtggcaaaggtgggaatggtttttataagggagaccttgctgagggtggagctatctatggcaatgctgatctaccctgtgaacttggcagcggcagtgggaatgactccacagagttgtccacagctggcgggggtataatagtgatgggctcatgggattattctttgccaagtcttgccctctatggttcagtagaatcaaatggtggcagctatgctagtggctctgttggaggacctggtggtggttctgggggcacaattcttctatttgtgcacactttgtccttagctgaaagctctgtcctttcaagtgttggtggcttcggaagtactggtagtggtggaggtggagggggaaggattcattttcattggtctaacattcctactggagatgaatatgtgcctgttgcagctgttaagggatcaatacttacaagtggaggagtcagcaaagggttaggatattccggtggcaatggaacggtcacaggaaaagcttgcccaaagggtctttatggtacattttgcaaggaatgccctttgggaacatacaaaaatgttactggatcttctaaatctttatgctttccatgccctccgggtgaactccctcatcgtgctatatacacaaatgttcgaggaggtgctgctgaaactccatgtccatacagatgcgtgtctgacagatatcgcatgcctcactgttatacagctctggaggagttaatatatacttttgggggaccttggctatttggtctatttctttcaggcctccttatcttgttagctcttgttttaagtgttgctcgtatgaagtttgttggcactgatgagttacctgggccggcaccaactcatcaagggtcccaaattgatcattcctttcccttcctagaatcactaaatgaggtcattgaaactaatagggctgaagagtcacaaggtcatgtacacaggatgtatttcatgggtcccaacaccttcagtgaaccttggcatctcccacacagtccgccagaacaaataacagagatcgtatatgaagatgcatttaatagatttgtcgatgagataaacacccttgcagcttatcaatggtgggaaggatctatttacagtatcctctgtatacttgcctaccccctggcttggtcatggcagcagtggcgtaggagaaagaaattacagagacttcgtgaatttgttcgctctgaatatgatcattcatgcttaaagtcttgccgttcacgtgcactctacgaaggcctcaaggtgactgcaaccccagatctaatgctagggtatttagatttcttccttgggggagatgaaaaaaggcctgatcttccacctcgtcttcgtcaaaggtttccaatgtccctgatctttggaggtgatggaagttacatggctccgttttcacttaatagtgacagtgtgcttactagtcttatgagccaggctgttccctcatggatatggcaccgtcttgtagctggattgaatgcacagctgcgtttggtccgtggtggaaatctgaaagtaacgtttcttccggtcatcaactggcttgaatctcatgcaaatccctctttagctgagaatggtatccgtgttgatcttgcctggttccaagctacagcattagggtactgccaacttggtcttcttgtttatgctgttgaaggagaagctgcacttaccgaacctgatggaagccctagagtaaaaatagagcaacacacacccacacagaacatgctcgctgatactcaactaagtcagtccaggattaaggatgctctaatgcgcaaaaggatcactggtggagttctcaatagtaatagcttaaggacactaaaagacaggagagatttgttttacccattttctcatatcttgcacaattcgaaaccagttgggcatcaggatcttgttggtttggtaatctcaatactgcttcttgcagatttcagcttagttttgcttacttttctccagctgtattcatattctatggtcgatgttctcttggttttgtttattctaccgcttgggattttgtcgccttttcctgccggtataaatgctctatttagtcatggaccgaggcggtcagcaggccttgctcgtgtgtatgcattgtggaacataacttcactggtcaatgttgttgtggctttcatatgtggttttgtacattataagttatcaaccaaaacacacccgagcgtgcagccctggaacctgggaacggatgaaagcggttggtggctcttcccaaccggactcatgctgttgaaatgcattcaagcaaggcttgttgattggcacgttgctaatttagagattcaagaccgtgcgatgggtaaaacaattatattattaacatgttccatggtcttcgctgacagcaaggctggtaaagctgtgagaaatcggtgtggtctgggtgatgtgccgtttgcagctttgcaattcatcgagggatgcaaaaaccttctgacatatctgacgctgtgtcacttgcagacctgtagtggtggatggatggctaagtgggtcacctaaacaaaaccgggtgctatgtactcggcagagaatgtcctcgacgatggatggacaactttaggggctgtttggaactggttttaagtctaaaaccaccgtaaattacggatctgtaaaattttacaatcctagatccaagttgtctgctttgatggacggtaacatgtgtggtttgacaacagtattatgtcttccgaaccggaaaataaaaattttgcccgtcg

SEQ ID NO: 75625 - DNA, 5274 bp, Zea Mays
aaatagctaaacccaaatcgataccaaacccagcccggaacgcacgccccccgccgccatcgccggcggccagccactacaagcgcggtgtccggaacctgtactgtactaccaaccccaacagcctggactctgatgagccccagttcatggcctgccatctctcccccctcttcaatctccgactcttgctgctgctcggcgctgtcctcggaaacgccgtccttgtccgcgccggcggggcggaggcgtcagatcgggctgagccggacccgtactcgatcctgacgtggcacgactactcgccgccgtcgcccccactcccgcccccggacccggcgtcgtcgacggcgacctgtgagggagacctccacgggaagggggacttccgcacgcactgcgaggtcttcgaggaggtggaactgggcgacgatatctacatcacggggaacggcagcctcgtgctcctctctggcgcctccctgacctgcgagaaggtcgggtgcgttatatctgccaatctctccggcgaggtgcacctcagccgcggcgtgcgcgtcagagccggcagggtctcgttggttgccaccaacatcacagtcgccgacacggtcgttgtgaacaccaccgcgctcgctggcgccccccctgaccggaccagtggcgttcccacagggacgcacggcgacggtggcgggcacggtggccgtggcgccagctgcttcgtcaaggaagggcagactcaggaggattcatggggtggtgatgcctatgcatggtctgacctcgaacacccttggagctacgggagcaaagggggctcgaccagtgttgagaaggactacggtggtgccggtggtggcatcgtgtggctgtttgctgatgatctggtcatgaatggcacagtgctcgccgccggtggggatagcaatgagaagggtggaggtggttctgggggaagcatctttataagggctgcatcgatgtatggtggtggcaagatcagtgcctctgggggtgatggtttggctgggggaggtggagggcgagtttctattaacgtttttagtagacatgatgacacccagatttttgttcatgggggaaggagttcaggctgtccagataatgcaggagctgctggaactctttatgaagcagtaccaaagagtcttattgtcagcaacaacaatttgagtacacagacagatactcttcttttagagtttccaaatcaaccactgtggacaaatgtttttgtaagaaatcgtgccaaagttgctgtccccttgctctggagtcgcgttcaggtccaagggcaacttagccttctttctggtgctattctaacttttggtctcactggttatccatactcggagtttgaactgatggctgaggagcttcttatgagtgactcaataattaaggtgttcggtgctttgagaatgtctgtaaagatgctcctaatgtggaactccagaatggaaattgatggcggtggagattcgatagttgcaacttctttgttagatgctagcaacctgatagttctgaaggaatcatctgtgatacactctaatgctaatcttggagtccgtggccaaggtgtcctgaatttgtctggggacggagacacaattgaggcacaacgccttattctatcgctgttctacagcatacaagttggacctggttctgttttacggggcccacttgtaaacagaagtagcgatgatgtggccccaaagctgaattgtgaagcagatagctgtcctgtggaaataatacatccaccagaagattgcaatctaaattcttcattgtcgtttacccttcaggtatgccgtgttgaagatattgatgtatggggtgtcgtacaaggaactgtaattcatttcaatagggcaagaagtgtcactgtgcatacatctgggaccatcagcgcaacaggctttggctgtcgatctggagtaggacaagggaaaatgttaagaagcggtgtatgtggtggtggtggacatggtggcaaaggtgggaatggtttttataagggagaccttgctgagggtggagctatctatggcaatgctgatctaccctgtgaacttggcagcggcagtgggaatgactccacagagttgtccacagctggcgggggtataatagtgatgggctcatgggattattctttgccaagtcttgccctctatggttcagtagaatcaaatggtggcagctatgctagtggctctgttggaggacctggtggtggttctgggggcacaattcttctatttgtgcacactttgtccttagctgaaagctctgtcctttcaagtgttggtggcttcggaagtactggtagtggtggaggtggagggggaaggattcattttcattggtctaacattcctactggagatgaatatgtgcctgttgcagctgttaagggatcaatacttacaagtggaggagtcagcaaagggttaggatattccggtggcaatggaacggtcacaggaaaagcttgcccaaagggtctttatggtacattttgcaaggaatgccctttgggaacatacaaaaatgttactggatcttctaaatctttatgctttccatgccctccgggtgaactccctcatcgtgctatatacacaaatgttcgaggaggtgctgctgaaactccatgtccatacagatgcgtgtctgacagatatcgcatgcctcactgttatacagctctggaggagttaatatatacttttgggggaccttggctatttggtctatttctttcaggcctccttatcttgttagctcttgttttaagtgttgctcgtatgaagtttgttggcactgatgagttacctgggccggcaccaactcatcaagggtcccaaattgatcattcctttcccttcctagaatcactaaatgaggtcattgaaactaatagggctgaagagtcacaaggtcatgtacacaggatgtatttcatgggtcccaacaccttcagtgaaccttggcatctcccacacagtccgccagaacaaataacagagatcgtatatgaagatgcatttaatagatttgtcgatgagataaacacccttgcagcttatcaatggtgggaaggatctatttacagtatcctctgtatacttgcctaccccctggcttggtcatggcagcagtggcgtaggagaaagaaattacagagacttcgtgaatttgttcgctctgaatatgatcattcatgcttaaagtcttgccgttcacgtgcactctacgaaggcctcaaggtgactgcaaccccagatctaatgctagggtatttagatttcttccttgggggagatgaaaaaaggcctgatcttccacctcgtcttcgtcaaaggtttccaatgtccctgatctttggaggtgatggaagttacatggctccgttttcacttaatagtgacagtgtgcttactagtcttatgagccaggctgttccctcatggatatggcaccgtcttgtagctggattgaatgcacagctgcgtttggtccgtggtggaaatctgaaagtaacgtttcttccggtcatcaactggcttgaatctcatgcaaatccctctttagctgagaatggtatccgtgttgatcttgcctggttccaagctacagcattagggtactgccaacttggtcttcttgtttatgctgttgaaggagaagctgcacttaccgaacctgatggaagccctagagtaaaaatagagcaacacacacccacacagaacatgctcgctgatactcaactaagtcagtccaggattaaggatgctctaatgcgcaaaaggatcactggtggagttctcaatagtaatagcttaaggacactaaaagacaggagagatttgttttacccattttctcatatcttgcacaattcgaaaccagttgggcatcaggatcttgttggtttggtaatctcaatactgcttcttgcagatttcagcttagttttgcttacttttctccagctgtattcatattctatggtcgatgttctcttggttttgtttattctaccgcttgggattttgtcgccttttcctgccggtataaatgctctatttagtcatggaccgaggcggtcagcaggccttgctcgtgtgtatgcattgtggaacataacttcactggtcaatgttgttgtggctttcatatgtggttttgtacattataagttatcaaccaaaacacacccgagcgtgcagccctggaacctgggaacggatgaaagcggttggtggctcttcccaaccggactcatgctgttgaaatgcattcaagcaaggcttgttgattggcacgttgctaatttagagattcaagaccgtgcggtatatagcaatgacccaaacatattttggcagtcatgacccctgttgtaactgagggtccttctgggaagctttttacaactcgattttttgggagttgataaaaggaagagtgcgggcaaaggcctttctttattgaccaggcaaaagaaggaactacagaggttatatagatgcgtacttccgcatcccccgctgatcatgtgcagttgcaaacggtgttctgttgtatatataaaaggtgttcttgatccattctttgtaggatttagacaccatagagtttgtttataagcaatgtgaaagctaacctaaagagacatggggggatgtggatttgttgttcttttgctaccatgccctggcccttgatgtttgttgagatgggcagaggggcaactcaagtcatcgagatgcaaacgcctcttgttgtatgcgatcagatgggtaaaacaattatattattaacatgttccatggtcttcgctgacagcaaggctggtaaagctgtgagaaatcggtgtggtctgggtgatgtgccgtttgcagctttgcaattcatcgagggatgcaaaaaccttctgacatatctgacgctgtgtcacttgcagacctgtagtggtggatggatggctaagtgggtcacctaaacaaaaccgggtgctatgtactcggcagagaatgtcctcgacgatggatggacaactttaggggctgtttggaactggttttaagtctaaaaccaccgtaaattacggatctgtaaaattttacaatcctagatccaagttgtctgctttgatggacggtaacatgtgtggtttgacaacagtattatgtcttccgaaccggaaaataaaaattttgcccgtcg

SEQ ID NO: 75626 - DNA, 5216 bp, Zea Mays
aaatagctaaacccaaatcgataccaaacccagcccggaacgcacgccccccgccgccatcgccggcggccagccactacaagcgcggtgtccggaacctgtactgtactaccaaccccaacagcctggactctgatgagccccagttcatggcctgccatctctcccccctcttcaatctccgactcttgctgctgctcggcgctgtcctcggaaacgccgtccttgtccgcgccggcggggcggaggcgtcagatcgggctgagccggacccgtactcgatcctgacgtggcacgactactcgccgccgtcgcccccactcccgcccccggacccggcgtcgtcgacggcgacctgtgagggagacctccacgggaagggggacttccgcacgcactgcgaggtcttcgaggaggtggaactgggcgacgatatctacatcacggggaacggcagcctcgtgctcctctctggcgcctccctgacctgcgagaaggtcgggtgcgttatatctgccaatctctccggcgaggtgcacctcagccgcggcgtgcgcgtcagagccggcagggtctcgttggttgccaccaacatcacagtcgccgacacggtcgttgtgaacaccaccgcgctcgctggcgccccccctgaccggaccagtggcgttcccacagggacgcacggcgacggtggcgggcacggtggccgtggcgccagctgcttcgtcaaggaagggcagactcaggaggattcatggggtggtgatgcctatgcatggtctgacctcgaacacccttggagctacgggagcaaagggggctcgaccagtgttgagaaggactacggtggtgccggtggtggcatcgtgtggctgtttgctgatgatctggtcatgaatggcacagtgctcgccgccggtggggatagcaatgagaagggtggaggtggttctgggggaagcatctttataagggctgcatcgatgtatggtggtggcaagatcagtgcctctgggggtgatggtttggctgggggaggtggagggcgagtttctattaacgtttttagtagacatgatgacacccagatttttgttcatgggggaaggagttcaggctgtccagataatgcaggagctgctggaactctttatgaagcagtaccaaagagtcttattgtcagcaacaacaatttgagtacacagacagatactcttcttttagagtttccaaatcaaccactgtggacaaatgtttttgtaagaaatcgtgccaaagttgctgtccccttgctctggagtcgcgttcaggtccaagggcaacttagccttctttctggtgctattctaacttttggtctcactggttatccatactcggagtttgaactgatggctgaggagcttcttatgagtgactcaataattaaggtgttcggtgctttgagaatgtctgtaaagatgctcctaatgtggaactccagaatggaaattgatggcggtggagattcgatagttgcaacttctttgttagatgctagcaacctgatagttctgaaggaatcatctgtgatacactctaatgctaatcttggagtccgtggccaaggtgtcctgaatttgtctggggacggagacacaattgaggcacaacgccttattctatcgctgttctacagcatacaagttggacctggttctgttttacggggcccacttgtaaacagaagtagcgatgatgtggccccaaagctgaattgtgaagcagatagctgtcctgtggaaataatacatccaccagaagattgcaatctaaattcttcattgtcgtttacccttcaggtatgccgtgttgaagatattgatgtatggggtgtcgtacaaggaactgtaattcatttcaatagggcaagaagtgtcactgtgcatacatctgggaccatcagcgcaacaggctttggctgtcgatctggagtaggacaagggaaaatgttaagaagcggtgtatgtggtggtggtggacatggtggcaaagcggcagtgggaatgactccacagagttgtccacagctggcgggggtataatagtgatgggctcatgggattattctttgccaagtcttgccctctatggttcagtagaatcaaatggtggcagctatgctagtggctctgttggaggacctggtggtggttctgggggcacaattcttctatttgtgcacactttgtccttagctgaaagctctgtcctttcaagtgttggtggcttcggaagtactggtagtggtggaggtggagggggaaggattcattttcattggtctaacattcctactggagatgaatatgtgcctgttgcagctgttaagggatcaatacttacaagtggaggagtcagcaaagggttaggatattccggtggcaatggaacggtcacaggaaaagcttgcccaaagggtctttatggtacattttgcaaggaatgccctttgggaacatacaaaaatgttactggatcttctaaatctttatgctttccatgccctccgggtgaactccctcatcgtgctatatacacaaatgttcgaggaggtgctgctgaaactccatgtccatacagatgcgtgtctgacagatatcgcatgcctcactgttatacagctctggaggagttaatatatacttttgggggaccttggctatttggtctatttctttcaggcctccttatcttgttagctcttgttttaagtgttgctcgtatgaagtttgttggcactgatgagttacctgggccggcaccaactcatcaagggtcccaaattgatcattcctttcccttcctagaatcactaaatgaggtcattgaaactaatagggctgaagagtcacaaggtcatgtacacaggatgtatttcatgggtcccaacaccttcagtgaaccttggcatctcccacacagtccgccagaacaaataacagagatcgtatatgaagatgcatttaatagatttgtcgatgagataaacacccttgcagcttatcaatggtgggaaggatctatttacagtatcctctgtatacttgcctaccccctggcttggtcatggcagcagtggcgtaggagaaagaaattacagagacttcgtgaatttgttcgctctgaatatgatcattcatgcttaaagtcttgccgttcacgtgcactctacgaaggcctcaaggtgactgcaaccccagatctaatgctagggtatttagatttcttccttgggggagatgaaaaaaggcctgatcttccacctcgtcttcgtcaaaggtttccaatgtccctgatctttggaggtgatggaagttacatggctccgttttcacttaatagtgacagtgtgcttactagtcttatgagccaggaactcgtgccatatctgttacaggctgttccctcatggatatggcaccgtcttgtagctggattgaatgcacagctgcgtttggtccgtggtggaaatctgaaagtaacgtttcttccggtcatcaactggcttgaatctcatgcaaatccctctttagctgagaatggtatccgtgttgatcttgcctggttccaagctacagcattagggtactgccaacttggtcttcttgtttatgctgttgaaggagaagctgcacttaccgaacctgatggaagccctagagtaaaaatagagcaacacacacccacacagaacatgctcgctgatactcaactaagtcagtccaggattaaggatgctctaatgcgcaaaaggatcactggtggagttctcaatagtaatagcttaaggacactaaaagacaggagagatttgttttacccattttctcatatcttgcacaattcgaaaccagttgggcatcaggatcttgttggtttggtaatctcaatactgcttcttgcagatttcagcttagttttgcttacttttctccagctgtattcatattctatggtcgatgttctcttggttttgtttattctaccgcttgggattttgtcgccttttcctgccggtataaatgctctatttagtcatggaccgaggcggtcagcaggccttgctcgtgtgtatgcattgtggaacataacttcactggtcaatgttgttgtggctttcatatgtggttttgtacattataagttatcaaccaaaacacacccgagcgtgcagccctggaacctgggaacggatgaaagcggttggtggctcttcccaaccggactcatgctgttgaaatgcattcaagcaaggcttgttgattggcacgttgctaatttagagattcaagaccgtgcggtatatagcaatgacccaaacatattttggcagtcatgacccctgttgtaactgagggtccttctgggaagctttttacaactcgattttttgggagttgataaaaggaagagtgcgggcaaaggcctttctttattgaccaggcaaaagaaggaactacagaggttatatagatgcgtacttccgcatcccccgctgatcatgtgcagttgcaaacggtgttctgttgtatatataaaaggtgttcttgatccattctttgtaggatttagacaccatagagtttgtttataagcaatgtgaaagctaacctaaagagacatggggggatgtggatttgttgttcttttgctaccatgccctggcccttgatgtttgttgagatgggcagaggggcaactcaagtcatcgagatgcaaacgcctcttgttgtatgcgatcagatgggtaaaacaattatattattaacatgttccatggtcttcgctgacagcaaggctggtaaagctgtgagaaatcggtgtggtctgggtgatgtgccgtttgcagctttgcaattcatcgagggatgcaaaaaccttctgacatatctgacgctgtgtcacttgcagacctgtagtggtggatggatggctaagtgggtcacctaaacaaaaccgggtgctatgtactcggcagagaatgtcctcgacgatggatggacaactttaggggctgtttggaactggttttaagtctaaaaccaccgtaaattacggatctgtaaaattttacaatcctagatccaagttgtctgctttgatggacggtaacatgtgtggtttgacaacagtattatgtcttccgaaccggaaaataaaaattttgcccgtcg

SEQ ID NO: 75627 - DNA, 5165 bp, Zea Mays
aaatagctaaacccaaatcgataccaaacccagcccggaacgcacgccccccgccgccatcgccggcggccagccactacaagcgcggtgtccggaacctgtactgtactaccaaccccaacagcctggactctgatgagccccagttcatggcctgccatctctcccccctcttcaatctccgactcttgctgctgctcggcgctgtcctcggaaacgccgtccttgtccgcgccggcggggcggaggcgtcagatcgggctgagccggacccgtactcgatcctgacgtggcacgactactcgccgccgtcgcccccactcccgcccccggacccggcgtcgtcgacggcgacctgtgagggagacctccacgggaagggggacttccgcacgcactgcgaggtcttcgaggaggtggaactgggcgacgatatctacatcacggggaacggcagcctcgtgctcctctctggcgcctccctgacctgcgagaaggtcgggtgcgttatatctgccaatctctccggcgaggtgcacctcagccgcggcgtgcgcgtcagagccggcagggtctcgttggttgccaccaacatcacagtcgccgacacggtcgttgtgaacaccaccgcgctcgctggcgccccccctgaccggaccagtggcgttcccacagggacgcacggcgacggtggcgggcacggtggccgtggcgccagctgcttcgtcaaggaagggcagactcaggaggattcatggggtggtgatgcctatgcatggtctgacctcgaacacccttggagctacgggagcaaagggggctcgaccagtgttgagaaggactacggtggtgccggtggtggcatcgtgtggctgtttgctgatgatctggtcatgaatggcacagtgctcgccgccggtggggatagcaatgagaagggtggaggtggttctgggggaagcatctttataagggctgcatcgatgtatggtggtggcaagatcagtgcctctgggggtgatggtttggctgggggaggtggagggcgagtttctattaacgtttttagtagacatgatgacacccagatttttgttcatgggggaaggagttcaggctgtccagataatgcaggagctgctggaactctttatgaagcagtaccaaagagtcttattgtcagcaacaacaatttgagtacacagacagatactcttcttttagagtttccaaatcaaccactgtggacaaatgtttttgtaagaaatcgtgccaaagttgctgtccccttgctctggagtcgcgttcaggtccaagggcaacttagccttctttctggtgctattctaacttttggtctcactggttatccatactcggagtttgaactgatggctgaggagcttcttatgagtgactcaataattaaggtgttcggtgctttgagaatgtctgtaaagatgctcctaatgtggaactccagaatggaaattgatggcggtggagattcgatagttgcaacttctttgttagatgctagcaacctgatagttctgaaggaatcatctgtgatacactctaatgctaatcttggagtccgtggccaaggtgtcctgaatttgtctggggacggagacacaattgaggcacaacgccttattctatcgctgttctacagcatacaagttggacctggttctgttttacggggcccacttgtaaacagaagtagcgatgatgtggccccaaagctgaattgtgaagcagatagctgtcctgtggaaataatacatccaccagaagattgcaatctaaattcttcattgtcgtttacccttcaggtatgccgtgttgaagatattgatgtatggggtgtcgtacaaggaactgtaattcatttcaatagggcaagaagtgtcactgtgcatacatctgggaccatcagcgcaacaggctttggctgtcgatctggagtaggacaagggaaaatgttaagaagcggtgtatgtggtggtggtggacatggtggcaaaggtgggaatggtttttataagggagaccttgctgagggtggagctatctatggcaatgctgatctaccctgtgaacttggcagcggcagtgggaatgactccacagagttgtccacagctggcgggggtataatagtgatgggctcatgggattattctttgccaagtcttgccctctatggttcagtagaatcaaatggtggcagctatgctagtggctctgttggaggacctggtggtggttctgggggcacaattcttctatttgtgcacactttgtccttagctgaaagctctgtcctttcaagtgttggtggcttcggaagtactggtagtggtggaggtggagggggaaggattcattttcattggtctaacattcctactggagatgaatatgtgcctgttgcagctgttaagggatcaatacttacaagtggaggagtcagcaaagggttaggatattccggtggcaatggaacggtcacaggaaaagcttgcccaaagggtctttatggtacattttgcaaggaggtgctgctgaaactccatgtccatacagatgcgtgtctgacagatatcgcatgcctcactgttatacagctctggaggagttaatatatacttttgggggaccttggctatttggtctatttctttcaggcctccttatcttgttagctcttgttttaagtgttgctcgtatgaagtttgttggcactgatgagttacctgggccggcaccaactcatcaagggtcccaaattgatcattcctttcccttcctagaatcactaaatgaggtcattgaaactaatagggctgaagagtcacaaggtcatgtacacaggatgtatttcatgggtcccaacaccttcagtgaaccttggcatctcccacacagtccgccagaacaaataacagagatcgtatatgaagatgcatttaatagatttgtcgatgagataaacacccttgcagcttatcaatggtgggaaggatctatttacagtatcctctgtatacttgcctaccccctggcttggtcatggcagcagtggcgtaggagaaagaaattacagagacttcgtgaatttgttcgctctgaatatgatcattcatgcttaaagtcttgccgttcacgtgcactctacgaaggcctcaaggtgactgcaaccccagatctaatgctagggtatttagatttcttccttgggggagatgaaaaaaggcctgatcttccacctcgtcttcgtcaaaggtttccaatgtccctgatctttggaggtgatggaagttacatggctccgttttcacttaatagtgacagtgtgcttactagtcttatgagccaggctgttccctcatggatatggcaccgtcttgtagctggattgaatgcacagctgcgtttggtccgtggtggaaatctgaaagtaacgtttcttccggtcatcaactggcttgaatctcatgcaaatccctctttagctgagaatggtatccgtgttgatcttgcctggttccaagctacagcattagggtactgccaacttggtcttcttgtttatgctgttgaaggagaagctgcacttaccgaacctgatggaagccctagagtaaaaatagagcaacacacacccacacagaacatgctcgctgatactcaactaagtcagtccaggattaaggatgctctaatgcgcaaaaggatcactggtggagttctcaatagtaatagcttaaggacactaaaagacaggagagatttgttttacccattttctcatatcttgcacaattcgaaaccagttgggcatcaggatcttgttggtttggtaatctcaatactgcttcttgcagatttcagcttagttttgcttacttttctccagctgtattcatattctatggtcgatgttctcttggttttgtttattctaccgcttgggattttgtcgccttttcctgccggtataaatgctctatttagtcatggaccgaggcggtcagcaggccttgctcgtgtgtatgcattgtggaacataacttcactggtcaatgttgttgtggctttcatatgtggttttgtacattataagttatcaaccaaaacacacccgagcgtgcagccctggaacctgggaacggatgaaagcggttggtggctcttcccaaccggactcatgctgttgaaatgcattcaagcaaggcttgttgattggcacgttgctaatttagagattcaagaccgtgcggtatatagcaatgacccaaacatattttggcagtcatgacccctgttgtaactgagggtccttctgggaagctttttacaactcgattttttgggagttgataaaaggaagagtgcgggcaaaggcctttctttattgaccaggcaaaagaaggaactacagaggttatatagatgcgtacttccgcatcccccgctgatcatgtgcagttgcaaacggtgttctgttgtatatataaaaggtgttcttgatccattctttgtaggatttagacaccatagagtttgtttataagcaatgtgaaagctaacctaaagagacatggggggatgtggatttgttgttcttttgctaccatgccctggcccttgatgtttgttgagatgggcagaggggcaactcaagtcatcgagatgcaaacgcctcttgttgtatgcgatcagatgggtaaaacaattatattattaacatgttccatggtcttcgctgacagcaaggctggtaaagctgtgagaaatcggtgtggtctgggtgatgtgccgtttgcagctttgcaattcatcgagggatgcaaaaaccttctgacatatctgacgctgtgtcacttgcagacctgtagtggtggatggatggctaagtgggtcacctaaacaaaaccgggtgctatgtactcggcagagaatgtcctcgacgatggatggacaactttaggggctgtttggaactggttttaagtctaaaaccaccgtaaattacggatctgtaaaattttacaatcctagatccaagttgtctgctttgatggacggtaacatgtgtggtttgacaacagtattatgtcttccgaaccggaaaataaaaattttgcccgtcg

SEQ ID NO: 75628 - DNA, 2681 bp, Zea Mays
ggcgccctcgcgcgcgctgtttcgtctagatccgatccagaggaggaaactctcagactttgatcccaaatggagcaaggatgaacttacaaatttttatgaagcctaccgtcaatatgggatggactggagaaagatcagcatagcgataggcactaagtcatcggacatggtgcagtctcttttcactttacatcggactttcttatctcttccagaacatcaagccactgccatgggatttattgcgctggtgactggtcatcacaatgcttcggagaaaaccacgactcatagaggatatgatcacgtagtcagagcatctggaaaggcaaggaaacatggtgaaaaaccgaaatcaattgatggacctgacctgcccaactgtcaagaagcgaaaatttctggattttcagatttattccagagtcgatactatggcgtttcttcagaattggtcaggtacatccgaaatcatgctgttcggaggcgtactcctcgtataccagctatagtttctgcagacaggagtaccattgatgaggccacaccaggaattgaaaatgtcatcagttctaccaagagaaaatatgaagcagccaataacgactctgctattgtcccaacaaataagtactctcctgacagagtttctggcttcgctgaagcacacaaggctggtcaagatcattgtttgttggagaccataggaactgggcatgtagcgacatgtcaacaacattcaaagaaaacaagaattcagcaaactatggaggaaggtcagactggtgtagttgatcatgagacaacgatggcatctaaagaagggaataagccagttgatttattaaacaacaatcagttatttatcgacaatatttctgaagatgatatgttggtcttggatgtattgtgtagcctgatgaatgcaccctctaaaatgccaaaactagagattaatattccttcaggttcggttggaaaaactgactctacgctatctcagagaagggaggaaggccaccctaccattgatttatctaaacaagggaagccagttggtaaatccagtgcttccaagactaggaagaaaaaatataagatattagacgcagaggtgcctgctgtagcacaaaacgtttgtggtaatagtttagccctgccggaaacactgagggttgttatcactgatgattcttccttgtgtactgactctggaagagtggggataccggaagcatctgaagatattcctgctgaagttcccagtgcacaaacagaaaccaagcctgaagtgagaatgtctggaaggaccagacggaaatctcaaatgcattgcaaaacaaagcatatgtcatgcaatgaaggttcagataatttacaggcaaaaaaattgctgcactgtttgtcatccgaaccacttcgtagatggtgcacatatgagtggttctacagcgcagttgattatccatggttttcaagtaatgagtttgtgcactacttagatcatgcaaaattgagtcatctttcaaggttgactataccagaatggggtacaattcgaagctcccttggtattccacgtcgattttcaaattattttctggccgtggaaaaagaaaatcttgaggattatcgggagaaagttagaaaaatctatgctcaactcagtgatggttcaagggattttctacctgcagacctagctagaccattttcaattggtcagcaagttattgttcgtcatccaaattctagggaactttgtgatggcaaagtggtgatgatgggtccggattgttacaaggttcattttgatgatcctgacattggtgttgatattgtaaaggacactgattgtatgccagtcaactggctgtataaccgtcctgacaacatgaggagctgcctttcaaatgatgcgtacagcatactggagatggatcacattcctgaccttacagcaagtgagaatgaggatcatgctgtaaacggatctactgtacttgaggggctcaaaagtctgcgcttaacatcagatagacaacctaaggcagaatctattgtaaacagtgaaagaccaccatataggagtacatctgacagccctgcaaaatctagagattgcccagacaataatagtgctggccactacgatgagctagagtcatatatagccgcatttgcagaaagatcactatcacaagccaggcagatggttgacaaagccatgcaggcgaaccctggaggtaatgaggatgaaaaggtatgcacgtcaaatcaagtggcaggttgtgcaggcccaggttttgaacctgcccgtggcgcccaacttccttctgacctgatatcgaacggcatcgccacggttctttcaatcaagagccttagcgactcgcgacatccgtttgctaacgtagcaggcgtcttggatcacgcttgctccatgctgcgtccaagctgtccgcagaacctcgctttgtacgatcaaataaagagagacatcggtatcataaagacccagatatttgcacttatgccaacagcattgggcaattgcagccctcctgtcccgcccatgtaactgggccctgagcaagatacttccgctgccttcatgcaggccctgcagtagtacacgcttcttcctttgcttagaaagaggagcttgcctgcctgag

SEQ ID NO: 75629 - DNA, 2989 bp, Zea Mays
gtctagatccgatccagcaatatttgttgagccgaaggcaaggacagttttgatgggcccatcaaagggttctcgaactattaacaagatcatagtaaaaggatctgaatatcaacagcagcatgatgatccatctagttcaagcaaagctaaacagaaaaggaggaaactctcagactttgatcccaaatggagcaaggatgaacttacaaatttttatgaagcctaccgtcaatatgggatggactggagaaagatcagcatagcgataggcactaagtcatcggacatggtgcagtctcttttcactttacatcggactttcttatctcttccagaacatcaagccactgccatgggatttattgcgctggtgactggtcatcacaatgcttcggagaaaaccacgactcatagaggatatgatcacgtagtcagagcatctggaaaggcaaggaaacatggtgaaaaaccgaaatcaattgatggacctgacctgcccaactgtcaagaagcgaaaatttctggattttcagatttattccagagtcgatactatggcgaattggtcaggtacatccgaaatcatgctgttcggaggcgtactcctcgtataccagctatagtttctgcagacaggagtaccattgatgaggccacaccaggaattgaaaatgtcatcagttctaccaagagaaaatatgaagcagccaataacgactctgctattgtcccaacaaataagtactctcctgacagagtttctggcttcgctgaagcacacaaggctggtcaagatcattgtttgttggagaccataggaactgggcatgtagcgacatgtcaacaacattcaaagaaaacaagaattcagcaaactatggaggaaggtcagactggtgtagttgatcatgagacaacgatggcatctaaagaagggaataagccagttgatttattaaacaacaatcagttatttatcgacaatatttctgaaggttcggttggaaaaactgactctacgctatctcagagaagggaggaaggccaccctaccattgatttatctaaacaagggaagccagttggtaaatccagtgcttccaagactaggaagaaaaaatataagatattagacgcagaggtgcctgctgtagcacaaaacgtttgtggtaatagtttagccctgccggaaacactgagggttgttatcactgatgattcttccttgtgtactgactctggaagagtggggataccggaagcatctgaagatattcctgctgaagttcccagtgcacaaacagaaaccaagcctgaagtgagaatgtctggaaggaccagacggaaatctcaaatgcattgcaaaacaaagcatatgtcatgcaatgaaggttcagataatttacaggcaaaaaaattgctgcactgtttgtcatccgaaccacttcgtagatggtgcacatatgagtggttctacagcgcagttgattatccatggttttcaagtaatgagtttgtgcactacttagatcatgcaaaattgagtcatctttcaaggttgactataccagaatggggtacaattcgaagctcccttggtattccacgtcgattttcaaattattttctggccgtggaaaaagaaaatcttgaggattatcgggagaaagttagaaaaatctatgctcaactcagtgatggttcaagggattttctacctgcagacctagctagaccattttcaattggtcagcaagttattgttcgtcatccaaattctagggaactttgtgatggcaaagtggtgatgatgggtccggattgttacaaggttcattttgatgatcctgacattggtgttgatattgtaaaggacactgattgtatgccagtcaactggctgtataaccgtcctgacaacatgaggagctgcctttcaaatgatgcgtacagcatactggagatggatcacattcctgaccttacagcaagtgagaatgaggatcatgctgtaaacggatctactgtacttgaggggctcaaaagtctgcgcttaacatcagatagacaacctaaggcagaatctattgtaaacagtgaaagaccaccatataggagtacatctgacagccctgcaaaatctagagattgcccagacaataatagtgctggccactacgatgagctagagtcatatatagccgcatttgcagaaagatcactatcacaagccaggcagatggttgacaaagccatgcaggcgaaccctggaggtaatgaggatgaaaaggtatgcacgtcaaatcaagtggcaggttgtgcaggcccaggttttgaacctgcccgtggcgcccaacttccttctgacctgatatcgaacggcatcgccacggttctttcaatcaagagccttagcgactcgcgacatccgtttgctaacgtagcaggcgtcttggatcacgcttgctccatgctgcgtccaagctgtccgcagaacctcgctttgtacgatcaaataaagagagacatcggtatcataaagacccagatatttgcacttatgccaacagcattgggcaattgcagccctcctgtcccgcccatgtaactgggccctgagcaagatacttccgctgccttcatgcaggccctgcagtagtacacgcttcttcctttgctgtgagtacaaaacgcagcgaacttgatgttatggaggaagtcctatgtatatacctcgatggcttaatagtttataggtatacacatattcaggatagttgacatatgattttggagtgaataaagttatgtctgtagtcatttaggatgtagtgaataaagatgtatgcctgcagtaagtggcggacccagaaattggccaaggcctgggtcgaagcgaccaaaaactctaatagtagtatataaaaaaaattgtacggcgaaacaacgttgtcatggatattaaagatgacatacaagttatgat

SEQ ID NO: 75630 - DNA, 3110 bp, Zea Mays
cgaaaggcgccctcgcgcgcgctgtttcgtctagatccgatccagcaatatttgttgagccgaaggcaaggacagttttgatgggcccatcaaagggttctcgaactattaacaagatcatagtaaaaggatctgaatatcaacagcagcatgatgatccatctagttcaagcaaagctaaacagaaaaggaggaaactctcagactttgatcccaaatggagcaaggatgaacttacaaatttttatgaagcctaccgtcaatatgggatggactggagaaagatcagcatagcgataggcactaagtcatcggacatggtgcagtctcttttcactttacatcggactttcttatctcttccagaacatcaagccactgccatgggatttattgcgctggtgactggtcatcacaatgcttcggagaaaaccacgactcatagaggatatgatcacgtagtcagagcatctggaaaggcaaggaaacatggtgaaaaaccgaaatcaattgatggacctgacctgcccaactgtcaagaagcgaaaatttctggattttcagatttattccagagtcgatactatggcgtttcttcagaattggtcaggtacatccgaaatcatgctgttcggaggcgtactcctcgtataccagctatagtttctgcagacaggagtaccattgatgaggccacaccaggaattgaaaatgtcatcagttctaccaagagaaaatatgaagcagccaataacgactctgctattgtcccaacaaataagtactctcctgacagagtttctggcttcgctgaagcacacaaggctggtcaagatcattgtttgttggagaccataggaactgggcatgtagcgacatgtcaacaacattcaaagaaaacaagaattcagcaaactatggaggaaggtcagactggtgtagttgatcatgagacaacgatggcatctaaagaagggaataagccagttgatttattaaacaacaatcagttatttatcgacaatatttctgaagatgatatgttggtcttggatgtattgtgtagcctgatgaatgcaccctctaaaatgccaaaactagagattaatattccttcaggttcggttggaaaaactgactctacgctatctcagagaagggaggaaggccaccctaccattgatttatctaaacaagggaagccagttggtaaatccagtgcttccaagactaggaagaaaaaatataagatattagacgcagaggtgcctgctgtagcacaaaacgtttgtggtaatagtttagccctgccggaaacactgagggttgttatcactgatgattcttccttgtgtactgactctggaagagtggggataccggaagcatctgaagatattcctgctgaagttcccagtgcacaaacagaaaccaagcctgaagtgagaatgtctggaaggaccagacggaaatctcaaatgcattgcaaaacaaagcatatgtcatgcaatgaaggttcagataatttacaggcaaaaaaattgctgcactgtttgtcatccgaaccacttcgtagatggtgcacatatgagtggttctacagcgcagttgattatccatggttttcaagtaatgagtttgtgcactacttagatcatgcaaaattgagtcatctttcaaggttgactataccagaatggggtacaattcgaagctcccttggtattccacgtcgattttcaaattattttctggccgtggaaaaagaaaatcttgaggattatcgggagaaagttagaaaaatctatgctcaactcagtgatggttcaagggattttctacctgcagacctagctagaccattttcaattggtcagcaagttattgttcgtcatccaaattctagggaactttgtgatggcaaagtggtgatgatgggtccggattgttacaaggttcattttgatgatcctgacattggtgttgatattgtaaaggacactgattgtatgccagtcaactggctgtataaccgtcctgacaacatgaggagctgcctttcaaatgatgcgtacagcatactggagatggatcacattcctgaccttacagcaagtgagaatgaggatcatgctgtaaacggatctactgtacttgaggggctcaaaagtctgcgcttaacatcagatagacaacctaaggcagaatctattgtaaacagtgaaagaccaccatataggagtacatctgacagccctgcaaaatctagagattgcccagacaataatagtgctggccactacgatgagctagagtcatatatagccgcatttgcagaaagatcactatcacaagccaggcagatggttgacaaagccatgcaggcgaaccctggaggtaatgaggatgaaaaggtatgcacgtcaaatcaagtggcaggttgtgcaggcccaggttttgaacctgcccgtggcgcccaacttccttctgacctgatatcgaacggcatcgccacggttctttcaatcaagagccttagcgactcgcgacatccgtttgctaacgtagcaggcgtcttggatcacgcttgctccatgctgcgtccaagctgtccgcagaacctcgctttgtacgatcaaataaagagagacatcggtatcataaagacccagatatttgcacttatgccaacagcattgggcaattgcagccctcctgtcccgcccatgtaactgggccctgagcaagatacttccgctgccttcatgcaggccctgcagtagtacacgcttcttcctttgctgtgagtacaaaacgcagcgaacttgatgttatggaggaagtcctatgtatatacctcgatggcttaatagtttataggtatacacatattcaggatagttgacatatgattttggagtgaataaagttatgtctgtagtcatttaggatgtagtgaataaagatgtatgcctgcagtaagtggcggacccagaaattggccaaggcctgggtcgaagcgaccaaaaactctaatagtagtatataaaaaaaattgtacggcgaaacaacgttgtcatggatattaaagatgacatacaagttatgat

SEQ ID NO: 75631 - DNA, 3170 bp, Zea Mays
aagcctctgcccgcgtggttgcgcctccgcggcggcgccggcgccgtctgggagcgcggctcgggcgttcgaaaggcgccctcgcgcgcgctgtttcgtctagatccgatccagcaatatttgttgagccgaaggcaaggacagttttgatgggcccatcaaagggttctcgaactattaacaagatcatagtaaaaggatctgaatatcaacagcagcatgatgatccatctagttcaagcaaagctaaacagaaaaggaggaaactctcagactttgatcccaaatggagcaaggatgaacttacaaatttttatgaagcctaccgtcaatatgggatggactggagaaagatcagcatagcgataggcactaagtcatcggacatggtgcagtctcttttcactttacatcggactttcttatctcttccagaacatcaagccactgccatgggatttattgcgctggtgactggtcatcacaatgcttcggagaaaaccacgactcatagaggatatgatcacgtagtcagagcatctggaaaggcaaggaaacatggtgaaaaaccgaaatcaattgatggacctgacctgcccaactgtcaagaagcgaaaatttctggattttcagatttattccagagtcgatactatggcgaattggtcaggtacatccgaaatcatgctgttcggaggcgtactcctcgtataccagctatagtttctgcagacaggagtaccattgatgaggccacaccaggaattgaaaatgtcatcagttctaccaagagaaaatatgaagcagccaataacgactctgctattgtcccaacaaataagtactctcctgacagagtttctggcttcgctgaagcacacaaggctggtcaagatcattgtttgttggagaccataggaactgggcatgtagcgacatgtcaacaacattcaaagaaaacaagaattcagcaaactatggaggaaggtcagactggtgtagttgatcatgagacaacgatggcatctaaagaagggaataagccagttgatttattaaacaacaatcagttatttatcgacaatatttctgaagatgatatgttggtcttggatgtattgtgtagcctgatgaatgcaccctctaaaatgccaaaactagagattaatattccttcaggttcggttggaaaaactgactctacgctatctcagagaagggaggaaggccaccctaccattgatttatctaaacaagggaagccagttggtaaatccagtgcttccaagactaggaagaaaaaatataagatattagacgcagaggtgcctgctgtagcacaaaacgtttgtggtaatagtttagccctgccggaaacactgagggttgttatcactgatgattcttccttgtgtactgactctggaagagtggggataccggaagcatctgaagatattcctgctgaagttcccagtgcacaaacagaaaccaagcctgaagtgagaatgtctggaaggaccagacggaaatctcaaatgcattgcaaaacaaagcatatgtcatgcaatgaaggttcagataatttacaggcaaaaaaattgctgcactgtttgtcatccgaaccacttcgtagatggtgcacatatgagtggttctacagcgcagttgattatccatggttttcaagtaatgagtttgtgcactacttagatcatgcaaaattgagtcatctttcaaggttgactataccagaatggggtacaattcgaagctcccttggtattccacgtcgattttcaaattattttctggccgtggaaaaagaaaatcttgaggattatcgggagaaagttagaaaaatctatgctcaactcagtgatggttcaagggattttctacctgcagacctagctagaccattttcaattggtcagcaagttattgttcgtcatccaaattctagggaactttgtgatggcaaagtggtgatgatgggtccggattgttacaaggttcattttgatgatcctgacattggtgttgatattgtaaaggacactgattgtatgccagtcaactggctgtataaccgtcctgacaacatgaggagctgcctttcaaatgatgcgtacagcatactggagatggatcacattcctgaccttacagcaagtgagaatgaggatcatgctgtaaacggatctactgtacttgaggggctcaaaagtctgcgcttaacatcagatagacaacctaaggcagaatctattgtaaacagtgaaagaccaccatataggagtacatctgacagccctgcaaaatctagagattgcccagacaataatagtgctggccactacgatgagctagagtcatatatagccgcatttgcagaaagatcactatcacaagccaggcagatggttgacaaagccatgcaggcgaaccctggaggtaatgaggatgaaaaggtatgcacgtcaaatcaagtggcaggttgtgcaggcccaggttttgaacctgcccgtggcgcccaacttccttctgacctgatatcgaacggcatcgccacggttctttcaatcaagagccttagcgactcgcgacatccgtttgctaacgtagcaggcgtcttggatcacgcttgctccatgctgcgtccaagctgtccgcagaacctcgctttgtacgatcaaataaagagagacatcggtatcataaagacccagatatttgcacttatgccaacagcattgggcaattgcagccctcctgtcccgcccatgtaactgggccctgagcaagatacttccgctgccttcatgcaggccctgcagtagtacacgcttcttcctttgctgtgagtacaaaacgcagcgaacttgatgttatggaggaagtcctatgtatatacctcgatggcttaatagtttataggtatacacatattcaggatagttgacatatgattttggagtgaataaagttatgtctgtagtcatttaggatgtagtgaataaagatgtatgcctgcagtaagtggcggacccagaaattggccaaggcctgggtcgaagcgaccaaaaactctaatagtagtatataaaaaaaattgtacggcgaaacaacgttgtcatggatattaaagatgacatacaagttatgat

SEQ ID NO: 75632 - DNA, 537 bp, Zea Mays
gtggcgttagggttacgcgagttacttcctctcccgagtcccgacctctcgtatctctcgctcgcctccctcgtccgcggtccgccgccgctccagatccagccgtgggagcggggacggggcagggcttgagcacgctctctgcagcttcaggctctgctcgtcggggtggaaggagaactcgagtgctcccaggctctcaacctccacgctctgaaccgctggtacccgagaacgagcccgtcgtcggaagggacgatgtggacaacctcgtccctggctccatgttgaggccatagagcttgaaccccgaggcggagcccttctgccagagcgcggccccgcggttgaactgctcgacgaatgcgccgaattgctccctcccggaattggagcggacgacggagtgagagaacttcttgttcctgttgtatggtttatgatgtgcgtgagtgataaaatctatgtatttgattcttctgagtgtctctgtgttaataacaagttgtcttgttcctgttgttttactgagctcaa

SEQ ID NO: 75633 - DNA, 1571 bp, Zea Mays
gcaccacacagttggggtagctatagctccgtagcagcggcggcctgcttcccggctggcgacacggagaccgaccgcccggccggcgtggagtaaccacgacgagcccgtgggcctgctgctagccgcgccggcggcgtacgcactcactcactgactgctccccgatcgcgtaccactcgtccactcctccctcgggggcccaatcaagcctggcacagcggcaccacagccgcgggcaatgatgcttcttacggcttctggtcactaaaaaggagtatcgatggcagcaagattgttgggctcaaaatctagcagtaaaaaggaaatcgacaaattgcaggaactattagttggtggagagggagagctcgacgtgacgatggcaaccaccatgtgacgttgctattgctgggcccgtgtggccgcgctgcaagtagaatcaaacaaagcaagcttgtaattgtgcaaccaaacatttttctctttaataaattatggtgacagaatatgactttgtaacaaaacaaccatatgcagattagaatgctacttattagtaccataaataaggattccaaaacactaggagggaaaatgtacagtgtgccatatatgattaagaaatatggacaaatgtaccatcacaaagacatcttctttagtaataagttcatgggaatattggtactgcaagaatcacttacaatgtgtctgttgtttcctcgtcggcactatcttggcaaaaactgtacctagtgttttttcttcttttattcagacatttagcctaatatttggaaacatgatatggcttctttcaagggtctaacgtgtgatgttgtcatggttacacataaatattagttcatacaaatcttcagaggttgctaattgtaggtgtgcttatacagttcttaaacatgtttttattctaaaaaataatttatgacaaaactgattattatcttgtttgattttgttctttgcactgctagaatttaaatgccatttatgagttatttgaaacataaaactgatttatctgaatgccagcctttggtcagacatttttacctctggaccaaatcttttgttttggagactttctttcatgcatgagacagtgctccctctctccacccccttagtactccgctaccgctcagatagcttcgccgcagccgctgtcagccggtactctgcaaagtttttttaggtttgtgaagatcagctccatctatgatcacccctcccgaacatgcatcattgtaagtgcctagtctgtgccggttagcgctaagcctccagagtttggtaacattaaagtttaagttaacagattaaggcaggctgcatcattcacgcaaggtagcaatccgactttgcggtcgcaatttatagaatcaatccgactttctagaagcaaggtagcaataagattttagttgcttctaaattccttttgtctgccaccgctaacaaccgtgcatcaacagttcagcaccaggcaccagccatgtgtaatgtgttcaataatgtcagttacaatttattgttgtacttggttg

SEQ ID NO: 75634 - DNA, 1568 bp, Zea Mays
ctcggattcgcgggcgcgggccgggaaaaggaatcaatggagagagagagcgcctagaagcgtccgcaccacacagttggggtagctatagctccgtagcagcggcggcctgcttcccggctggcgacacggagaccgaccgcccggccggcgtggagtaaccacgacgagcccgtgggcctgctgctagccgcgccggcggcgtacgcactcactcactgactgctccccgatcgcgtaccactcgtccactcctccctcgggggcccaatcaagcctggcacagcggcaccacagccgcgggcaatgatgcttcttacggcttctggtcactaaaaaggaactattagttggtggagagggagagctcgacgtgacgatggcaaccaccatgtgacgttgctattgctgggcccgtgtggccgcgctgcaagtagaatcaaacaaagcaagcttgtaattgtgcaaccaaacatttttctctttaataaattatggtgacagaatatgactttgtaacaaaacaaccatatgcagattagaatgctacttattagtaccataaataaggattccaaaacactaggagggaaaatgtacagtgtgccatatatgattaagaaatatggacaaatgtaccatcacaaagacatcttctttagtaataagttcatgggaatattggtactgcaagaatcacttacaatgtgtctgttgtttcctcgtcggcactatcttggcaaaaactgtacctagtgttttttcttcttttattcagacatttagcctaatatttggaaacatgatatggcttctttcaagggtctaacgtgtgatgttgtcatggttacacataaatattagttcatacaaatcttcagaggttgctaattgtaggtgtgcttatacagttcttaaacatgtttttattctaaaaaataatttatgacaaaactgattattatcttgtttgattttgttctttgcactgctagaatttaaatgccatttatgagttatttgaaacataaaactgatttatctgaatgccagcctttggtcagacatttttacctctggaccaaatcttttgttttggagactttctttcatgcatgagacagtgctccctctctccacccccttagtactccgctaccgctcagatagcttcgccgcagccgctgtcagccggtactctgcaaagtttttttaggtttgtgaagatcagctccatctatgatcacccctcccgaacatgcatcattgtaagtgcctagtctgtgccggttagcgctaagcctccagagtttggtaacattaaagtttaagttaacagattaaggcaggctgcatcattcacgcaaggtagcaatccgactttgcggtcgcaatttatagaatcaatccgactttctagaagcaaggtagcaataagattttagttgcttctaaattccttttgtctgccaccgctaacaaccgtgcatcaacagttcagcaccaggcaccagccatgtgtaatgtgttcaataatgtcagttacaatttattgttgtacttggttg

SEQ ID NO: 75635 - DNA, 1960 bp, Zea Mays
ggacacgtcgcgcgcagcgcaggcgcggcgggcagtacggcgaggaggaggggagaaaggtctctcggattcgcgggcgcgggccgggaaaaggaatcaatggagagagagagcgcctagaagcgtccgcaccacacagttggggtagctatagctccgtagcagcggcggcctgcttcccggctggcgacacggagaccgaccgcccggccggcgtggagtaaccacgacgagcccgtgggcctgctgctagccgcgccggcggcgtacgcactcactcactgactgctccccgatcgcgtaccactcgtccactcctccctcgggggcccaatcaagcctggcacagcggcaccacagccgcgggcaatgatgcttcttacggcttctggtcactaaaaaggagtatcgatggcagcaagattgttgggctcaaaatctagcagtaaaaaggaaatcgacaaattgcaggttagttatcgcattgttagtcaactcaaatatatgcaccaatttcatttcacgcctgaaaagttatgacagaaaagaagcactattttgtaactggggatagttgcaagcagtccagggttaaccgattgcagagaataaacaatgcatgtccaaatacagtatgtagtttatataatactaagaaagaaagaaagacaaaatacatgtaccacttgtgaatccctatatgctcttaatgaatttctgctccaccgtcaggaactattagttggtggagagggagagctcgacgtgacgatggcaaccaccatgtgacgttgctattgctgggcccgtgtggccgcgctgcaagtagaatcaaacaaagcaagcttgtaattgtgcaaccaaacatttttctctttaataaattatggtgacagaatatgactttgtaacaaaacaaccatatgcagattagaatgctacttattagtaccataaataaggattccaaaacactaggagggaaaatgtacagtgtgccatatatgattaagaaatatggacaaatgtaccatcacaaagacatcttctttagtaataagttcatgggaatattggtactgcaagaatcacttacaatgtgtctgttgtttcctcgtcggcactatcttggcaaaaactgtacctagtgttttttcttcttttattcagacatttagcctaatatttggaaacatgatatggcttctttcaagggtctaacgtgtgatgttgtcatggttacacataaatattagttcatacaaatcttcagaggttgctaattgtaggtgtgcttatacagttcttaaacatgtttttattctaaaaaataatttatgacaaaactgattattatcttgtttgattttgttctttgcactgctagaatttaaatgccatttatgagttatttgaaacataaaactgatttatctgaatgccagcctttggtcagacatttttacctctggaccaaatcttttgttttggagactttctttcatgcatgagacagtgctccctctctccacccccttagtactccgctaccgctcagatagcttcgccgcagccgctgtcagccggtactctgcaaagtttttttaggtttgtgaagatcagctccatctatgatcacccctcccgaacatgcatcattgtaagtgcctagtctgtgccggttagcgctaagcctccagagtttggtaacattaaagtttaagttaacagattaaggcaggctgcatcattcacgcaaggtagcaatccgactttgcggtcgcaatttatagaatcaatccgactttctagaagcaaggtagcaataagattttagttgcttctaaattccttttgtctgccaccgctaacaaccgtgcatcaacagttcagcaccaggcaccagccatgtgtaatgtgttcaataatgtcagttacaatttattgttgtacttggttg

SEQ ID NO: 75636 - DNA, 1150 bp, Zea Mays
cattggagctttgtttggcaaggttgcaaaacaatgacctccaactaatacaacccacaacagctgaagaagaaattcagctttctcaaccaccaaatttggaagacaagaccgttgaaaagctgctcaacatagatccggatatgtttcccgcagaaggctatagatgtattgttactatatcacgcatcgtgcaaaatagcagatggtggtacccatcttgctccaggtgccacaaatcttcatctcaaatctcaactggatatcactgcacatcatgtggctgcacaaatattaagtttagatacaagctcagcttcattgctactgatggaacatgcgaagcagagttcttttttttgatagcatagccagaaaaatagtaggagaaccttagggcaaccttgttacagcagttacaacttctgagagtcccagcagccctagccgctattgtgtgtctgaaatttactcttgcagttgccatcaatatgtcagcctactatgtcatgaacagagtattctctattctatctattttaacaaatcatggaagacagaccttcataccatctaacatgcctagccatcctcaacaagagttgtatacacaagatgaagtacctagccttccggtcggccacacaagactctccagcaacatcaatggcaaaactatctacctgtagcaacgaaagaaacgaggcacgatgacgtgttctaatatattcagatatgccacatgacacagagggtgatgacagcgcataagtgaactcaacaagcaagagatatcgtcaccaccaaaatggtgtttgctttttgcgcacctatcaggagcaccatcacttttggatcatgaatgctttcctatagatatgaacctactgttatactatttgtggatatgtacatattgacttaacacctgcaagcacattgttgctaagtgttgatgtatggtagttgaatgctacttagtatgtattgtagtctaaatccactctacagctggtatcaactattatataaaaacaacgtcatatgcttatatttggtttcctccttacgcattatatactcatattatgtttaaatatttgttttacatacctgggtagtcacgccaaacccttaagctatatgtgct

SEQ ID NO: 75637 - DNA, 2298 bp, Zea Mays
ctctcccagttctttctcgctttttctcctctctgcttttctttgttaccgtcggtgtcgggaattccgcttccgcacaaatatttcttttgctgtcagcttgctcaacggttctgtttgtttgatcaatacgtgtagccaggtcaacacatacaggttgtgtttgttgctacgtaaagaatgtcatctaggcacgaggactactatctctaatcattggagctttgtttggcaaggtcaaccatacctaaggggtactacaacaagttcatgatacttcaagcctggaattcctgaggcgcatacctactacaacaggcaaaacaaaataaattttggatacagttccttctaacactcactatttttataccacatttcaaatctgctcctctctaatcttatacccatagttagctaacagtttaataaacaacagtctactaagctagcagtagcaatatttaaactaaaattgtaaataaaccttgttttttaccattacctctttatatattacattcagaccagtttggtctccctcttcagacaatattcaatacttatatttattttttaactaaaactaatagccacggtttcatttcgttttttctataaacaaatcactgatagatgttactgcaaaagaaaaatcgcagctgactagaatcagtgtctacaaaacagttcatttttaaacggtgttataattgcttgtatttcttagacactatttcaatttttttaaatgatgatacatgctatcctctttttcctaaagcgggttacaggacatcctattgtcttcaaatttttttaaataaaagtattgttcatactactcatgcacaacttcaatacaaaacaaattaaggtacacaccctctccttttttgattgaactcttaggataccatgttctctttaaaaaaccaaaaaaatatttagatgttgagccaatcgttcacatcacactgtttacgccaaaatagaaaatataagaggaactttaacaaaaaatactaaaactaagtcttatctgatcatggttgtgacatcacttgaaggttgcaaaacaatgacctccaactaatacaacccacaacagctgaagaagaaattcagctttctcaaccaccaaatttggaagacaagaccgttgaaaagctgctcaacatagatccggatatgtttcccgcagaaggctatagatgtattgttactatatcacgcatcgtgcaaaatagcagatggtggtacccatcttgctccaggtgccacaaatcttcatctcaaatctcaactggatatcactgcacatcatgtggctgcacaaatattaagtttagatacaagctcagcttcattgctactgatggaacatgcgaagcagagttcttttttttgatagcatagccagaaaaatagtaggagaaccttagggcaaccttgttacagcagttacaacttctgagagtcccagcagccctagccgctattgtgtgtctgaaatttactcttgcagttgccatcaatatgtcagcctactatgtcatgaacagagtattctctattctatctattttaacaaatcatggaagacagaccttcataccatctaacatgcctagccatcctcaacaagagttgtatacacaagatgaagtacctagccttccggtcggccacacaagactctccagcaacatcaatggcaaaactatctacctgtagcaacgaaagaaacgagtctattcaacaggcacgatgacgtgttctaatatattcagatatgccacatgacacagagggtgatgacagcgcataagtgaactcaacaagcaagagatatcgtcaccaccaaaatggataaaacatagccacactagcaaaggcataccagatcttacaaaccccaaaaagaaaagctcctaaatcgtcatcaacttcgtgaaggtgtttgctttttgcgcacctatcaggagcaccatcacttttggatcatgaatgctttcctatagatatgaacctactgttatactatttgtggatatgtacatattgacttaacacctgcaagcacattgttgctaagtgttgatgtatggtagttgaatgctacttagtatgtattgtagtctaaatccactctacagctggtatcaactattatataaaaacaacgtcatatgcttatatttggtttcctccttacgcattatatactcatattatgtttaaatatttgttttacatacctgggtagtcacgccaaacccttaagctatatgtgct

SEQ ID NO: 75638 - DNA, 1534 bp, Zea Mays
ctctcccagttctttctcgctttttctcctctctgcttttctttgttaccgtcggtgtcgggaattccgcttccgcacaaatatttcttttgctgtcagcttgctcaacggttctgtttgtttgatcaatacgtgtagccaggtcaacacatacaggttgtgtttgttgctacgtaaagaatgtcatctaggcacgaggactactatctctaatcattggagctttgtttggcaaggtcaaccatacctaaggggtactacaacaagttcatgatacttcaagcctggaattcctgaggcgcatacctactacaacaggttgcaaaacaatgacctccaactaatacaacccacaacagctgaagaagaaattcagctttctcaaccaccaaatttggaagacaagaccgttgaaaagctgctcaacatagatccggatatgtttcccgcagaaggctatagatgtattgttactatatcacgcatcgtgcaaaatagcagatggtggtacccatcttgctccaggtgccacaaatcttcatctcaaatctcaactggatatcactgcacatcatgtggctgcacaaatattaagtttagatacaagctcagcttcattgctactgatggaacatgcgaagcagagttcttttttttgatagcatagccagaaaaatagtaggagaaccttagggcaaccttgttacagcagttacaacttctgagagtcccagcagccctagccgctattgtgtgtctgaaatttactcttgcagttgccatcaatatgtcagcctactatgtcatgaacagagtattctctattctatctattttaacaaatcatggaagacagaccttcataccatctaacatgcctagccatcctcaacaagagttgtatacacaagatgaagtacctagccttccggtcggccacacaagactctccagcaacatcaatggcaaaactatctacctgtagcaacgaaagaaacgaggcacgatgacgtgttctaatatattcagatatgccacatgacacagagggtgatgacagcgcataagtgaactcaacaagcaagagatatcgtcaccaccaaaatggataaaacatagccacactagcaaaggcataccagatcttacaaaccccaaaaagaaaagctcctaaatcgtcatcaacttcgtgaaggtgtttgctttttgcgcacctatcaggagcaccatcacttttggatcatgaatgctttcctatagatatgaacctactgttatactatttgtggatatgtacatattgacttaacacctgcaagcacattgttgctaagtgttgatgtatggtagttgaatgctacttagtatgtattgtagtctaaatccactctacagctggtatcaactattatataaaaacaacgtcatatgcttatatttggtttcctccttacgcattatatactcatattatgtttaaatatttgttttacatacctgggtagtcacgccaaacccttaagctatatgtgct

SEQ ID NO: 75639 - DNA, 2429 bp, Zea Mays
ctctcccagttctttctcgctttttctcctctctgcttttctttgttaccgtcggtgtcgggaattccgcttccgcacaaatatttcttttgctgtcagcttgctcaacggttctgtttgtttggtgagatgtgttcctctttctcctttgttgtgagtttccatttggtaggcatccttttccagattccttcgtggattagatccacgctcctctcgtcgagatcgtcttgctttttttctgagatggagattgggaccgaaaagatcaatacgtgtagccaggtcaacacatacaggttgtgtttgttgctacgtaaagaatgtcatctaggcacgaggactactatctctaatcattggagctttgtttggcaaggtcaaccatacctaaggggtactacaacaagttcatgatacttcaagcctggaattcctgaggcgcatacctactacaacaggcaaaacaaaataaattttggatacagttccttctaacactcactatttttataccacatttcaaatctgctcctctctaatcttatacccatagttagctaacagtttaataaacaacagtctactaagctagcagtagcaatatttaaactaaaattgtaaataaaccttgttttttaccattacctctttatatattacattcagaccagtttggtctccctcttcagacaatattcaatacttatatttattttttaactaaaactaatagccacggtttcatttcgttttttctataaacaaatcactgatagatgttactgcaaaagaaaaatcgcagctgactagaatcagtgtctacaaaacagttcatttttaaacggtgttataattgcttgtatttcttagacactatttcaatttttttaaatgatgatacatgctatcctctttttcctaaagcgggttacaggacatcctattgtcttcaaatttttttaaataaaagtattgttcatactactcatgcacaacttcaatacaaaacaaattaaggtacacaccctctccttttttgattgaactcttaggataccatgttctctttaaaaaaccaaaaaaatatttagatgttgagccaatcgttcacatcacactgtttacgccaaaatagaaaatataagaggaactttaacaaaaaatactaaaactaagtcttatctgatcatggttgtgacatcacttgaaggttgcaaaacaatgacctccaactaatacaacccacaacagctgaagaagaaattcagctttctcaaccaccaaatttggaagacaagaccgttgaaaagctgctcaacatagatccggatatgtttcccgcagaaggctatagatgtattgttactatatcacgcatcgtgcaaaatagcagatggtggtacccatcttgctccaggtgccacaaatcttcatctcaaatctcaactggatatcactgcacatcatgtggctgcacaaatattaagtttagatacaagctcagcttcattgctactgatggaacatgcgaagcagagttcttttttttgatagcatagccagaaaaatagtaggagaaccttagggcaaccttgttacagcagttacaacttctgagagtcccagcagccctagccgctattgtgtgtctgaaatttactcttgcagttgccatcaatatgtcagcctactatgtcatgaacagagtattctctattctatctattttaacaaatcatggaagacagaccttcataccatctaacatgcctagccatcctcaacaagagttgtatacacaagatgaagtacctagccttccggtcggccacacaagactctccagcaacatcaatggcaaaactatctacctgtagcaacgaaagaaacgaggcacgatgacgtgttctaatatattcagatatgccacatgacacagagggtgatgacagcgcataagtgaactcaacaagcaagagatatcgtcaccaccaaaatggataaaacatagccacactagcaaaggcataccagatcttacaaaccccaaaaagaaaagctcctaaatcgtcatcaacttcgtgaaggtgtttgctttttgcgcacctatcaggagcaccatcacttttggatcatgaatgctttcctatagatatgaacctactgttatactatttgtggatatgtacatattgacttaacacctgcaagcacattgttgctaagtgttgatgtatggtagttgaatgctacttagtatgtattgtagtctaaatccactctacagctggtatcaactattatataaaaacaacgtcatatgcttatatttggtttcctccttacgcattatatactcatattatgtttaaatatttgttttacatacctgggtagtcacgccaaacccttaagctatatgtgct

SEQ ID NO: 75640 - DNA, 2727 bp, Zea Mays
ctctcccagttctttctcgctttttctcctctctgcttttctttgttaccgtcggtgtcgggaattccgcttccgcacaaatatttcttttgctgtcagcttgctcaacggttctgtttgtttggtgagatgtgttcctctttctcctttgttgtgagtttccatttggtaggcatccttttccagattccttcgtggattagatccacgctcctctcgtcgagatcgtcttgctttttttctgagatggagattgggaccgaaaaggcaagtatttttctttggtagttttggcatgtgcagatagatcagaaagtgcttctacagtttacctcatttaactctattttggagattgaaactgaaaaggcaagtatttctttttggtaaagtctttcgcaagtggacatctagttccaaatttttttaaagggatctggttccaaattcatgcttggacctgccaggattctattgtttttggcgtatcctcttgctttggtacatgtagatcagcaagcaaatgtttttttatttcatttaatttcaatgagtgcaggtgacgttctgtttgtactttattgaacttcattatactattttcttttggtaaagttgttcgcatcaagtgcatgttgcattctttttagtttttaacggttctgctttcagcttgctcttgggtgcatttattttttagctgtgtttccattcctccaactgtgttttcattcttcctttgtcgaccatttcgactttgtggacaactaatttcctttgggtgaaatgatctgcacgaagttgagacttcgctttattttgtttatggacgcatcaagattccaacacgccgttatttttcttcgctggtttagtaatgaggaaatcccttttacggccctaattttagggtttagagttttaactgatatttttttaaaagttgttcctctctggtcccaactccatactatggtgtgtaaatttgccgcatcgctttttttttctggaaagctctaaaaataaggaaattatttgcacagttttttaataaaagatagcatcttgcacggttgctttttagagaaagaaaagtaaccaaattcggttttgtccaaattagtttcaatttgatactttctcacgttttacttcatgtttttatcgtttgggtttactaaattgcttagagttcaacatctttccctcagaactcactttttttgtctttgttcgactttcatagaattagatacaatttcctgctcgttccacacaaatttcctcctctcattgtttttatgtgagtttccttagatcaatacgtgtagccaggtcaacacatacaggttgtgtttgttgctacgtaaagaatgtcatctaggcacgaggactactatctctaatcattggagctttgtttggcaaggtcaaccatacctaaggggtactacaacaagttcatgatacttcaagcctggaattcctgaggcgcatacctactacaacaggttgcaaaacaatgacctccaactaatacaacccacaacagctgaagaagaaattcagctttctcaaccaccaaatttggaagacaagaccgttgaaaagctgctcaacatagatccggatatgtttcccgcagaaggctatagatgtattgttactatatcacgcatcgtgcaaaatagcagatggtggtacccatcttgctccaggtgccacaaatcttcatctcaaatctcaactggatatcactgcacatcatgtggctgcacaaatattaagtttagatacaagctcagcttcattgctactgatggaacatgcgaagcagagttcttttttttgatagcatagccagaaaaatagtaggagaaccttagggcaaccttgttacagcagttacaacttctgagagtcccagcagccctagccgctattgtgtgtctgaaatttactcttgcagttgccatcaatatgtcagcctactatgtcatgaacagagtattctctattctatctattttaacaaatcatggaagacagaccttcataccatctaacatgcctagccatcctcaacaagagttgtatacacaagatgaagtacctagccttccggtcggccacacaagactctccagcaacatcaatggcaaaactatctacctgtagcaacgaaagaaacgaggcacgatgacgtgttctaatatattcagatatgccacatgacacagagggtgatgacagcgcataagtgaactcaacaagcaagagatatcgtcaccaccaaaatggataaaacatagccacactagcaaaggcataccagatcttacaaaccccaaaaagaaaagctcctaaatcgtcatcaacttcgtgaaggtgtttgctttttgcgcacctatcaggagcaccatcacttttggatcatgaatgctttcctatagatatgaacctactgttatactatttgtggatatgtacatattgacttaacacctgcaagcacattgttgctaagtgttgatgtatggtagttgaatgctacttagtatgtattgtagtctaaatccactctacagctggtatcaactattatataaaaacaacgtcatatgcttatatttggtttcctccttacgcattatatactcatattatgtttaaatatttgttttacatacctgggtagtcacgccaaacccttaagctatatgtgct

SEQ ID NO: 75641 - DNA, 2639 bp, Zea Mays
ctctcccagttctttctcgctttttctcctctctgcttttctttgttaccgtcggtgtcgggaattccgcttccgcacaaatatttcttttgctgtcagcttgctcaacggttctgtttgtttggtgagatgtgttcctctttctcctttgttgtgagtttccatttggtaggcatccttttccagattccttcgtggattagatccacgctcctctcgtcgagatcgtcttgctttttttctgagatggagattgggaccgaaaaggcaagtatttttctttggtagttttggcatgtgcagatagatcagaaagtgcttctacagtttacctcatttaactctattttggagattgaaactgaaaaggcaagtatttctttttggtaaagtctttcgcaagtggacatctagttccaaatttttttaaagggatctggttccaaattcatgcttggacctgccaggattctattgtttttggcgtatcctcttgctttggtacatgtagatcagcaagcaaatgtttttttatttcatttaatttcaatgagtgcaggtgacgttctgtttgtactttattgaacttcattatactattttcttttggtaaagttgttcgcatcaagtgcatgttgcattctttttagtttttaacggttctgctttcagcttgctcttgggtgcatttattttttagctgtgtttccattcctccaactgtgttttcattcttcctttgtcgaccatttcgactttgtggacaactaatttcctttgggtgaaatgatctgcacgaagttgagacttcgctttattttgtttatggacgcatcaagattccaacacgccgttatttttcttcgctggtttagtaatgaggaaatcccttttacggccctaattttagggtttagagttttaactgatatttttttaaaagttgttcctctctggtcccaactccatactatggtgtgtaaatttgccgcatcgctttttttttctggaaagctctaaaaataaggaaattatttgcacagttttttaataaaagatagcatcttgcacggttgctttttagagaaagaaaagtaaccaaattcggttttgtccaaattagtttcaatttgatactttctcacgttttacttcatgtttttatcgtttgggtttactaaattgcttagagttcaacatctttccctcagaactcactttttttgtctttgttcgactttcatagaattagatacaatttcctgctcgttccacacaaatttcctcctctcattgtttttatgtgagtttccttagatcaatacgtgtagccaggtcaacacatacaggttgtgtttgttgctacgtaaagaatgtcatctaggcacgaggactactatctctaatcattggagctttgtttggcaaggtcaaccatacctaaggggtactacaacaagttcatgatacttcaagcctggaattcctgaggcgcatacctactacaacaggttgcaaaacaatgacctccaactaatacaacccacaacagctgaagaagaaattcagctttctcaaccaccaaatttggaagacaagaccgttgaaaagctgctcaacatagatccggatatgtttcccgcagaaggctatagatgtattgttactatatcacgcatcgtgcaaaatagcagatggtggtacccatcttgctccaggtgccacaaatcttcatctcaaatctcaactggatatcactgcacatcatgtggctgcacaaatattaagtttagatacaagctcagcttcattgctactgatggaacatgcgaagcagagttcttttttttgatagcatagccagaaaaatagtaggagaaccttagggcaaccttgttacagcagttacaacttctgagagtcccagcagccctagccgctattgtgtgtctgaaatttactcttgcagttgccatcaatatgtcagcctactatgtcatgaacagagtattctctattctatctattttaacaaatcatggaagacagaccttcataccatctaacatgcctagccatcctcaacaagagttgtatacacaagatgaagtacctagccttccggtcggccacacaagactctccagcaacatcaatggcaaaactatctacctgtagcaacgaaagaaacgaggcacgatgacgtgttctaatatattcagatatgccacatgacacagagggtgatgacagcgcataagtgaactcaacaagcaagagatatcgtcaccaccaaaatggtgtttgctttttgcgcacctatcaggagcaccatcacttttggatcatgaatgctttcctatagatatgaacctactgttatactatttgtggatatgtacatattgacttaacacctgcaagcacattgttgctaagtgttgatgtatggtagttgaatgctacttagtatgtattgtagtctaaatccactctacagctggtatcaactattatataaaaacaacgtcatatgcttatatttggtttcctccttacgcattatatactcatattatgtttaaatatttgttttacatacctgggtagtcacgccaaacccttaagctatatgtgct

SEQ ID NO: 75642 - DNA, 1340 bp, Zea Mays
ctctcccagttctttctcgctttttctcctctctgcttttctttgttaccgtcggtgtcgggaattccgcttccgcacaaatatttcttttgctgtcagcttgctcaacggttctgtttgtttgatcaatacgtgtagccaggtcaacacatacaggttgtgtttgttgctacgtaaagaatgtcatctaggcacgaggactactatctctaatcattggagctttgtttggcaaggtcaaccatacctaaggggtactacaacaagttcatgatacttcaagcctggaattcctgaggcgcatacctactacaacaggttgcaaaacaatgacctccaactaatacaacccacaacagctgaagaagaaattcagctttctcaaccaccaaatttggaagacaagaccgttgaaaagctgctcaacatagatccggatatgtttcccgcagaaggctatagatgtattgttactatatcacgcatcgtgcaaaatagcagatggtggtacccatcttgctccaggtgccacaaatcttcatctcaaatctcaactggatatcactgcacatcatgtggctgcacaaatattaagtttagatacaagctcagcttcattgctactgatggaacatgcgaagcagagttcttttttttgatagcatagccagaaaaatagtaggagaaccttagggcaaccttgttacagcagttacaacttctgagagtcccagcagccctagccgctattgtgtgtctgaaatttactcttgcagttgccatcaatatgtcagcctactatgtcatgaacagagtattctctattctatctattttaacaaatcatggaagacagaccttcataccatctaacatgcctagccatcctcaacaagagttgtatacacaagatgaagtacctagccttccggtcggccacacaagactctccagcaacatcaatggcaaaactatctacctgtagcaacgaaagaaacgaggtgtttgctttttgcgcacctatcaggagcaccatcacttttggatcatgaatgctttcctatagatatgaacctactgttatactatttgtggatatgtacatattgacttaacacctgcaagcacattgttgctaagtgttgatgtatggtagttgaatgctacttagtatgtattgtagtctaaatccactctacagctggtatcaactattatataaaaacaacgtcatatgcttatatttggtttcctccttacgcattatatactcatattatgtttaaatatttgttttacatacctgggtagtcacgccaaacccttaagctatatgtgct

SEQ ID NO: 75643 - DNA, 2318 bp, Zea Mays
gatatctctctccatccgtcgggtgtcccttcctctcccagttctttctcgctttttctcctctctgcttttctttgttaccgtcggtgtcgggaattccgcttccgcacaaatatttcttttgctgtcagcttgctcaacggttctgtttgtttgatcaatacgtgtagccaggtcaacacatacaggttgtgtttgttgctacgtaaagaatgtcatctaggcacgaggactactatctctaatcattggagctttgtttggcaaggtcaaccatacctaaggggtactacaacaagttcatgatacttcaagcctggaattcctgaggcgcatacctactacaacaggcaaaacaaaataaattttggatacagttccttctaacactcactatttttataccacatttcaaatctgctcctctctaatcttatacccatagttagctaacagtttaataaacaacagtctactaagctagcagtagcaatatttaaactaaaattgtaaataaaccttgttttttaccattacctctttatatattacattcagaccagtttggtctccctcttcagacaatattcaatacttatatttattttttaactaaaactaatagccacggtttcatttcgttttttctataaacaaatcactgatagatgttactgcaaaagaaaaatcgcagctgactagaatcagtgtctacaaaacagttcatttttaaacggtgttataattgcttgtatttcttagacactatttcaatttttttaaatgatgatacatgctatcctctttttcctaaagcgggttacaggacatcctattgtcttcaaatttttttaaataaaagtattgttcatactactcatgcacaacttcaatacaaaacaaattaaggtacacaccctctccttttttgattgaactcttaggataccatgttctctttaaaaaaccaaaaaaatatttagatgttgagccaatcgttcacatcacactgtttacgccaaaatagaaaatataagaggaactttaacaaaaaatactaaaactaagtcttatctgatcatggttgtgacatcacttgaaggttgcaaaacaatgacctccaactaatacaacccacaacagctgaagaagaaattcagctttctcaaccaccaaatttggaagacaagaccgttgaaaagctgctcaacatagatccggatatgtttcccgcagaaggctatagatgtattgttactatatcacgcatcgtgcaaaatagcagatggtggtacccatcttgctccaggtgccacaaatcttcatctcaaatctcaactggatatcactgcacatcatgtggctgcacaaatattaagtttagatacaagctcagcttcattgctactgatggaacatgcgaagcagagttcttttttttgatagcatagccagaaaaatagtaggagaaccttagggcaaccttgttacagcagttacaacttctgagagtcccagcagccctagccgctattgtgtgtctgaaatttactcttgcagttgccatcaatatgtcagcctactatgtcatgaacagagtattctctattctatctattttaacaaatcatggaagacagaccttcataccatctaacatgcctagccatcctcaacaagagttgtatacacaagatgaagtacctagccttccggtcggccacacaagactctccagcaacatcaatggcaaaactatctacctgtagcaacgaaagaaacgaggcacgatgacgtgttctaatatattcagatatgccacatgacacagagggtgatgacagcgcataagtgaactcaacaagcaagagatatcgtcaccaccaaaatggataaaacatagccacactagcaaaggcataccagatcttacaaaccccaaaaagaaaagctcctaaatcgtcatcaacttcgtgaaggtgtttgctttttgcgcacctatcaggagcaccatcacttttggatcatgaatgctttcctatagatatgaacctactgttatactatttgtggatatgtacatattgacttaacacctgcaagcacattgttgctaagtgttgatgtatggtagttgaatgctacttagtatgtattgtagtctaaatccactctacagctggtatcaactattatataaaaacaacgtcatatgcttatatttggtttcctccttacgcattatatactcatattatgtttaaatatttgttttacatacctgggtagtcacgccaaacccttaagctatatgtgct

SEQ ID NO: 75644 - DNA, 2144 bp, Zea Mays
gatatctctctccatccgtcgggtgtcccttcctctcccagttctttctcgctttttctcctctctgcttttctttgttaccgtcggtgtcgggaattccgcttccgcacaaatatttcttttgctgtcagcttgctcaacggttctgtttgtttggcgcatacctactacaacaggcaaaacaaaataaattttggatacagttccttctaacactcactatttttataccacatttcaaatctgctcctctctaatcttatacccatagttagctaacagtttaataaacaacagtctactaagctagcagtagcaatatttaaactaaaattgtaaataaaccttgttttttaccattacctctttatatattacattcagaccagtttggtctccctcttcagacaatattcaatacttatatttattttttaactaaaactaatagccacggtttcatttcgttttttctataaacaaatcactgatagatgttactgcaaaagaaaaatcgcagctgactagaatcagtgtctacaaaacagttcatttttaaacggtgttataattgcttgtatttcttagacactatttcaatttttttaaatgatgatacatgctatcctctttttcctaaagcgggttacaggacatcctattgtcttcaaatttttttaaataaaagtattgttcatactactcatgcacaacttcaatacaaaacaaattaaggtacacaccctctccttttttgattgaactcttaggataccatgttctctttaaaaaaccaaaaaaatatttagatgttgagccaatcgttcacatcacactgtttacgccaaaatagaaaatataagaggaactttaacaaaaaatactaaaactaagtcttatctgatcatggttgtgacatcacttgaaggttgcaaaacaatgacctccaactaatacaacccacaacagctgaagaagaaattcagctttctcaaccaccaaatttggaagacaagaccgttgaaaagctgctcaacatagatccggatatgtttcccgcagaaggctatagatgtattgttactatatcacgcatcgtgcaaaatagcagatggtggtacccatcttgctccaggtgccacaaatcttcatctcaaatctcaactggatatcactgcacatcatgtggctgcacaaatattaagtttagatacaagctcagcttcattgctactgatggaacatgcgaagcagagttcttttttttgatagcatagccagaaaaatagtaggagaaccttagggcaaccttgttacagcagttacaacttctgagagtcccagcagccctagccgctattgtgtgtctgaaatttactcttgcagttgccatcaatatgtcagcctactatgtcatgaacagagtattctctattctatctattttaacaaatcatggaagacagaccttcataccatctaacatgcctagccatcctcaacaagagttgtatacacaagatgaagtacctagccttccggtcggccacacaagactctccagcaacatcaatggcaaaactatctacctgtagcaacgaaagaaacgaggcacgatgacgtgttctaatatattcagatatgccacatgacacagagggtgatgacagcgcataagtgaactcaacaagcaagagatatcgtcaccaccaaaatggataaaacatagccacactagcaaaggcataccagatcttacaaaccccaaaaagaaaagctcctaaatcgtcatcaacttcgtgaaggtgtttgctttttgcgcacctatcaggagcaccatcacttttggatcatgaatgctttcctatagatatgaacctactgttatactatttgtggatatgtacatattgacttaacacctgcaagcacattgttgctaagtgttgatgtatggtagttgaatgctacttagtatgtattgtagtctaaatccactctacagctggtatcaactattatataaaaacaacgtcatatgcttatatttggtttcctccttacgcattatatactcatattatgtttaaatatttgttttacatacctgggtagtcacgccaaacccttaagctatatgtgct

SEQ ID NO: 75645 - DNA, 1612 bp, Zea Mays
ttttttttttaagtacaacaaaataagctgtaggggaatgctgggtcttaataaacagattacatcaacatcaacaacaaaatgggggtagtaatccacaagcaggttgcaatcgccaactagccggatgcatagtgcacaggcgacggaagaacttgaaacaacatcaaactgaacttgttgcggaatcacaggaacaccaaagctggaaatccggccagtcttcgtcgtcaccgtcggccctcgccatgcttcgcagcacacaagagggcacaaaccgccgccgccgccgccgcctacgacatctacacttccttacatattttcttttccttggaaattttccgctacctcaagaaccccaaaacaaatccaccccctagcatcagccctccacccaaccagccgagaatattcacagggcgatagatatctatgtacagggtaattagcggaattatctggaaccaaaggggaacatttttttatgccatccttctctgttacggcttaccagttaccaccaccttttctccactgctatgcagcaccgacccgccgccgaagccgcctcagttgatgaggtcggagacccacccgacgtcggggccaccggttccggcagctgggtagcaggaaacagcgccctccctgctgagccgctcgaacaccttggcgcggagggcccgcccggactccaccctctccacgggctcctcgtcgccgccgaagctgacgtcaagcggctccaggttgggcatgtagccggaggcggtggcgagggctgtcggggtggagggcaggctgtagagcccgcccgctgtgggcgacccgtaggcagccgcggacgccgggtagcccggggagccgtcgtaggactcgggcagcgcgccggcgcccctggggctggcgctagactgctgcggcgtgggcgggagcacccgcagctggtccggggtgtgcgcgaagaagcagacgcggcggcggcaggccgtgccgtccttgcagggctgggtgcggtagcgcgccgggtggagccagcactcgaagacgccgtgcgcgaagtcgcaggcgtcgccgcgcctgcacccgcccttgcggaagtccgggcaggcggcgcccgagtagtggtacctgcgcgggtcgcgccgccgcgccttctcccccgggtgcgcgaaggggcactcggtccagtcgtggctgcgcgcgcgggcgcaccgccggaccttgaactcgtacatgcggaactcgtcgcagccgtagccgtccacgcccgcggccatggccgccgcctcctcgtcgtccgcctcggcggcgccggcgtcgttgcacggcaggtactgccgcagcgccgccagcaggtacggcgtcatctcgtcgccgccgacgccggcgtcgacgccgctcacggggacgtggtgggaccacggcggcacgctcacgccttcgcccatcatcatcatggcgatcttccctggcctgtcgctaggatcgggctctgtttcgttccttccctcgccactggtctacgggagatctcgtggactgagcttatatccctgtgtggctgtgttgtgtgagaaagaccggtgggcagtgtgtgggttgggga

SEQ ID NO: 75646 - DNA, 593 bp, Zea Mays
ctggtggtactgcatcggtagcattctagtttttgcttaattgaatggtagcattctggtggacagtctggttcactatttttcattttggccccatggtagtgattgtggtatagtgaatgtgaacatacctactaatggtgctgaaattggtggagcatttggtggagaaaaagcagctggtggtggacgagaagcagggagtgattcctggaagcagtacatgaggagggcgacttggagggaggtcctagaggcagtaagtcacttgtttactccatgatgacaatagcaagcagatcgcggtggtgcctatggatgctacaataagaaagatcaaaagttcttttggatggatgcagctagatattttgttttgtattttctccaaaagagaaatttgcaacgttgtgaatgatattataattgtgatgcttttgtgaatatataattgtggtgcttttgtgtttatgtgatggatctatgactgtggtatactgattaactgtgtatgtctttatgatttgtgtataaaaatctgtgatttgtagtgcttaattaaatatatattattattaataacaactgtaaaa

SEQ ID NO: 75647 - DNA, 1223 bp, Zea Mays
gcatgattgatttttggttattgaatacttcaacacgagctgctgctacaattcaaatccagacatcagtgctaggcccagcccatctaagcccaaacctaatggcgctggcagcctctagccctctacacgccgtccctcctgctcctgctctccacacgccgccggagaaacgcgacggaacgcccagcacgggctgcacggcaggtcggcactcggcagcacatccctcccggtggtccggccctccgccgtcccagcacgacagcacttccggcgaccaggtcccaggctcccagcgtccggcggtcccagcagtctagcacggcagtcgacagcacttcgggaccacggctccacgcgttctgctgtgcaggttctagcattctgctgtccatggctccgcgcgtccaggaggtgaccaccagaccaagcctccgccgtccagaccagggggcaggggctggatttacatggctcaagacttaggttctagcttgttgaggtatacaaacaagtccgaattggggatccgttggagaaaggcaccttactgggaccagtgcacactcctgcttcaaaagagaactttttgaaaggcattcagactatcaaatctcagaccttgaaggaagcaattgaaatcaataactctgttcctcaaggattgagcagttctatgtttacaaagaggccagatattatttttaagtggctcgggccccatggtagtgattgtggtatagtgaatgtgaacatacctactaatggtgctgaaattggtggagcatttggtggagaaaaagcagctggtggtggacgagaagcagggagtgattcctggaagcagtacatgaggagggcgacttggagggaggtcctagaggcagtaagtcacttgtttactccatgatgacaatagcaagcagatcgcggtggtgcctatggatgctacaataagaaagatcaaaagttcttttggatggatgcagctagatattttgttttgtattttctccaaaagagaaatttgcaacgttgtgaatgatattataattgtgatgcttttgtgaatatataattgtggtgcttttgtgtttatgtgatggatctatgactgtggtatactgattaactgtgtatgtctttatgatttgtgtataaaaatctgtgatttgtagtgcttaattaaatatatattattattaataacaactgtaaaa

SEQ ID NO: 75648 - DNA, 2295 bp, Zea Mays
caggactgtaaataagcggaaaccctgcccttgttccaaatccaaagcggcgaagcttctctcctcccgctgccccccttcggtcctcctccgtccgtcgccgtcgtcaaacacgacgtttaacgggcggcgcagagcgctaatccagcccaaacacgatatataacggtccgcgccttccgaagacgccaagaacagcctcaggttactcgcagaaaagatttattagctcgccgcgggggttgaaccgaggctcctagctgatcgcgcgggcacaaggcgagcggacaagaaagcttgctttgtgctcaccggcgggcggcggcacggaccccctgcgatggaagccgtcggcgtcactcctgcccccgtggcggcgccggagaagaagaagctgcttgacctcaaggaccccttccccgccgccgccaacagcggcgccaaggcgtcctcggcgagtaagtgggcgacgaagaagaagctggtgggcggcgacgccggctacgtgctcgaggacgtgccgcacctcacggattacatgccccagctcccgacatacccgaatcctctccaagacaacccggcgtattcagtcgtcaaacacggatgttcgttccaaagctgacctttctccccgccacgtgttcttcctcccaggcagtatttcgtcaacccagacgacaccgtcacgcagaagattgttgttcataagaccagtgccaggggcacccacttccggcgtgccgggccacggcagcgggtgtacttccagtccgatgaggtgaacgccgccattgtcacctgtggaggcctctgcccgggattgaacacggtcatccgcgagcttgtttgcggcttgtatgatatgtatggcgtctccagcgtcgtcggcatagagggtggatacaagggtttctattctaaaaacactgttgcgttgacaccaaagtcggtgaacgacatccataagagaggcgggactgtcctcggaacctcaagaggagggcatgacactgccaaaatcgttgattgtcttcaggaccgtggcattaaccaggtctatattatcggaggcgatggcactcagaaaggcgcttctgtaatttatgaggaagtccggagacggggtctcaagtgctctgttgtcggtgtcccaaagactattgataacgacatcgcggtgattgacaagtcgtttggatttgacactgctgtggaggaggcccagagggccatcaatgctgctcatgtcgaggctgaaagtgcggagaacggcatcggtgtcgtgaagcttatgggccgcaacagtggttttatcgcgatgtacgcgactctagctagccgtgatgtggactgttgtttaatcccggagtcacccttctacctcgaagggaagggaggactcctcgagttcgtcgagaggcggctcaaggacaacggccacatggtcatcgtggtggccgagggtgctgggcaggacctcatcgcgagaagtatgaatttcgtggacacccaagacgcttctggaaacaagctgcttctggatgtcggcctttggctatcccagaagataaaggatcatttcaagaagaagcccagcttcccgataaccctcaagtacatcgacccgacctacatgatccgcgccgtccggtcgaatgcttctgacaacgtctactgcactctgctggcccacagcgccctccatggcgccatggcggggtacaccggcttcacggtcgctccggtcaacggcaggcacgcctacatcccgttctataggatcaccgagaagcagaacaaggtggtgatcacggaccggatgtgggcgagggtgctgtgctcgacgaaccagccctgcttcctgagccacgaggacgtggagaacatgaagcacgacgacgacgagcaccaccacatgcacaacacgcagctcctggaaggcgggagctcgccggtgtccaaatgcaatggctcggcagcggcagtgtgaggggcacgagaatacgcaaggatatagatatatatagtattaagcatgtagctatggatgttttttttccttttgcttttttgggtgctggcgttgtagagagtatttggtaataataatataatgcttcgctgagattaaatctcacttttcgctgttcgtaattggggggtgagactcttttaaggctcatatgggctgtcatattgaatattacaaaaatcttcagagagccagagaggcttagaacatgtacattcatattcatatatagagagagacaagtaagaagattgttcaac

SEQ ID NO: 75649 - DNA, 2249 bp, Zea Mays
cacgcactgagatggcaggactgtaaataagcggaaaccctgcccttgttccaaatccaaagcggcgaagcttctctcctcccgctgccccccttcggtcctcctccgtccgtcgccgtcgtcaaacacgacgtttaacgggcggcgcagagcgctaatccagcccaaacacgatatataacggtccgcgccttccgaagacgccaagaacagcctcaggttactcgcagaaaagatttattagctcgccgcgggggttgaaccgaggctcctagctgatcgcgcgggcacaaggcgagcggacaagaaagcttgctttgtgctcaccggcgggcggcggcacggaccccctgcgatggaagccgtcggcgtcactcctgcccccgtggcggcgccggagaagaagaagctgcttgacctcaaggaccccttccccgccgccgccaacagcggcgccaaggcgtcctcggcgagtaagtgggcgacgaagaagaagctggtgggcggcgacgccggctacgtgctcgaggacgtgccgcacctcacggattacatgccccagctcccgacatacccgaatcctctccaagacaacccggcgtattcagtcgtcaagcagtatttcgtcaacccagacgacaccgtcacgcagaagattgttgttcataagaccagtgccaggggcacccacttccggcgtgccgggccacggcagcgggtgtacttccagtccgatgaggtgaacgccgccattgtcacctgtggaggcctctgcccgggattgaacacggtcatccgcgagcttgtttgcggcttgtatgatatgtatggcgtctccagcgtcgtcggcatagagggtggatacaagggtttctattctaaaaacactgttgcgttgacaccaaagtcggtgaacgacatccataagagaggcgggactgtcctcggaacctcaagaggagggcatgacactgccaaaatcgttgattgtcttcaggaccgtggcattaaccaggtctatattatcggaggcgatggcactcagaaaggcgcttctgtaatttatgagtccggagacggggtctcaagtgctctgttgtcggtgtcccaaagactattgataacgacatcgcggtgattgacaagtcgtttggatttgacactgctgtggaggaggcccagagggccatcaatgctgctcatgtcgaggctgaaagtgcggagaacggcatcggtgtcgtgaagcttatgggccgcaacagtggttttatcgcgatgtacgcgactctagctagccgtgatgtggactgttgtttaatcccggagtcacccttctacctcgaagggaagggaggactcctcgagttcgtcgagaggcggctcaaggacaacggccacatggtcatcgtggtggccgagggtgctgggcaggacctcatcgcgagaagtatgaatttcgtggacacccaagacgcttctggaaacaagctgcttctggatgtcggcctttggctatcccagaagataaaggatcatttcaagaagaagcccagcttcccgataaccctcaagtacatcgacccgacctacatgatccgcgccgtccggtcgaatgcttctgacaacgtctactgcactctgctggcccacagcgccctccatggcgccatggcggggtacaccggcttcacggtcgctccggtcaacggcaggcacgcctacatcccgttctataggatcaccgagaagcagaacaaggtggtgatcacggaccggatgtgggcgagggtgctgtgctcgacgaaccagccctgcttcctgagccacgaggacgtggagaacatgaagcacgacgacgacgagcaccaccacatgcacaacacgcagctcctggaaggcgggagctcgccggtgtccaaatgcaatggctcggcagcggcagtgtgaggggcacgagaatacgcaaggatatagatatatatagtattaagcatgtagctatggatgttttttttccttttgcttttttgggtgctggcgttgtagagagtatttggtaataataatataatgcttcgctgagattaaatctcacttttcgctgttcgtaattggggggtgagactcttttaaggctcatatgggctgtcatattgaatattacaaaaatcttcagagagccagagaggcttagaacatgtacattcatattcatatatagagagagacaagtaagaagattgttcaac

SEQ ID NO: 75650 - DNA, 1680 bp, Zea Mays
attcaaactcgctgtcacaggctcctaggtagctcccctttctaacgccaccggccggccggccgctgccaaccctcgtcaccactcaccaccacactccagctgcttctactactgcagctcggtcacgcaaggcgaattccggcgatgggcaaggcggcgaggtggttccgcagcctgcttggcggcgggaggaaagaccaggagaggcaggcctccccggcgccggcccccgcggacaggaagcgctggagcttcgcgaggccgtcgcgggactcggccgaggcctccgccgcggcgaccgagggtttcgtgcggggcgccgccggcagcgcggcgatcgctgaggccgcgtggctcaggtcgctcgacgacgacacggggcggcggcagagcaagcacgccatcgctgtcgccgcggccaccgcggcggcggcggacgcggccgtggccgccgcgcaggccgccgtcgaggtcgtgcgccttaccagccagggaccggccttcggcggcggaggggtcgtgttggacttggatccccgcggccgcgccggcgccgccgtcaagatccagacggccttcagaggcttcttggccaagaaggcgctgcgagcgctcaaggcgctggtgaggctgcaggcgttggtacgcggctacctagtgcggaggcaggcgacggtgacgctgcagagcatgcaggcgcttgtccgcgcgcaggcaaccgtccgcgccgcccgctgcggccgcgccctgccctcgctccagccgcgcctccaccaccctcccgcccgcccgcgcttctcgctgcaagagcggcacgcggacgacgcgcgcagcgagcacggcgtggcggcgtgcggccggcgcctgtccgcaagcgtcgccgtcgagtcggcgtcgtacgaccggagccccaagaccgtggagatggacacggcgcggcccaggtcccgcgcgccgtcgctgcgcaccgaggacgagtggtgcgcgcaaccggtgtcgtcgccgccgccgccgtgccagcagcagcaccaccaccacctgcccccgtgcatcgaggtgccgacgccgcgccacttcccggaccacggctggtgcacgccggagaagccccggccggcgacggcgcagtgcacgccccggtgcgcgccgccgacgccgaccccggcggcaaagaccctctgcgggggccctgccagctgcctcgccgcgtcgcccagctgccccgggtacatgtcgagcacgcagtcgtcggaggccaagtcgtcgtcccggtcgcagagcgcgccgaagcagcggccggcacggaagcgggtgccgctgagcgaggtggtggtcctgcaggcccgcgcgagcctgggcggcgccggcggcggcgcgggcacgcacatcaagccgtgcaacgcccgcgcgcaggcgcaggcgccggacgcgtgcgacttgcgggccgccgtcgtcagccggttcgagcagcgcgcgtcggaggaggacgccgctgcggcggccgagcggggccgcgacgtgttcttcttgcaaaggaggtgttttttttcgtagcacttttgtgatctctgctcttcggatcgtcgcgcacgtccgtgacctctctctgctgccgttcttgctgcttgcaataagctaatagtgtgttgtgtgtggggacgccgggggagatttcaa

SEQ ID NO: 75651 - DNA, 1446 bp, Zea Mays
tagatctctattgttaggttcgtcagcagaaaaggcagcaactttgcccccgaaaatatttgggcatgcctggattcaggcttcttctatgttgtggatcatgggataagccaagagttcatggatgaagtttttgcccagagcaagaagttctttgaccttcctcatagtgagaaaatgaagcttctccgagacgagaagaatagagggtacacacccatgctagatgaaattcttgatcctgaaaatcaagttaatggtgactacaaggaaggatattatattggagttgaggtacctgcagatgatccagaagcaaacaggccattttatggtccaaatcagtggccttctaaagaagtactaccaaaatggagagaagtgatggagcaatatcacagggaggcattgatagtagcaaaatcagtcgcaaggatcatcgctcttgctctagatctagacgtggacttcttcgatagacctgaaatgcttggcgagtccatagccacgctaaggctcctgcactacgaaggtaaggtgtcagatcctgcaaagggtgtttacggagcgggcgcccattcagactacggcctgataactctcctggcaaccgatgatgtagttgggctccaaatatgcaaggacaagaacgctcagcctcaactgtgggaatacgtagctccgttgaaaggcggatttatcgtcaaccttggcgacatgctcgaaaggtggagtaacggcgttttcaggtcaaccttacatcgagtggtcctagatgggcgagaacgctactcgatagcctacttcgtggaaccaagccacgactgcgtggtggagtgcctgccgacctgcaagtccgaatcaaatcctccaaagttccctccgatcacctgctccgcgtacctgtcccagcgctacaaggacactcacgcggatctgaaatcctacgacgacagcaaggcctgatcagaggactgccctctcctctctctgtctcagcgatcagtacgtacgacgtgtatcctgcaataacactgggtggagggcggcagtaccagtgtaccacagtatcagtataggtatagagagttctgttggtgccaccgtgccaccgtccatgtgttcatgtaagatgacgagaagaatcaagaacgggggccggcgttgaggtccccggccttaatctaggccttgttgttgctgtcgtgttgtgaggttcaatccccgagcttatcctttggtgctgttgagaggtccacagtccccttcgttccgttttgtttttggttttggtacaccaggagcaattttgttgtggattgctaaaacttttgcgaggcgcggcgtcatctcgtttcagctttatccgacggtcttggtgtgggaagcagctgtgcttcgttctcctagaagagacgggtgtgctcagcagcgttgctttcttgc

SEQ ID NO: 75652 - DNA, 1801 bp, Zea Mays
cggacttctcgtcttggctttaacctttttcccttttgcaacctttttcgaccaaccttcgtctccagactcgtccaccctataaattgtctcgccagaccattccaatccggcaactcctgctctgcctgagcctgagcgtaggcggctaccagagagaagggtaggcggcgccggcggcgggagcaatagaagagcggtaaatccaagagagatcagagcctcggagggaaacagaagcgcacagagcatggagagcccgatctcgaggactaacctgaattgcatcagcctggcggacccgaacgtccagaaatcagtggcgctcctcaagcaggcttcttctatgttgtggatcatgggataagccaagagttcatggatgaagtttttgcccagagcaagaagttctttgaccttcctcatagtgagaaaatgaagcttctccgagacgagaagaatagagggtacacacccatgctagatgaaattcttgatcctgaaaatcaagttaatggtgactacaaggaaggatattatattggagttgaggtacctgcagatgatccagaagcaaacaggccattttatggtccaaatcagtggccttctaaagaagtactaccaaaatggagagaagtgatggagcaatatcacagggaggcattgatagtagcaaaatcagtcgcaaggatcatcgctcttgctctagatctagacgtggacttcttcgatagacctgaaatgcttggcgagtccatagccacgctaaggctcctgcactacgaaggtggacaagaaacaggtcatgccttcgtgtcagacgggtattttaccccgcaaggaacatgacgagtcctgtcgtttgatgttctttctatcgccaggtaaggtgtcagatcctgcaaagggtgtttacggagcgggcgcccattcagactacggcctgataactctcctggcaaccgatgatgtagttgggctccaaatatgcaaggacaagaacgctcagcctcaactgtgggaatacgtagctccgttgaaaggcggatttatcgtcaaccttggcgacatgctcgaaaggtggagtaacggcgttttcaggtcaaccttacatcgagtggtcctagatgggcgagaacgctactcgatagcctacttcgtggaaccaagccacgactgcgtggtggagtgcctgccgacctgcaagtccgaatcaaatcctccaaagttccctccgatcacctgctccgcgtacctgtcccagcgctacaaggacactcacgcggatctgaaatcctacgacgacagcaaggcctgatcagaggactgccctctcctctctctgtctcagcgatcagtacgtacgacgtgtatcctgcaataacactgggtggagggcggcagtaccagtgtaccacagtatcagtataggtatagagagttctgttggtgccaccgtgccaccgtccatgtgttcatgtaagatgacgagaagaatcaagaacgggggccggcgttgaggtccccggccttaatctaggccttgttgttgctgtcgtgttgtgaggttcaatccccgagcttatcctttggtgctgttgagaggtccacagtccccttcgttccgttttgtttttggttttggtacaccaggagcaattttgttgtggattgctaaaacttttgcgaggcgcggcgtcatctcgtttcagctttatccgacggtcttggtgtgggaagcagctgtgcttcgttctcctagaagagacgggtgtgctcagcagcgttgctttcttgc

SEQ ID NO: 75653 - DNA, 1813 bp, Zea Mays
cggacttctcgtcttggctttaacctttttcccttttgcaacctttttcgaccaaccttcgtctccagactcgtccaccctataaattgtctcgccagaccattccaatccggcaactcctgctctgcctgagcctgagcgtaggcggctaccagagagaagggtaggcggcgccggcggcgggagcaatagaagagcggtaaatccaagagagatcagagcctcggagggaaacagaagcgcacagagcatggagagcccgatctcgaggactaacctgaattgcatcagcctggcggacccgaacgtccagaaatcagtggcgctcctcaagcaggcatgcctggattcaggcttcttctatgttgtggatcatgggataagccaagagttcatggatgaagtttttgcccagagcaagaagttctttgaccttcctcatagtgagaaaatgaagcttctccgagacgagaagaatagagggtacacacccatgctagatgaaattcttgatcctgaaaatcaagttaatggtgactacaaggaaggatattatattggagttgaggtacctgcagatgatccagaagcaaacaggccattttatggtccaaatcagtggccttctaaagaagtactaccaaaatggagagaagtgatggagcaatatcacagggaggcattgatagtagcaaaatcagtcgcaaggatcatcgctcttgctctagatctagacgtggacttcttcgatagacctgaaatgcttggcgagtccatagccacgctaaggctcctgcactacgaaggtggacaagaaacaggtcatgccttcgtgtcagacgggtattttaccccgcaaggaacatgacgagtcctgtcgtttgatgttctttctatcgccaggtaaggtgtcagatcctgcaaagggtgtttacggagcgggcgcccattcagactacggcctgataactctcctggcaaccgatgatgtagttgggctccaaatatgcaaggacaagaacgctcagcctcaactgtgggaatacgtagctccgttgaaaggcggatttatcgtcaaccttggcgacatgctcgaaaggtggagtaacggcgttttcaggtcaaccttacatcgagtggtcctagatgggcgagaacgctactcgcctacttcgtggaaccaagccacgactgcgtggtggagtgcctgccgacctgcaagtccgaatcaaatcctccaaagttccctccgatcacctgctccgcgtacctgtcccagcgctacaaggacactcacgcggatctgaaatcctacgacgacagcaaggcctgatcagaggactgccctctcctctctctgtctcagcgatcagtacgtacgacgtgtatcctgcaataacactgggtggagggcggcagtaccagtgtaccacagtatcagtataggtatagagagttctgttggtgccaccgtgccaccgtccatgtgttcatgtaagatgacgagaagaatcaagaacgggggccggcgttgaggtccccggccttaatctaggccttgttgttgctgtcgtgttgtgaggttcaatccccgagcttatcctttggtgctgttgagaggtccacagtccccttcgttccgttttgtttttggttttggtacaccaggagcaattttgttgtggattgctaaaacttttgcgaggcgcggcgtcatctcgtttcagctttatccgacggtcttggtgtgggaagcagctgtgcttcgttctcctagaagagacgggtgtgctcagcagcgttgctttcttgc

SEQ ID NO: 75654 - DNA, 1741 bp, Zea Mays
cggacttctcgtcttggctttaacctttttcccttttgcaacctttttcgaccaaccttcgtctccagactcgtccaccctataaattgtctcgccagaccattccaatccggcaactcctgctctgcctgagcctgagcgtaggcggctaccagagagaagggtaggcggcgccggcggcgggagcaatagaagagcggtaaatccaagagagatcagagcctcggagggaaacagaagcgcacagagcatggagagcccgatctcgaggactaacctgaattgcatcagcctggcggacccgaacgtccagaaatcagtggcgctcctcaagcaggcatgcctggattcaggcttcttctatgttgtggatcatgggataagccaagagttcatggatgaagtttttgcccagagcaagaagttctttgaccttcctcatagtgagaaaatgaagcttctccgagacgagaagaatagagggtacacacccatgctagatgaaattcttgatcctgaaaatcaagttaatggtgactacaaggaaggatattatattggagttgaggtacctgcagatgatccagaagcaaacaggccattttatggtccaaatcagtggccttctaaagaagtactaccaaaatggagagaagtgatggagcaatatcacagggaggcattgatagtagcaaaatcagtcgcaaggatcatcgctcttgctctagatctagacgtggacttcttcgatagacctgaaatgcttggcgagtccatagccacgctaaggctcctgcactacgaaggtggacaagaaacaggtaaggtgtcagatcctgcaaagggtgtttacggagcgggcgcccattcagactacggcctgataactctcctggcaaccgatgatgtagttgggctccaagtaatacaccttgaaccgatgccttctctggcggttttattcggatctgtttcagccgggggtttcactcgtttggattcctgcagatatgcaaggacaagaacgctcagcctcaactgtgggaatacgtagctccgttgaaaggcggatttatcgtcaaccttggcgacatgctcgaaaggtggagtaacggcgttttcaggtcaaccttacatcgagtggtcctagatgggcgagaacgctactcggttccctccgatcacctgctccgcgtacctgtcccagcgctacaaggacactcacgcggatctgaaatcctacgacgacagcaaggcctgatcagaggactgccctctcctctctctgtctcagcgatcagtacgtacgacgtgtatcctgcaataacactgggtggagggcggcagtaccagtgtaccacagtatcagtataggtatagagagttctgttggtgccaccgtgccaccgtccatgtgttcatgtaagatgacgagaagaatcaagaacgggggccggcgttgaggtccccggccttaatctaggccttgttgttgctgtcgtgttgtgaggttcaatccccgagcttatcctttggtgctgttgagaggtccacagtccccttcgttccgttttgtttttggttttggtacaccaggagcaattttgttgtggattgctaaaacttttgcgaggcgcggcgtcatctcgtttcagctttatccgacggtcttggtgtgggaagcagctgtgcttcgttctcctagaagagacgggtgtgctcagcagcgttgctttcttgc

SEQ ID NO: 75655 - DNA, 1783 bp, Zea Mays
atcggacttctcgtcttggctttaacctttttcccttttgcaacctttttcgaccaaccttcgtctccagactcgtccaccctataaattgtctcgccagaccattccaatccggcaactcctgctctgcctgagcctgagcgtaggcggctaccagagagaagggtaggcggcgccggcggcgggagcaatagaagagcggtaaatccaagagagatcagagcctcggagggaaacagaagcgcacagagcatggagagcccgatctcgaggactaacctgaattgcatcagcctggcggacccgaacgtccagaaatcagtggcgctcctcaagcagagggcttggaacttcctttctcgggaatcttgtttcttttcataaggcatgcctggattcaggcttcttctatgttgtggatcatgggataagccaagagttcatggatgaagtttttgcccagagcaagaagttctttgaccttcctcatagtgagaaaatgaagcttctccgagacgagaagaatagagggtacacacccatgctagatgaaattcttgatcctgaaaatcaagttaatggtgactacaaggaaggatattatattggagttgaggtacctgcagatgatccagaagcaaacaggccattttatggtccaaatcagtggccttctaaagaagtactaccaaaatggagagaagtgatggagcaatatcacagggaggcattgatagtagcaaaatcagtcgcaaggatcatcgctcttgctctagatctagacgtggacttcttcgatagacctgaaatgcttggcgagtccatagccacgctaaggctcctgcactacgaaggtggacaagaaacaggtaaggtgtcagatcctgcaaagggtgtttacggagcgggcgcccattcagactacggcctgataactctcctggcaaccgatgatgtagttgggctccaaatatgcaaggacaagaacgctcagcctcaactgtgggaatacgtagctccgttgaaaggcggatttatcgtcaaccttggcgacatgctcgaaaggtggagtaacggcgttttcaggtcaaccttacatcgagtggtcctagatgggcgagaacgctactcgatagcctacttcgtggaaccaagccacgactgcgtggtggagtgcctgccgacctgcaagtccgaatcaaatcctccaaagttccctccgatcacctgctccgcgtacctgtcccagcgctacaaggacactcacgcggatctgaaatcctacgacgacagcaaggcctgatcagaggactgccctctcctctctctgtctcagcgatcagtacgtacgacgtgtatcctgcaataacactgggtggagggcggcagtaccagtgtaccacagtatcagtataggtatagagagttctgttggtgccaccgtgccaccgtccatgtgttcatgtaagatgacgagaagaatcaagaacgggggccggcgttgaggtccccggccttaatctaggccttgttgttgctgtcgtgttgtgaggttcaatccccgagcttatcctttggtgctgttgagaggtccacagtccccttcgttccgttttgtttttggttttggtacaccaggagcaattttgttgtggattgctaaaacttttgcgaggcgcggcgtcatctcgtttcagctttatccgacggtcttggtgtgggaagcagctgtgcttcgttctcctagaagagacgggtgtgctcagcagcgttgctttcttgc

SEQ ID NO: 75656 - DNA, 1775 bp, Zea Mays
cgctatcggacttctcgtcttggctttaacctttttcccttttgcaacctttttcgaccaaccttcgtctccagactcgtccaccctataaattgtctcgccagaccattccaatccggcaactcctgctctgcctgagcctgagcgtaggcggctaccagagagaagggtaggcggcgccggcggcgggagcaatagaagagcggtaaatccaagagagatcagagcctcggagggaaacagaagcgcacagagcatggagagcccgatctcgaggactaacctgaattgcatcagcctggcggacccgaacgtccagaaatcagtggcgctcctcaagcaggcatgcctggattcaggcttcttctatgttgtggatcatgggataagccaagagttcatggatgaagtttttgcccagagcaagaagttctttgaccttcctcatagtgagaaaatgaagcttctccgagacgagaagaatagagggtacacacccatgctagatgaaattcttgatcctgaaaatcaagttaatggtgactacaaggaaggatattatattggagttgaggtacctgcagatgatccagaagcaaacaggccattttatggtccaaatcagtggccttctaaagaagtactaccaaaatggagagaagtgatggagcaatatcacagggaggcattgatagtagcaaaatcagtcgcaaggatcatcgctcttgctctagatctagacgtggacttcttcgatagacctgaaatgcttggcgagtccatagccacgctaaggctcctgcactacgaaggtggacaagaaacaggtaaggtgtcagatcctgcaaagggtgtttacggagcgggcgcccattcagactacggcctgataactctcctggcaaccgatgatgtagttgggctccaaatatgcaaggacaagaacgctcagcctcaactgtgggaatacgtagctccgttgaaaggcggatttatcgtcaaccttggcgacatgctcgaaaggtggagtaacggcgttttcaggtcaaccttacatcgagtggtcctagatgggcgagaacgctactcgtggcggcggggtgttctcgccttgtcttgaacagatagcctacttcgtggaaccaagccacgactgcgtggtggagtgcctgccgacctgcaagtccgaatcaaatcctccaaagttccctccgatcacctgctccgcgtacctgtcccagcgctacaaggacactcacgcggatctgaaatcctacgacgacagcaaggcctgatcagaggactgccctctcctctctctgtctcagcgatcagtacgtacgacgtgtatcctgcaataacactgggtggagggcggcagtaccagtgtaccacagtatcagtataggtatagagagttctgttggtgccaccgtgccaccgtccatgtgttcatgtaagatgacgagaagaatcaagaacgggggccggcgttgaggtccccggccttaatctaggccttgttgttgctgtcgtgttgtgaggttcaatccccgagcttatcctttggtgctgttgagaggtccacagtccccttcgttccgttttgtttttggttttggtacaccaggagcaattttgttgtggattgctaaaacttttgcgaggcgcggcgtcatctcgtttcagctttatccgacggtcttggtgtgggaagcagctgtgcttcgttctcctagaagagacgggtgtgctcagcagcgttgctttcttgc

SEQ ID NO: 75657 - DNA, 1785 bp, Zea Mays
aagagattgggtccctgtgccaatgcgctatcggacttctcgtcttggctttaacctttttcccttttgcaacctttttcgaccaaccttcgtctccagactcgtccaccctataaattgtctcgccagaccattccaatccggcaactcctgctctgcctgagcctgagcgtaggcggctaccagagagaagggtaggcggcgccggcggcgggagcaatagaagagcggtaaatccaagagagatcagagcctcggagggaaacagaagcgcacagagcatggagagcccgatctcgaggactaacctgaattgcatcagcctggcggacccgaacgtccagaaatcagtggcgctcctcaagcaggcatgcctggattcaggcttcttctatgttgtggatcatgggataagccaagagttcatggatgaagtttttgcccagagcaagaagttctttgaccttcctcatagtgagaaaatgaagcttctccgagacgagaagaatagagggtacacacccatgctagatgaaattcttgatcctgaaaatcaagttaatggtgactacaaggaaggatattatattggagttgaggtacctgcagatgatccagaagcaaacaggccattttatggtccaaatcagtggccttctaaagaagtactaccaaaatggagagaagtgatggagcaatatcacagggaggcattgatagtagcaaaatcagtcgcaaggatcatcgctcttgctctagatctagacgtggacttcttcgatagacctgaaatgcttggcgagtccatagccacgctaaggctcctgcactacgaaggtaaggtgtcagatcctgcaaagggtgtttacggagcgggcgcccattcagactacggcctgataactctcctggcaaccgatgatgtagttgggctccaaatatgcaaggacaagaacgctcagcctcaactgtgggaatacgtagctccgttgaaaggcggatttatcgtcaaccttggcgacatgctcgaaaggtggagtaacggcgttttcaggtcaaccttacatcgagtggtcctagatgggcgagaacgctactcgtggcggcggggtgttctcgccttgtcttgaacagatagcctacttcgtggaaccaagccacgactgcgtggtggagtgcctgccgacctgcaagtccgaatcaaatcctccaaagttccctccgatcacctgctccgcgtacctgtcccagcgctacaaggacactcacgcggatctgaaatcctacgacgacagcaaggcctgatcagaggactgccctctcctctctctgtctcagcgatcagtacgtacgacgtgtatcctgcaataacactgggtggagggcggcagtaccagtgtaccacagtatcagtataggtatagagagttctgttggtgccaccgtgccaccgtccatgtgttcatgtaagatgacgagaagaatcaagaacgggggccggcgttgaggtccccggccttaatctaggccttgttgttgctgtcgtgttgtgaggttcaatccccgagcttatcctttggtgctgttgagaggtccacagtccccttcgttccgttttgtttttggttttggtacaccaggagcaattttgttgtggattgctaaaacttttgcgaggcgcggcgtcatctcgtttcagctttatccgacggtcttggtgtgggaagcagctgtgcttcgttctcctagaagagacgggtgtgctcagcagcgttgctttcttgc

SEQ ID NO: 75658 - DNA, 4227 bp, Zea Mays
tttttctcgcctctcctcgctcctcgccatttctctctcttcccctccgcttcgcccaccgcccgctccgaaatctgcgcgccgacgccgccggctgcccgtggagagcctcgaattagagcgcgttccgtcgagaggttttcaagcaactatgtttgagtttggttgatatgatactcattcacgttggggatgcagaccccccctctgtgggggttgattgaagaagttaactgtacacttaggagaacttgtgtcctactgaaagtttcttggtttcgaggcaagtatgtcagattcaaatgtgaatgtcttactaagagtagggctttggtggcatagatggatgaactgattgtcaacttcaacaagttgttgattacagagcctttctagtttcttgggcaggctcttgagctaccaagcatgtcagattcaaatgtgaagtggattgatgggctccagttcacatcattgtactggcctccacccctcgatgcggagcagaagcaggcacaaattttggcatatgtcgagtactttggccagtttacagctgacaccgatcaattccctgaagacatagctcagctcattcaaagttcctatccatcaaaagaaaatcgcttggtagatgaagtattggcaacttttgttcttcatcatccggagcatggtcatgcagttgcacatccaattctttcacgcatcatagatgggacgctgtgctatgatagacatggtcccccattcagttccttcatctctttattcagccataattctgagcaagagtactcagagcagtgggccttggcctgtggagaaattcttagggtcttaactcactacaataggccaatattcaaagttgagcgccaacatactgaagctgaatgtagcagcacatctgatcaggcaacatctagtgattccacagataagagatctaataattctccaggaaatgaatctgactggaagccattgaggccactaaccccgtggatcactgacatattgctagccgcacctttgggcattcgaagtgactattttcgatggtgtggcggtgtaatgggaaaatatgctgctggtggagagttgaagcctccaactactgcttgcagccgaggatctgggaagcacccacagcttatgccttccacccccagatgggctgttgccaatggagctggagttatattaagtgtctgtgatgaggaggtagctcgttatgagacagcaaatttaacagcagcagctgttcctgcgcttctgctacctccaccaacaacacccttggacgagcatttggtggctggcctgccccctcttgaaccatatgctcggttgttccatagatactatgcaattgctacaccaagtgctacacagaggttgctttttggtcttctggaagcaccaccatcatgggctccagatgcacttgatgcagcagtacaactagttgagctacttagagcagccgaagattatgcttctggcatgcggcttccaaaaaattggatgcatctgcatttcttgcgtgcgattggaactgcaatgtcaatgagagctggcattgctgctgatacagctgctgctttgcttttccgaatactttcccaaccaacgctgctttttccaccactgagacatgccgaaggagttgaagtacatcatgaaccactaggtggctatgtatcatcatataagaagcagttggaagttcctgcatctgaggccactatcgatgccactgcacaaggcattgcttctttgttgtgtgctcatggccctgatgttgagtggagaatatgtaccatctgggaagctgcctatggtttgctaccgctaagttcatcagcagttgatttgcctgaaattgttgtagctgccccgcttcagccacctacactgtcatggagcctgtacttaccattattaaaagtatttgagtatctacctcgtggcagtccatctgaagcatgccttatgaggatatttgtggcaacggttgaagctatacttaggagaacttttccttctgaaacatcagagcaatccagaaagccaagaagtcaatctaagaaccttgctgttgctgaacttcacacaatgatacattcactctttgttgaatcctgtgcctcaatggaccttgcctcccggttgctatttgtggtgttaactgtttgtgtcagtcatcaagctttgccagggggtagcaaaagaccaactggtagtgataaccattcccacgaggaagccactgagcattcaagattaacaaatggaagaagcagatgtaagaagagacaaggccctgttgctacgtttgattcatatgttctagctgcagtttgtgccttatcttgtgagctccagctgttccctttcattactaagaatggatcacattcaaatttaaaggattccatgaagattatcatatctggaaaaaacaatgggatgaataatgagctacacaacagcatcagctcagcaattcttcatactcgcagaattcttggcatcttggaagccgttttctccctgaagccatcatcagttggtacctcatggagctatagctcaaatgaaatagttgcagcagctatggttgctgctcatgtttctgagttatttcgtcggtccaggccatgccttaatgcactctctgcactaatgagatgcaagtgggatgctgagatttcgaccagggcatcatctctctaccatttgattgacttgcatggtaaaacagtttcctccattgtgaacaaagctgagcctcttgaagctcacctgacccttacaccagtaaagagggataatcaacatcaccgtgaggaaagcaataccagctcattggatagtgtcaagttggaaaacaagaatggttcaacatcacacaagaaaaacggtttctcaagaccactcttgaaatgtgcagaagaggtcctactgaatggcgatgttgcaagtacatctgggaaatccattgcaagcttacaggtggaagcatctgatttggcaaacttccttaccatggatcggaatgggggttaccgagatgtctgcagaaagtacatcagctcaccaaggatggaggaaggttgttgatgcactttgtgatgtcgtttcagcctcaccaaccaaggcatcagctgctatcgttctccaggccgagaaggacttgcagccttggattgctagagatgacgaacaaggtcagaagatgtggagagtcaaccagcgtatagtgaagcttatagctgagcttatgaggaaccatgacagccctgaagcgttggtgatactcgctagtgcctccgaccttctacttcgtgctaccgatggaatgctcgtcgatggtgaagcttgtactttgccacagcttgagcttctggaagtgaccgctcgggctgtccatcttatcatcgaatggggagattcaggtttatcagttgcagatggtctttcaaatctgctgaagtgccgtctatcaaccaccatccgctgcctttctcacccaagtgcacacgtgcgcgcactcagcatgtctgtcctccgcgacatcctgagcaacggatccgtgaaccccaacaagacaatccaaggggaacagcagcggaacggcatccagagcccgtcctaccggtgcctggccgcaggcatcatcaactggcaagcggacgtcgagaggtgcatagagtgggaagcccacagccgccgcgccactgggctgacgctcgccttcctcagtgccgcagcgaaggagctcggctgccctctcccgtcatgacaaggccattcctggatctgacatcggcttccaattgacggtcagtgctggcacagctgctgcagggtccgcgagtaggacggctctaatctctccatcacgtgttattatctggtgtttccataatgcgatttgatttcaatttggcgttagatgttgtacacgtgtatttaactgcttgagttgtacgtaatttgtatacttgtaactttgtttaataatatggctattactcaagaagcggaacatatcttatcctttttatatgctgctgctagatccgttcaacgtgagtgccatgcaaatgtccacgaaatgtttagtatttgttagggggaaaaggtctcggtggaaggtaaaataatttctaactgttattcaggataaatgatttaacgtggtttgaattattacaa

SEQ ID NO: 75659 - DNA, 4231 bp, Zea Mays
tttttctcgcctctcctcgctcctcgccatttctctctcttcccctccgcttcgcccaccgcccgctccgaaatctgcgcgccgacgccgccggctgcccgtggagagcctcgaattagagcgcgttccgtcgagaggttttcaagcaactatgtttgagtttggttgatatgatactcattcacgttggggatgcagaccccccctctgtgggggttgattgaagaagttaactgtacacttaggagaacttgtgtcctactgaaagtttcttggtttcgaggtgctcttattggttattggatcgctgtgtgtaatttgtttctttccctttgagagcctttctagtttcttgggcaggctcttgagctaccaagcatgtcagattcaaatgtgaagtggattgatgggctccagttcacatcattgtactggcctccacccctcgatgcggagcagaagcaggcacaaattttggcatatgtcgagtactttggccagtttacagctgacaccgatcaattccctgaagacatagctcagctcattcaaagttcctatccatcaaaagaaaatcgcttggtagatgaagtattggcaacttttgttcttcatcatccggagcatggtcatgcagttgcacatccaattctttcacgcatcatagatgggacgctgtgctatgatagacatggtcccccattcagttccttcatctctttattcagccataattctgagcaagagtactcagagcagtgggccttggcctgtggagaaattcttagggtcttaactcactacaataggccaatattcaaagttgagcgccaacatactgaagctgaatgtagcagcacatctgatcaggcaacatctagtgattccacagataagagatctaataattctccaggaaatgaatctgactggaagccattgaggccactaaccccgtggatcactgacatattgctagccgcacctttgggcattcgaagtgactattttcgatggtgtggcggtgtaatgggaaaatatgctgctggtggagagttgaagcctccaactactgatgggctgttgccaatggagctggagttatattaagtgtctgtgatgaggaggtagctcgttatgagacagcaaatttaacagcagcagctgttcctgcgcttctgctacctccaccaacaacacccttggacgagcatttggtggctggcctgccccctcttgaaccatatgctcggttgttccatagatactatgcaattgctacaccaagtgctacacagaggttgctttttggtcttctggaagcaccaccatcatgggctccagatgcacttgatgcagcagtacaactagttgagctacttagagcagccgaagattatgcttctggcatgcggcttccaaaaaattggatgcatctgcatttcttgcgtgcgattggaactgcaatgtcaatgagagctggcattgctgctgatacagctgctgctttgcttttccgaatactttcccaaccaacgctgctttttccaccactgagacatgccgaaggagttgaagtacatcatgaaccactaggtggctatgtatcatcatataagaagcagttggaagttcctgcatctgaggccactatcgatgccactgcacaaggcattgcttctttgttgtgtgctcatggccctgatgttgagtggagaatatgtaccatctgggaagctgcctatggtttgctaccgctaagttcatcagcagttgatttgcctgaaattgttgtagctgccccgcttcagccacctacactgtcatggagcctgtacttaccattattaaaagtatttgagtatctacctcgtggcagtccatctgaagcatgccttatgaggatatttgtggcaacggttgaagctatacttaggagaacttttccttctgaaacatcagagcaatccagaaagccaagaagtcaatctaagaaccttgctgttgctgaacttcacacaatgatacattcactctttgttgaatcctgtgcctcaatggaccttgcctcccggttgctatttgtggtgttaactgtttgtgtcagtcatcaagctttgccagggggtagcaaaagaccaactggtagtgataaccattcccacgaggaagccactgagcattcaagattaacaaatggaagaagcagatgtaagaagagacaaggccctgttgctacgtttgattcatatgttctagctgcagtttgtgccttatcttgtgagctccagctgttccctttcattactaagaatggatcacattcaaatttaaaggattccatgaagattatcatatctggaaaaaacaatgggatgaataatgagctacacaacagcatcagctcagcaattcttcatactcgcagaattcttggcatcttggaagccgttttctccctgaagccatcatcagttggtacctcatggagctatagctcaaatgaaatagttgcagcagctatggttgctgctcatgtttctgagttatttcgtcggtccaggccatgccttaatgcactctctgcactaatgagatgcaagtgggatgctgagatttcgaccagggcatcatctctctaccatttgattgacttgcatggtaaaacagtttcctccattgtgaacaaagctgagcctcttgaagctcacctgacccttacaccagtaaagagggataatcaacatcaccgtgaggaaagcaataccagctcattggatagtgtcaagttggaaaacaagaatggttcaacatcacacaagaaaaacggtttctcaagaccactcttgaaatgtgcagaagaggtcctactgaatggcgatgttgcaagtacatctgggaaatccattgcaagcttacaggtggaagcatctgatttggcaaacttccttaccatggatcggaatgggggttaccgaggttcacaaactcttctaagatctgtattatcagagaaacaagagctgtgcttctctgttgtctcattgctctggcagaagctcatagcttctcctgaaatgcagatgtctgcagaaagtacatcagctcaccaaggatggaggaaggttgttgatgcactttgtgatgtcgtttcagcctcaccaaccaaggcatcagctgctatcgttctccaggccgagaaggacttgcagccttggattgctagagatgacgaacaaggtcagaagatgtggagagtcaaccagcgtatagtgaagcttatagctgagcttatgaggaaccatgacagccctgaagcgttggtgatactcgctagtgcctccgaccttctacttcgtgctaccgatggaatgctcgtcgatggtgaagcttgtactttgccacagcttgagcttctggaagtgaccgctcgggctgtccatcttatcatcgaatggggagattcaggtttatcagttgcagatggtctttcaaatctgctgaagtgccgtctatcaaccaccatccgctgcctttctcacccaagtgcacacgtgcgcgcactcagcatgtctgtcctccgcgacatcctgagcaacggatccgtgaaccccaacaagacaatccaaggggaacagcagcggaacggcatccagagcccgtcctaccggtgcctggccgcaggcatcatcaactggcaagcggacgtcgagaggtgcatagagtgggaagcccacagccgccgcgccactgggctgacgctcgccttcctcagtgccgcagcgaaggagctcggctgccctctcccgtcatgacaaggccattcctggatctgacatcggcttccaattgacggtcagtgctggcacagctgctgcagggtccgcgagtaggacggctctaatctctccatcacgtgttattatctggtgtttccataatgcgatttgatttcaatttggcgttagatgttgtacacgtgtatttaactgcttgagttgtacgtaatttgtatacttgtaactttgtttaataatatggctattactcaagaagcggaacatatcttatcctttttatatgctgctgctagatccgttcaacgtgagtgccatgcaaatgtccacgaaatgtttagtatttgttagggggaaaaggtctcggtggaaggtaaaataatttctaactgttattcaggataaatgatttaacgtggtttgaattattacaa

SEQ ID NO: 75660 - DNA, 4223 bp, Zea Mays
tttttctcgcctctcctcgctcctcgccatttctctctcttcccctccgcttcgcccaccgcccgctccgaaatctgcgcgccgacgccgccggctgcccgtggagagcctcgaattagagcgcgttccgtcgagaggttttcaagcaactatgtttgagtttggttgatatgatactcattcacgttggggatgcagaccccccctctgtgggggttgattgaagaagttaactgtacacttaggagaacttgtgtcctactgaaagtttcttggtttcgaggcaagtatgtcagattcaaatgtgaatgtcttactaagagtagggctttggtggcatagatggatgaactgattgtcaacttcaacaagttgttgattacagagcctttctagtttcttgggcaggctcttgagctaccaagcatgtcagattcaaatgtgaagtggattgatgggctccagttcacatcattgtactggcctccacccctcgatgcggagcagaagcaggcacaaattttggcatatgtcgagtactttggccagtttacagctgacaccgatcaattccctgaagacatagctcagctcattcaaagttcctatccatcaaaagaaaatcgcttggtagatgaagtattggcaacttttgttcttcatcatccggagcatggtcatgcagttgcacatccaattctttcacgcatcatagatgggacgctgtgctatgatagacatggtcccccattcagttccttcatctctttattcagccataattctgagagtactcagagcagtgggccttggcctgtggagaaattcttagggtcttaactcactacaataggccaatattcaaagttgagcgccaacatactgaagctgaatgtagcagcacatctgatcaggcaacatctagtgattccacagataagagatctaataattctccaggaaatgaatctgactggaagccattgaggccactaaccccgtggatcactgacatattgctagccgcacctttgggcattcgaagtgactattttcgatggtgtggcggtgtaatgggaaaatatgctgctggtggagagttgaagcctccaactactgcttgcagccgaggatctgggaagcacccacagcttatgccttccacccccagatgggctgttgccaatggagctggagttatattaagtgtctgtgatgaggaggtagctcgttatgagacagcaaatttaacagcagcagctgttcctgcgcttctgctacctccaccaacaacacccttggacgagcatttggtggctggcctgccccctcttgaaccatatgctcggttgttccatagatactatgcaattgctacaccaagtgctacacagaggttgctttttggtcttctggaagcaccaccatcatgggctccagatgcacttgatgcagcagtacaactagttgagctacttagagcagccgaagattatgcttctggcatgcggcttccaaaaaattggatgcatctgcatttcttgcgtgcgattggaactgcaatgtcaatgagagctggcattgctgctgatacagctgctgctttgcttttccgaatactttcccaaccaacgctgctttttccaccactgagacatgccgaaggagttgaagtacatcatgaaccactaggtggctatgtatcatcatataagaagcagttggaagttcctgcatctgaggccactatcgatgccactgcacaaggcattgcttctttgttgtgtgctcatggccctgatgttgagtggagaatatgtaccatctgggaagctgcctatggtttgctaccgctaagttcatcagcagttgatttgcctgaaattgttgtagctgccccgcttcagccacctacactgtcatggagcctgtacttaccattattaaaagtatttgagtatctacctcgtggcagtccatctgaagcatgccttatgaggatatttgtggcaacggttgaagctatacttaggagaacttttccttctgaaacatcagagcaatccagaaagccaagaagtcaatctaagaaccttgctgttgctgaacttcacacaatgatacattcactctttgttgaatcctgtgcctcaatggaccttgcctcccggttgctatttgtggtgttaactgtttgtgtcagtcatcaagctttgccagggggtagcaaaagaccaactggtagtgataaccattcccacgaggaagccactgagcattcaagattaacaaatggaagaagcagatgtaagaagagacaaggccctgttgctacgtttgattcatatgttctagctgcagtttgtgccttatcttgtgagctccagctgttccctttcattactaagaatggatcacattcaaatttaaaggattccatgaagattatcatatctggaaaaaacaatgggatgaataatgagctacacaacagcatcagctcagcaattcttcatactcgcagaattcttggcatcttggaagccgttttctccctgaagccatcatcagttggtacctcatggagctatagctcaaatgaaatagttgcagcagctatggttgctgctcatgtttctgagttatttcgtcggtccaggccatgccttaatgcactctctgcactaatgagatgcaagtgggatgctgagatttcgaccagggcatcatctctctaccatttgattgacttgcatggtaaaacagtttcctccattgtgaacaaagctgagcctcttgaagctcacctgacccttacaccagtaaagagggataatcaacatcaccgtgaggaaagcaataccagctcattggatagtgtcaagttggaaaacaagaatggttcaacatcacacaagaaaaacggtttctcaagaccactcttgaaatgtgcagaagaggtcctactgaatggcgatgttgcaagtacatctgggaaatccattgcaagcttacaggtggaagcatctgatttggcaaacttccttaccatggatcggaatgggggttaccgagatgtctgcagaaagtacatcagctcaccaaggatggaggaaggttgttgatgcactttgtgatgtcgtttcagcctcaccaaccaaggcatcagctgctatcgttctccaggccgagaaggacttgcagccttggattgctagagatgacgaacaaggtcagaagatgtggagagtcaaccagcgtatagtgaagcttatagctgagcttatgaggaaccatgacagccctgaagcgttggtgatactcgctagtgcctccgaccttctacttcgtgctaccgatggaatgctcgtcgatggtgaagcttgtactttgccacagcttgagcttctggaagtgaccgctcgggctgtccatcttatcatcgaatggggagattcaggtttatcagttgcagatggtctttcaaatctgctgaagtgccgtctatcaaccaccatccgctgcctttctcacccaagtgcacacgtgcgcgcactcagcatgtctgtcctccgcgacatcctgagcaacggatccgtgaaccccaacaagacaatccaaggggaacagcagcggaacggcatccagagcccgtcctaccggtgcctggccgcaggcatcatcaactggcaagcggacgtcgagaggtgcatagagtgggaagcccacagccgccgcgccactgggctgacgctcgccttcctcagtgccgcagcgaaggagctcggctgccctctcccgtcatgacaaggccattcctggatctgacatcggcttccaattgacggtcagtgctggcacagctgctgcagggtccgcgagtaggacggctctaatctctccatcacgtgttattatctggtgtttccataatgcgatttgatttcaatttggcgttagatgttgtacacgtgtatttaactgcttgagttgtacgtaatttgtatacttgtaactttgtttaataatatggctattactcaagaagcggaacatatcttatcctttttatatgctgctgctagatccgttcaacgtgagtgccatgcaaatgtccacgaaatgtttagtatttgttagggggaaaaggtctcggtggaaggtaaaataatttctaactgttattcaggataaatgatttaacgtggtttgaattattacaa

SEQ ID NO: 75661 - DNA, 4435 bp, Zea Mays
tttttctcgcctctcctcgctcctcgccatttctctctcttcccctccgcttcgcccaccgcccgctccgaaatctgcgcgccgacgccgccggctgcccgtggagagcctcgaattagagcgcgttccgtcgagaggttttcaagcaactatgtttgagtttggttgatatgatactcattcacgttggggatgcagaccccccctctgtgggggttgattgaagaagttaactgtacacttaggagaacttgtgtcctactgaaagtttcttggtttcgaggtgctcttattggttattggatcgctgtgtgtaatttgtttctttccctttgagagcctttctagtttcttgggcaggctcttgagctaccaagcatgtcagattcaaatgtgaagtggattgatgggctccagttcacatcattgtactggcctccacccctcgatgcggagcagaagcaggcacaaattttggcatatgtcgagtactttggccagtttacagctgacaccgatcaattccctgaagacatagctcagctcattcaaagttcctatccatcaaaagaaaatcgcttggtagatgaagtattggcaacttttgttcttcatcatccggagcatggtcatgcagttgcacatccaattctttcacgcatcatagatgggacgctgtgctatgatagacatggtcccccattcagttccttcatctctttattcagccataattctgagcaagagtactcagagcagtgggccttggcctgtggagaaattcttagggtcttaactcactacaataggccaatattcaaagttgagcgccaacatactgaagctgaatgtagcagcacatctgatcaggcaacatctagtgattccacagataagagatctaataattctccaggaaatgaatctgactggaagccattgaggccactaaccccgtggatcactgacatattgctagccgcacctttgggcattcgaagtgactattttcgatggtgtggcggtgtaatgggaaaatatgctgctggtggagagttgaagcctccaactactgccgaggatctgggaagcacccacagcttatgccttccacccccagatgggctgttgccaatggagctggagttatattaagtgtctgtgatgaggaggtagctcgttatgagacagcaaatttaacagcagcagctgttcctgcgcttctgctacctccaccaacaacacccttggacgagcatttggtggctggcctgccccctcttgaaccatatgctcggttgttccatagatactatgcaattgctacaccaagtgctacacagaggttgctttttggtcttctggaagcaccaccatcatgggctccagatgcacttgatgcagcagtacaactagttgagctacttagagcagccgaagattatgcttctggcatgcggcttccaaaaaattggatgcatctgcatttcttgcgtgcgattggaactgcaatgtcaatgagagctggcattgctgctgatacagctgctgctttgcttttccgaatactttcccaaccaacgctgctttttccaccactgagacatgccgaaggagttgaagtacatcatgaaccactaggtggctatgtatcatcatataagaagcagttggaagttcctgcatctgaggccactatcgatgccactgcacaaggcattgcttctttgttgtgtgctcatggccctgatgttgagtggagaatatgtaccatctgggaagctgcctatggtttgctaccgctaagttcatcagcagttgatttgcctgaaattgttgtagctgccccgcttcagccacctacactgtcatggagcctgtacttaccattattaaaagtatttgagtatctacctcgtggcagtccatctgaagcatgccttatgaggatatttgtggcaacggttgaagctatacttaggagaacttttccttctgaaacatcagagcaatccagaaagccaagaagtcaatctaagaaccttgctgttgctgaacttcacacaatgatacattcactctttgttgaatcctgtgcctcaatggaccttgcctcccggttgctatttgtggtgttaactgtttgtgtcagtcatcaagctttgccagggggtagcaaaagaccaactggtagtgataaccattcccacgaggaagccactgagcattcaagattaacaaatggaagaagcagatgtaagaagagacaaggccctgttgctacgtttgattcatatgttctagctgcagtttgtgccttatcttgtgagctccagctgttccctttcattactaagaatggatcacattcaaatttaaaggattccatgaagattatcatatctggaaaaaacaatgggatgaataatgagctacacaacagcatcagctcagcaattcttcatactcgcagaattcttggcatcttggaagccgttttctccctgaagccatcatcagttggtacctcatggagctatagctcaaatgaaatagttgcagcagctatggttgctgctcatgtttctgagttatttcgtcggtccaggccatgccttaatgcactctctgcactaatgagatgcaagtgggatgctgagatttcgaccagggcatcatctctctaccatttgattgacttgcatggtaaaacagtttcctccattgtgaacaaagctgagcctcttgaagctcacctgacccttacaccagtaaagagggataatcaacatcaccgtgaggaaagcaataccagctcattggatagtgtcaagttggaaaacaagaatggttcaacatcacacaagaaaaacggtttctcaagaccactcttgaaatgtgcagaagaggtcctactgaatggcgatgttgcaagtacatctgggaaatccattgcaagcttacaggtggaagcatctgatttggcaaacttccttaccatggatcggaatgggggttaccgagatgtctgcagaaagtacatcagctcaccaaggatggaggaaggttgttgatgcactttgtgatgtcgtttcagcctcaccaaccaaggcatcagctgctatcgttctccaggtcaagatattgctatattgcacgtttggtcaaaactaaatttggtttaaagtttgttcgatttatttcaaaacaaattcaattttctttttctgattaatctatttcaaaacgaacattctctgtttttttttggtttctgacatctatttcaaaacacattttaactacaatgcctaggtggaatatggacctgtttcctagtcatatttcttgacgcttattttttttttcgcaggccgagaaggacttgcagccttggattgctagagatgacgaacaaggtcagaagatgtggagagtcaaccagcgtatagtgaagcttatagctgagcttatgaggaaccatgacagccctgaagcgttggtgatactcgctagtgcctccgaccttctacttcgtgctaccgatggaatgctcgtcgatggtgaagcttgtactttgccacagcttgagcttctggaagtgaccgctcgggctgtccatcttatcatcgaatggggagattcaggtttatcagttgcagatggtctttcaaatctgctgaaggttaactgaatattgtgatctgcagtgccgtctatcaaccaccatccgctgcctttctcacccaagtgcacacgtgcgcgcactcagcatgtctgtcctccgcgacatcctgagcaacggatccgtgaaccccaacaagacaatccaaggggaacagcagcggaacggcatccagagcccgtcctaccggtgcctggccgcaggcatcatcaactggcaagcggacgtcgagaggtgcatagagtgggaagcccacagccgccgcgccactgggctgacgctcgccttcctcagtgccgcagcgaaggagctcggctgccctctcccgtcatgacaaggccattcctggatctgacatcggcttccaattgacggtcagtgctggcacagctgctgcagggtccgcgagtaggacggctctaatctctccatcacgtgttattatctggtgtttccataatgcgatttgatttcaatttggcgttagatgttgtacacgtgtatttaactgcttgagttgtacgtaatttgtatacttgtaactttgtttaataatatggctattactcaagaagcggaacatatcttatcctttttatatgctgctgctagatccgttcaacgtgagtgccatgcaaatgtccacgaaatgtttagtatttgttagggggaaaaggtctcggtggaaggtaaaataatttctaactgttattcaggataaatgatttaacgtggtttgaattattacaa

SEQ ID NO: 75662 - DNA, 4471 bp, Zea Mays
tttttctcgcctctcctcgctcctcgccatttctctctcttcccctccgcttcgcccaccgcccgctccgaaatctgcgcgccgacgccgccggctgcccgtggagagcctcgaattagagcgcgttccgtcgagaggttttcaagcaactatgtttgagtttggttgatatgatactcattcacgttggggatgcagaccccccctctgtgggggttgattgaagaagttaactgtacacttaggagaacttgtgtcctactgaaagtttcttggtttcgaggcaaagcctttctagtttcttgggcaggctcttgagctaccaagcatgtcagattcaaatgtgaagtggattgatgggctccagttcacatcattgtactggcctccacccctcgatgcggagcagaagcaggcacaaattttggcatatgtcgagtactttggccagtttacagctgacaccgatcaattccctgaagacatagctcagctcattcaaagttcctatccatcaaaagaaaatcgcttggtagatgaagtattggcaacttttgttcttcatcatccggagcatggtcatgcagttgcacatccaattctttcacgcatcatagatgggacgctgtgctatgatagacatggtcccccattcagttccttcatctctttattcagccataattctgagcaagagtactcagagcagtgggccttggcctgtggagaaattcttagggtcttaactcactacaataggccaatattcaaagttgagcgccaacatactgaagctgaatgtagcagcacatctgatcaggcaacatctagtgattccacagataagagatctaataattctccaggaaatgaatctgactggaagccattgaggccactaaccccgtggatcactgacatattgctagccgcacctttgggcattcgaagtgactattttcgatggtgtggcggtgtaatgggaaaatatgctgctggtggagagttgaagcctccaactactgcttgcagccgaggatctgggaagcacccacagcttatgccttccacccccagatgggctgttgccaatggagctggagttatattaagtgtctgtgatgaggaggtagctcgttatgagacagcaaatttaacagcagcagctgttcctgcgcttctgctacctccaccaacaacacccttggacgagcatttggtggctggcctgccccctcttgaaccatatgctcggttgttccatagatactatgcaattgctacaccaagtgctacacagaggttgctttttggtcttctggaagcaccaccatcatgggctccagatgcacttgatgcagcagtacaactagttgagctacttagagcagccgaagattatgcttctggcatgcggcttccaaaaaattggatgcatctgcatttcttgcgtgcgattggaactgcaatgtcaatgagagctggcattgctgctgatacagctgctgctttgcttttccgaatactttcccaaccaacgctgctttttccaccactgagacatgccgaaggagttgaagtacatcatgaaccactaggtggctatgtatcatcatataagaagcagttggaagttcctgcatctgaggccactatcgatgccactgcacaaggcattgcttctttgttgtgtgctcatggccctgatgttgagtggagaatatgtaccatctgggaagctgcctatggtttgctaccgctaagttcatcagcagttgatttgcctgaaattgttgtagctgccccgcttcagccacctacactgtcatggagcctgtacttaccattattaaaagtatttgagtatctacctcgtggcagtccatctgaagcatgccttatgaggatatttgtggcaacggttgaagctatacttaggagaacttttccttctgaaacatcagagcaatccagaaagccaagaagtcaatctaagaaccttgctgttgctgaacttcacacaatgatacattcactctttgttgaatcctgtgcctcaatggaccttgcctcccggttgctatttgtggtgttaactgtttgtgtcagtcatcaagctttgccagggggtagcaaaagaccaactggtagtgataaccattcccacgaggaagccactgagcattcaagattaacaaatggaagaagcagatgtaagaagagacaaggccctgttgctacgtttgattcatatgttctagctgcagtttgtgccttatcttgtgagctccagctgttccctttcattactaagaatggatcacattcaaatttaaaggattccatgaagattatcatatctggaaaaaacaatgggatgaataatgagctacacaacagcatcagctcagcaattcttcatactcgcagaattcttggcatcttggaagccgttttctccctgaagccatcatcagttggtacctcatggagctatagctcaaatgaaatagttgcagcagctatggttgctgctcatgtttctgagttatttcgtcggtccaggccatgccttaatgcactctctgcactaatgagatgcaagtgggatgctgagatttcgaccagggcatcatctctctaccatttgattgacttgcatggtaaaacagtttcctccattgtgaacaaagctgagcctcttgaagctcacctgacccttacaccagtaaagagggataatcaacatcaccgtgaggaaagcaataccagctcattggatagtgtcaagttggaaaacaagaatggttcaacatcacacaagaaaaacggtttctcaagaccactcttgaaatgtgcagaagaggtcctactgaatggcgatgttgcaagtacatctgggaaatccattgcaagcttacaggtggaagcatctgatttggcaaacttccttaccatggatcggaatgggggttaccgaggttcacaaactcttctaagatctgtattatcagagaaacaagagctgtgcttctctgttgtctcattgctctggcagaagctcatagcttctcctgaaatgcagatgtctgcagaaagtacatcagctcaccaaggatggaggaaggttgttgatgcactttgtgatgtcgtttcagcctcaccaaccaaggcatcagctgctatcgttctccaggtcaagatattgctatattgcacgtttggtcaaaactaaatttggtttaaagtttgttcgatttatttcaaaacaaattcaattttctttttctgattaatctatttcaaaacgaacattctctgtttttttttggtttctgacatctatttcaaaacacattttaactacaatgcctaggtggaatatggacctgtttcctagtcatatttcttgacgcttattttttttttcgcaggccgagaaggacttgcagccttggattgctagagatgacgaacaaggtcagaagatgtggagagtcaaccagcgtatagtgaagcttatagctgagcttatgaggaaccatgacagccctgaagcgttggtgatactcgctagtgcctccgaccttctacttcgtgctaccgatggaatgctcgtcgatggtgaagcttgtactttgccacagcttgagcttctggaagtgaccgctcgggctgtccatcttatcatcgaatggggagattcaggtttatcagttgcagatggtctttcaaatctgctgaagtgccgtctatcaaccaccatccgctgcctttctcacccaagtgcacacgtgcgcgcactcagcatgtctgtcctccgcgacatcctgagcaacggatccgtgaaccccaacaagacaatccaaggggaacagcagcggaacggcatccagagcccgtcctaccggtgcctggccgcaggcatcatcaactggcaagcggacgtcgagaggtgcatagagtgggaagcccacagccgccgcgccactgggctgacgctcgccttcctcagtgccgcagcgaaggagctcggctgccctctcccgtcatgacaaggccattcctggatctgacatcggcttccaattgacggtcagtgctggcacagctgctgcagggtccgcgagtaggacggctctaatctctccatcacgtgttattatctggtgtttccataatgcgatttgatttcaatttggcgttagatgttgtacacgtgtatttaactgcttgagttgtacgtaatttgtatacttgtaactttgtttaataatatggctattactcaagaagcggaacatatcttatcctttttatatgctgctgctagatccgttcaacgtgagtgccatgcaaatgtccacgaaatgtttagtatttgttagggggaaaaggtctcggtggaaggtaaaataatttctaactgttattcaggataaatgatttaacgtggtttgaattattacaa

SEQ ID NO: 75663 - DNA, 4313 bp, Zea Mays
aaatctttttctcgcctctcctcgctcctcgccatttctctctcttcccctccgcttcgcccaccgcccgctccgaaatctgcgcgccgacgccgccggctgcccgtggagagcctcgaattagagcgcgttccgtcgagaggttttcaagcaactatgtttgagtttggttgatatgatactcattcacgttggggatgcagaccccccctctgtgggggttgattgaagaagttaactgtacacttaggagaacttgtgtcctactgaaagtttcttggtttcgaggtgctcttattggttattggatcgctgtgtgtaatttgtttctttccctttgagagcctttctagtttcttgggcaggctcttgagctaccaagcatgtcagattcaaatgtgaagtggattgatgggctccagttcacatcattgtactggcctccacccctcgatgcggagcagaagcaggcacaaattttggcatatgtcgagtactttggccagtttacagctgacaccgatcaattccctgaagacatagctcagctcattcaaagttcctatccatcaaaagaaaatcgcttggtagatgaagtattggcaacttttgttcttcatcatccggagcatggtcatgcagttgcacatccaattctttcacgcatcatagatgggacgctgtgctatgatagacatggtcccccattcagttccttcatctctttattcagccataattctgagcaagagtactcagagcagtgggccttggcctgtggagaaattcttagggtcttaactcactacaataggccaatattcaaagttgagcgccaacatactgaagctgaatgtagcagcacatctgatcaggcaacatctagtgattccacagataagagatctaataattctccaggaaatgaatctgactggaagccattgaggccactaaccccgtggatcactgacatattgctagccgcacctttgggcattcgaagtgactattttcgatggtgtggcggtgtaatgggaaaatatgctgctggtggagagttgaagcctccaactactgcttgcagccgaggatctgggaagcacccacagcttatgccttccacccccagatgggctgttgccaatggagctggagttatattaagtgtctgtgatgaggaggtagctcgttatgagacagcaaatttaacagcagcagctgttcctgcgcttctgctacctccaccaacaacacccttggacgagcatttggtggctggcctgccccctcttgaaccatatgctcggttgttccatagatactatgcaattgctacaccaagtgctacacagaggttgctttttggtcttctggaagcaccaccatcatgggctccagatgcacttgatgcagcagtacaactagttgagctacttagagcagccgaagattatgcttctggcatgcggcttccaaaaaattggatgcatctgcatttcttgcgtgcgattggaactgcaatgtcaatgagagctggcattgctgctgatacagctgctgctttgcttttccgaatactttcccaaccaacgctgctttttccaccactgagacatgccgaaggagttgaagtacatcatgaaccactaggtggctatgtatcatcatataagaagcagttggaagttcctgcatctgaggccactatcgatgccactgcacaaggcattgcttctttgttgtgtgctcatggccctgatgttgagtggagaatatgtaccatctgggaagctgcctatggtttgctaccgctaagttcatcagcagttgatttgcctgaaattgttgtagctgccccgcttcagccacctacactgtcatggagcctgtacttaccattattaaaagtatttgagtatctacctcgtggcagtccatctgaagcatgccttatgaggatatttgtggcaacggttgaagctatacttaggagaacttttccttctgaaacatcagagcaatccagaaagccaagaagtcaatctaagaaccttgctgttgctgaacttcacacaatgatacattcactctttgttgaatcctgtgcctcaatggaccttgcctcccggttgctatttgtggtgttaactgtttgtgtcagtcatcaagctttgccagggggtagcaaaagaccaactggtagtgataaccattcccacgaggaagccactgagcattcaagattaacaaatggaagaagcagatgtaagaagagacaaggccctgttgctacgtttgattcatatgttctagctgcagtttgtgccttatcttgtgagctccagctgttccctttcattactaagaatggatcacattcaaatttaaaggattccatgaagattatcatatctggaaaaaacaatgggatgaataatgagctacacaacagcatcagctcagcaattcttcatactcgcagaattcttggcatcttggaagccgttttctccctgaagccatcatcagttggtacctcatggagctatagctcaaatgaaatagttgcagcagctatggttgctgctcatgtttctgagttatttcgtcggtccaggccatgccttaatgcactctctgcactaatgagatgcaagtgggatgctgagatttcgaccagggcatcatctctctaccatttgattgacttgcatggtaaaacagtttcctccattgtgaacaaagctgagcctcttgaagctcacctgacccttacaccagtaaagagggataatcaacatcaccgtgaggaaagcaataccagctcattggatagtgtcaagttggaaaacaagaatggttcaacatcacacaagaaaaacggtttctcaagaccactcttgaaatgtgcagaagaggtcctactgaatggcgatgttgcaagtacatctgggaaatccattgcaagcttacaggtggaagcatctgatttggcaaacttccttaccatggatcggaatgggggttaccgaggttcacaaactcttctaagatctgtattatcagagaaacaagagctgtgcttctctgttgtctcattgctctggcagaagctcatagcttctcctgaaatgcagatgtctgcagaaagtacatcagctcaccaaggatggaggaaggttgttgatgcactttgtgatgtcgtttcagcctcaccaaccaaggcatcagctgctatcgttctccaggccgagaaggacttgcagccttggattgctagagatgacgaacaaggtcagaagatgtggagagtcaaccagcgtatagtgaagcttatagctgagcttatgaggaaccatgacagccctgaagcgttggtgatactcgctagtgcctccgaccttctacttcgtgctaccgatggaatgctcgtcgatggtgaagcttgtactttgccacagcttgagcttctggaagtgaccgctcgggctgtccatcttatcatcgaatggggagattcaggtttatcagttgcagatggtctttcaaatctgctgaaggttaactgaatattgtgatctgcagtgccgtctatcaaccaccatccgctgcctttctcacccaagtgcacacgtgcgcgcactcagcatgtctgtcctccgcgacatcctgagcaacggatccgtgaaccccaacaagacaatccaaggggaacagcagcggaacggcatccagagcccgtcctaccggtgcctggccgcaggcatcatcaactggcaagcggacgtcgagaggtgcatagagtgggaagcccacagccgccgcgccactgggctgacgctcgccttcctcagtgccgcagcgaaggagctcggctgccctctcccgtcatgacaaggccattcctggatctgacatcggcttccaattgacggtcagtgctggcacagctgctgcagggtccgcgagtaggacggctctaatctctccatcacgtgttattatctggtgtttccataatgcgatttgatttcaatttggcgttagatgttgtacacgtgtatttaactgcttgagttgtacgtaatttgtatacttgtaactttgtttaataatatggctattactcaagaagcggaacatatcttatcctttttatatgctgctgctagatccgttcaacgtgagtgccatgcaaatgtccacgaaatgtttagtatttgttagggggaaaaggtctcggtggaaggtaaaataatttctaactgttattcaggataaatgatttaacgtggtttgaattattacaa

SEQ ID NO: 75664 - DNA, 4329 bp, Zea Mays
cccgtgcatagcccgcgtccacctgtcggtgactgcagccatccgcgtggggcctccacctgtagcgcgcgggtgaaataacgcggccgcaccaccaccacgccctgcatcgcggaaaaaatctttttctcgcctctcctcgctcctcgccatttctctctcttcccctccgcttcgcccaccgcccgctccgaaatctgcgcgccgacgccgccggctgcccgtggagagcctcgaattagagcgcgttccgtcgagaggttttcaagcaactatgtttgagtttggttgatatgatactcattcacgttggggatgcagaccccccctctgtgggggttgattgaagaagttaactgtacacttaggagaacttgtgtcctactgaaagtttcttggtttcgaggctcttgagctaccaagcatgtcagattcaaatgtgaagtggattgatgggctccagttcacatcattgtactggcctccacccctcgatgcggagcagaagcaggcacaaattttggcatatgtcgagtactttggccagtttacagctgacaccgatcaattccctgaagacatagctcagctcattcaaagttcctatccatcaaaagaaaatcgcttggtagatgaagtattggcaacttttgttcttcatcatccggagcatggtcatgcagttgcacatccaattctttcacgcatcatagatgggacgctgtgctatgatagacatggtcccccattcagttccttcatctctttattcagccataattctgagcaagagtactcagagcagtgggccttggcctgtggagaaattcttagggtcttaactcactacaataggccaatattcaaagttgagcgccaacatactgaagctgaatgtagcagcacatctgatcaggcaacatctagtgattccacagataagagatctaataattctccaggaaatgaatctgactggaagccattgaggccactaaccccgtggatcactgacatattgctagccgcacctttgggcattcgaagtgactattttcgatggtgtggcggtgtaatgggaaaatatgctgctggtggagagttgaagcctccaactactgcttgcagccgaggatctgggaagcacccacagcttatgccttccacccccagatgggctgttgccaatggagctggagttatattaagtgtctgtgatgaggaggtagctcgttatgagacagcaaatttaacagcagcagctgttcctgcgcttctgctacctccaccaacaacacccttggacgagcatttggtggctggcctgccccctcttgaaccatatgctcggttgttccatagatactatgcaattgctacaccaagtgctacacagaggttgctttttggtcttctggaagcaccaccatcatgggctccagatgcacttgatgcagcagtacaactagttgagctacttagagcagccgaagattatgcttctggcatgcggcttccaaaaaattggatgcatctgcatttcttgcgtgcgattggaactgcaatgtcaatgagagctggcattgctgctgatacagctgctgctttgcttttccgaatactttcccaaccaacgctgctttttccaccactgagacatgccgaaggagttgaagtacatcatgaaccactaggtggctatgtatcatcatataagaagcagttggaagttcctgcatctgaggccactatcgatgccactgcacaaggcattgcttctttgttgtgtgctcatggccctgatgttgagtggagaatatgtaccatctgggaagctgcctatggtttgctaccgctaagttcatcagcagttgatttgcctgaaattgttgtagctgccccgcttcagccacctacactgtcatggagcctgtacttaccattattaaaagtatttgagtatctacctcgtggcagtccatctgaagcatgccttatgaggatatttgtggcaacggttgaagctatacttaggagaacttttccttctgaaacatcagagcaatccagaaagccaagaagtcaatctaagaaccttgctgttgctgaacttcacacaatgatacattcactctttgttgaatcctgtgcctcaatggaccttgcctcccggttgctatttgtggtgttaactgtttgtgtcagtcatcaagctttgccagggggtagcaaaagaccaactggtagtgataaccattcccacgaggaagccactgagcattcaagattaacaaatggaagaagcagatgtaagaagagacaaggccctgttgctacgtttgattcatatgttctagctgcagtttgtgccttatcttgtgagctccagctgttccctttcattactaagaatggatcacattcaaatttaaaggattccatgaagattatcatatctggaaaaaacaatgggatgaataatgagctacacaacagcatcagctcagcaattcttcatactcgcagaattcttggcatcttggaagccgttttctccctgaagccatcatcagttggtacctcatggagctatagctcaaatgaaatagttgcagcagctatggttgctgctcatgtttctgagttatttcgtcggtccaggccatgccttaatgcactctctgcactaatgagatgcaagtgggatgctgagatttcgaccagggcatcatctctctaccatttgattgacttgcatggtaaaacagtttcctccattgtgaacaaagctgagcctcttgaagctcacctgacccttacaccagtaaagagggataatcaacatcaccgtgaggaaagcaataccagctcattggatagtgtcaagttggaaaacaagaatggttcaacatcacacaagaaaaacggtttctcaagaccactcttgaaatgtgcagaagaggtcctactgaatggcgatgttgcaagtacatctgggaaatccattgcaagcttacaggtggaagcatctgatttggcaaacttccttaccatggatcggaatgggggttaccgaggttcacaaactcttctaagatctgtattatcagagaaacaagagctgtgcttctctgttgtctcattgctctggcagaagctcatagcttctcctgaaatgcagatgtctgcagaaagtacatcagctcaccaaggatggaggaaggttgttgatgcactttgtgatgtcgtttcagcctcaccaaccaaggcatcagctgctatcgttctccaggccgagaaggacttgcagccttggattgctagagatgacgaacaaggtcagaagatgtggagagtcaaccagcgtatagtgaagcttatagctgagcttatgaggaaccatgacagccctgaagcgttggtgatactcgctagtgcctccgaccttctacttcgtgctaccgatggaatgctcgtcgatggtgaagcttgtactttgccacagcttgagcttctggaagtgaccgctcgggctgtccatcttatcatcgaatggggagattcaggtttatcagttgcagatggtctttcaaatctgctgaagtgccgtctatcaaccaccatccgctgcctttctcacccaagtgcacacgtgcgcgcactcagcatgtctgtcctccgcgacatcctgagcaacggatccgtgaaccccaacaagacaatccaaggggaacagcagcggaacggcatccagagcccgtcctaccggtgcctggccgcaggcatcatcaactggcaagcggacgtcgagaggtgcatagagtgggaagcccacagccgccgcgccactgggctgacgctcgccttcctcagtgccgcagcgaaggagctcggctgccctctcccgtcatgacaaggccattcctggatctgacatcggcttccaattgacggtcagtgctggcacagctgctgcagggtccgcgagtaggacggctctaatctctccatcacgtgttattatctggtgtttccataatgcgatttgatttcaatttggcgttagatgttgtacacgtgtatttaactgcttgagttgtacgtaatttgtatacttgtaactttgtttaataatatggctattactcaagaagcggaacatatcttatcctttttatatgctgctgctagatccgttcaacgtgagtgccatgcaaatgtccacgaaatgtttagtatttgttagggggaaaaggtctcggtggaaggtaaaataatttctaactgttattcaggataaatgatttaacgtggtttgaattattacaa

SEQ ID NO: 75665 - DNA, 4468 bp, Zea Mays
gtgggcccgtgcatagcccgcgtccacctgtcggtgactgcagccatccgcgtggggcctccacctgtagcgcgcgggtgaaataacgcggccgcaccaccaccacgccctgcatcgcggaaaaaatctttttctcgcctctcctcgctcctcgccatttctctctcttcccctccgcttcgcccaccgcccgctccgaaatctgcgcgccgacgccgccggctgcccgtggagagcctcgaattagagcgcgttccgtcgagaggttttcaagcaactatgtttgagtttggttgatatgatactcattcacgttggggatgcagaccccccctctgtgggggttgattgaagaagttaactgtacacttaggagaacttgtgtcctactgaaagtttcttggtttcgaggctcttgagctaccaagcatgtcagattcaaatgtgaagtggattgatgggctccagttcacatcattgtactggcctccacccctcgatgcggagcagaagcaggcacaaattttggcatatgtcgagtactttggccagtttacagctgacaccgatcaattccctgaagacatagctcagctcattcaaagttcctatccatcaaaagaaaatcgcttggtagatgaagtattggcaacttttgttcttcatcatccggagcatggtcatgcagttgcacatccaattctttcacgcatcatagatgggacgctgtgctatgatagacatggtcccccattcagttccttcatctctttattcagccataattctgagcaagagtactcagagcagtgggccttggcctgtggagaaattcttagggtcttaactcactacaataggccaatattcaaagttgagcgccaacatactgaagctgaatgtagcagcacatctgatcaggcaacatctagtgattccacagataagagatctaataattctccaggaaatgaatctgactggaagccattgaggccactaaccccgtggatcactgacatattgctagccgcacctttgggcattcgaagtgactattttcgatggtgtggcggtgtaatgggaaaatatgctgctggtggagagttgaagcctccaactactgcttgcagccgaggatctgggaagcacccacagcttatgccttccacccccagatgggctgttgccaatggagctggagttatattaagtgtctgtgatgaggaggtagctcgttatgagacagcaaatttaacagcagcagctgttcctgcgcttctgctacctccaccaacaacacccttggacgagcatttggtggctggcctgccccctcttgaaccatatgctcggttgttccatagatactatgcaattgctacaccaagtgctacacagaggttgctttttggtcttctggaagcaccaccatcatgggctccagatgcacttgatgcagcagtacaactagttgagctacttagagcagccgaagattatgcttctggcatgcggcttccaaaaaattggatgcatctgcatttcttgcgtgcgattggaactgcaatgtcaatgagagctggcattgctgctgatacagctgctgctttgcttttccgaatactttcccaaccaacgctgctttttccaccactgagacatgccgaaggagttgaagtacatcatgaaccactaggtggctatgtatcatcatataagaagcagttggaagttcctgcatctgaggccactatcgatgccactgcacaaggcattgcttctttgttgtgtgctcatggccctgatgttgagtggagaatatgtaccatctgggaagctgcctatggtttgctaccgctaagttcatcagcagttgatttgcctgaaattgttgtagctgccccgcttcagccacctacactgtcatggagcctgtacttaccattattaaaagtatttgagtatctacctcgtggcagtccatctgaagcatgccttatgaggatatttgtggcaacggttgaagctatacttaggagaacttttccttctgaaacatcagagcaatccagaaagccaagaagtcaatctaagaaccttgctgttgctgaacttcacacaatgatacattcactctttgttgaatcctgtgcctcaatggaccttgcctcccggttgctatttgtggtgttaactgtttgtgtcagtcatcaagctttgccagggggtagcaaaagaccaactggtagtgataaccattcccacgaggaagccactgagcattcaagattaacaaatggaagaagcagatgtaagaagagacaaggccctgttgctacgtttgattcatatgttctagctgcagtttgtgccttatcttgtgagctccagctgttccctttcattactaagaatggatcacattcaaatttaaaggattccatgaagattatcatatctggaaaaaacaatgggatgaataatgagctacacaacagcatcagctcagcaattcttcatactcgcagaattcttggcatcttggaagccgttttctccctgaagccatcatcagttggtacctcatggagctatagctcaaatgaaatagttgcagcagctatggttgctgctcatgtttctgagttatttcgtcggtccaggccatgccttaatgcactctctgcactaatgagatgcaagtgggatgctgagatttcgaccagggcatcatctctctaccatttgattgacttgcatggtaaaacagtttcctccattgtgaacaaagctgagcctcttgaagctcacctgacccttacaccagtaaagagggataatcaacatcaccgtgaggaaagcaataccagctcattggatagtgtcaagttggaaaacaagaatggttcaacatcacacaagaaaaacggtttctcaagaccactcttgaaatgtgcagaagaggtcctactgaatggcgatgttgcaagtacatctgggaaatccattgcaagcttacaggtggaagcatctgatttggcaaacttccttaccatggatcggaatgggggttaccgagatgtctgcagaaagtacatcagctcaccaaggatggaggaaggttgttgatgcactttgtgatgtcgtttcagcctcaccaaccaaggcatcagctgctatcgttctccaggtcaagatattgctatattgcacgtttggtcaaaactaaatttggtttaaagtttgttcgatttatttcaaaacaaattcaattttctttttctgattaatctatttcaaaacgaacattctctgtttttttttggtttctgacatctatttcaaaacacattttaactacaatgcctaggtggaatatggacctgtttcctagtcatatttcttgacgcttattttttttttcgcaggccgagaaggacttgcagccttggattgctagagatgacgaacaaggtcagaagatgtggagagtcaaccagcgtatagtgaagcttatagctgagcttatgaggaaccatgacagccctgaagcgttggtgatactcgctagtgcctccgaccttctacttcgtgctaccgatggaatgctcgtcgatggtgaagcttgtactttgccacagcttgagcttctggaagtgaccgctcgggctgtccatcttatcatcgaatggggagattcaggtttatcagttgcagatggtctttcaaatctgctgaagtgccgtctatcaaccaccatccgctgcctttctcacccaagtgcacacgtgcgcgcactcagcatgtctgtcctccgcgacatcctgagcaacggatccgtgaaccccaacaagacaatccaaggggaacagcagcggaacggcatccagagcccgtcctaccggtgcctggccgcaggcatcatcaactggcaagcggacgtcgagaggtgcatagagtgggaagcccacagccgccgcgccactgggctgacgctcgccttcctcagtgccgcagcgaaggagctcggctgccctctcccgtcatgacaaggccattcctggatctgacatcggcttccaattgacggtcagtgctggcacagctgctgcagggtccgcgagtaggacggctctaatctctccatcacgtgttattatctggtgtttccataatgcgatttgatttcaatttggcgttagatgttgtacacgtgtatttaactgcttgagttgtacgtaatttgtatacttgtaactttgtttaataatatggctattactcaagaagcggaacatatcttatcctttttatatgctgctgctagatccgttcaacgtgagtgccatgcaaatgtccacgaaatgtttagtatttgttagggggaaaaggtctcggtggaaggtaaaataatttctaactgttattcaggataaatgatttaacgtggtttgaattattacaa

SEQ ID NO: 75666 - DNA, 840 bp, Zea Mays
taaaatctcttggttctcagttccgctccttatctcaatcatcatctgagctctcatcttcacagttctggcaattatcgctctctctgtggcactgataatctgtgtatacaagtagtacccaaagcgaggaaaacgcggtcgctggacctggaattcagaagaaacttgtaatttgagtgatagtagcatgcctttgcagtcatcctacatgcatcagtatcactatagcaagttgttgaattaaatgctgctaccgtcccggttgaccagtcggctgccgttgtttatcaacgaggatgttcattgctctatctcaaactgtgtgctccatgacctgtgatgcttctgaactcctgctgtcttggcgaccttcagaagcaattttctccagtttctcccagaaggagaaaggcaatggcaaagcagcaactagctctagctgggccctctgccatggtgacgcaaaggataacacaagtacgcaacgccgcatgagttggtgtctggctttgtcaagtgtccctctcgcggtgcctgtctcctttcacttgtggagcacggtgagctcgcaaattcgttcactgcaaaagagcctgctgtgacccccctgaaaccaacctctgtcgatgggcgaaacaatcaggcctttagctttcaggaggaaacaagtggcacatttggtatggcttcagcttcggttaccgtccataaaaaaagcgttggccatctaaaaaaacggctcctcgcaaggggcagagaaaccaaaagaataatgttctttatcgaggagccaggatcataaaaattgtggtcttttccggtttctctcaaattttg

SEQ ID NO: 75667 - DNA, 1293 bp, Zea Mays
gttccttctctcccctgagaccaccaacgccggggccggaaaaaagggaagccagagcacagagccagacctggcggcgctggacatccaaaaacgccgccaaggatccttctctctctctctctctctctcttcgcgtccatcgacctgaccgcggaggcgcgtgcttcttcttcccgctctccactgcagtgtcatgaagattgagggaaacttgcatgtttgatatacccagctgctttctgtaacgaaaaactcgtgatcattttgttgaattggtcactgtcagggagggatctacttgtcagtttttggtattaaggctgctggccttcccttgcagggtatctgtagaataaatgggagaagcacactcggatgaattttgccattgccaggggtgtgctggcaagtatgcactactcagagacgaagaaaacccacgattggcaatctttgagaggcggctgccttgctgtggttgtgggataggatggtctacgctctcatcttcacagttctggcaattatcgctctctctgtggcactgataatctgtgtatacaagtagtacccaaagcgaggaaaacgcggtcgctggacctggaattcagaagaaacttgtaatttgagtgatagtagcatgcctttgcagtcatcctacatgcatcagtatcactatagcaagttgttgaattaaatgctgctaccgtcccggttgaccagtcggctgccgttgtttatcaacgaggatgttcattgctctatctcaaactgtgtgctccatgacctgtgatgcttctgaactcctgctgtcttggcgaccttcagaagcaattttctccagtttctcccagaaggagaaaggcaatggcaaagcagcaactagctctagctgggccctctgccatggtgacgcaaaggataacacaagtacgcaacgccgcatgagttggtgtctggctttgtcaagtgtccctctcgcggtgcctgtctcctttcacttgtggagcacggtgagctcgcaaattcgttcactgcaaaagagcctgctgtgacccccctgaaaccaacctctgtcgatgggcgaaacaatcaggcctttagctttcaggaggaaacaagtggcacatttggtatggcttcagcttcggttaccgtccataaaaaaagcgttggccatctaaaaaaacggctcctcgcaaggggcagagaaaccaaaagaataatgttctttatcgaggagccaggatcataaaaattgtggtcttttccggtttctctcaaattttg

SEQ ID NO: 75668 - DNA, 1288 bp, Zea Mays
gttccttctctcccctgagaccaccaacgccggggccggaaaaaagggaagccagagcacagagccagacctggcggcgctggacatccaaaaacgccgccaaggatccttctctctctctctctctctctcttcgcgtccatcgacctgaccgcggaggcgcgtgcttcttcttcccgctctccactgtcatgaagattgagggaaacttgcatgtttgatatacccagctgctttctgtaacgaaaaactcgtgatcattttgttgaattggtcactgtcagggagggatctacttgtcagtttttggtattaaggctgctggccttcccttgcagggtatctgtagaataaatgggagaagcacactcggatgaattttgccattgccaggggtgtgctggcaagtatgcactactcagagacgaagaaaacccacgattggcaatctttgagaggcggctgccttgctgtggttgtgggataggatggtctacgctctcatcttcacagttctggcaattatcgctctctctgtggcactgataatctgtgtatacaagtagtacccaaagcgaggaaaacgcggtcgctggacctggaattcagaagaaacttgtaatttgagtgatagtagcatgcctttgcagtcatcctacatgcatcagtatcactatagcaagttgttgaattaaatgctgctaccgtcccggttgaccagtcggctgccgttgtttatcaacgaggatgttcattgctctatctcaaactgtgtgctccatgacctgtgatgcttctgaactcctgctgtcttggcgaccttcagaagcaattttctccagtttctcccagaaggagaaaggcaatggcaaagcagcaactagctctagctgggccctctgccatggtgacgcaaaggataacacaagtacgcaacgccgcatgagttggtgtctggctttgtcaagtgtccctctcgcggtgcctgtctcctttcacttgtggagcacggtgagctcgcaaattcgttcactgcaaaagagcctgctgtgacccccctgaaaccaacctctgtcgatgggcgaaacaatcaggcctttagctttcaggaggaaacaagtggcacatttggtatggcttcagcttcggttaccgtccataaaaaaagcgttggccatctaaaaaaacggctcctcgcaaggggcagagaaaccaaaagaataatgttctttatcgaggagccaggatcataaaaattgtggtcttttccggtttctctcaaattttg

SEQ ID NO: 75669 - DNA, 1491 bp, Zea Mays
gttccttctctcccctgagaccaccaacgccggggccggaaaaaagggaagccagagcacagagccagacctggcggcgctggacatccaaaaacgccgccaaggatccttctctctctctctctctctctcttcgcgtccatcgacctgaccgcggaggcgcgtgcttcttcttcccgctctccactactgcggcggtcagaattacagctaaatgttgtagacgggcaactgtgcttccaaacttgaaatctgacggcaggacaggcaagtgtcatgaagattgagggaaacttgcatgtttgatatacccagctgctttctgtaacgaaaaactcgtgatcattttgttgaattggtcactgtcagggagggatctacttgtcagtttttggtattaaggctgctggccttcccttgcagggtatctgtagaataaatgggagaagcacactcggatgaattttgccattgccaggggtgtgctggcaagtatgcactactcagagacgaagaaaacccacgattggcaatctttgagaggcggctgccttgctgtggttgtgggataggatggtctacttttcttttaggtttcttgtgtcctttgatttggtactttgcagccatactttactgctgcaagtactacaacaaggatcctcgagagcgccctggtctagctgcatcagctgttgcggctctcatcttcacagttctggcaattatcgctctctctgtggcactgataatctgtgtatacaagtagtacccaaagcgaggaaaacgcggtcgctggacctggaattcagaagaaacttgtaatttgagtgatagtagcatgcctttgcagtcatcctacatgcatcagtatcactatagcaagttgttgaattaaatgctgctaccgtcccggttgaccagtcggctgccgttgtttatcaacgaggatgttcattgctctatctcaaactgtgtgctccatgacctgtgatgcttctgaactcctgctgtcttggcgaccttcagaagcaattttctccagtttctcccagaaggagaaaggcaatggcaaagcagcaactagctctagctgggccctctgccatggtgacgcaaaggataacacaagtacgcaacgccgcatgagttggtgtctggctttgtcaagtgtccctctcgcggtgcctgtctcctttcacttgtggagcacggtgagctcgcaaattcgttcactgcaaaagagcctgctgtgacccccctgaaaccaacctctgtcgatgggcgaaacaatcaggcctttagctttcaggaggaaacaagtggcacatttggtatggcttcagcttcggttaccgtccataaaaaaagcgttggccatctaaaaaaacggctcctcgcaaggggcagagaaaccaaaagaataatgttctttatcgaggagccaggatcataaaaattgtggtcttttccggtttctctcaaattttg

SEQ ID NO: 75670 - DNA, 3624 bp, Zea Mays
attgtaatatgatagatctgtctgttttaattttacagtcatgatgtttgtgtttctatctgtttattttcatttgttcagtcagtatacatgtttatcgtatttatatgatttatataattcacatgctctatgttctcttgattcatattggtatggatcaatttaagatcacgatttctatggttaatcatttattatatgtcatcatcataatgttaatttatggaattaaaataatacagaaaatgcctataattctaacaggacaggcgcactagctgatctgggtgcaactgcaagcacccaccacgcaccactgcacatgatcgggtcgcccagagccccgcccgacggtgagatctcgtccttctgccgctggcgcctgttgcgcctcagttcggagttctgacacccagccgcctgcatgcgcccgcgcaagctgatctgatccaccactgcaccacccaaagtcatccgcagaagcaagcagctagctggtataggtgagcatcgccaggaaaggagcaaaagctaaggcagctggatcgatcgatcgaagagatgatgctcaaggatttggcagcaattcagcaccagcagcagcaactggctgccgacgaaaacatgtctaacctgacctccgcttcaggcgacctgcaggccagcgtctcgtcccaccccgccccgcctcccgccaagaagaagcgcagcctccccgggaacccagacccggacgcggaggtcatcgcgctgtcgccgcggacgctgatggcgacgaaccgctacgtgtgcgaggtgtgcggcaaggggttccagcgcgaccagaacctgcagctgcaccggcgcggccacaacctgccgtggaagctcaagcagcgcaaccccaaggaggcggtgcgcaagaaggcgtacgtgtgcccggagcccggctgcgtgcaccacgaccccgcgcgcgcgctcggcgacctcaccggcatcaagaagcacttcagccgcaagcacggcgagaagaagtggaagtgcgaccgctgcgccaagcgctacgctgtgcactccgactggaaggcgcactccaaggtctgcggcacgcgcgagtaccgatgcgactgcggcacccacttctcaaggagggacagcttcatcacgcacagggccttctgcgacgcgctcgcggaggagagcgcgagggcggtgaccgcggcggcggcagtcgtcgtgggacagcagcaggccgctggagggggagatggcagcgcggggttgcacctgccgccggacgtgctggacccgtcgcagacgctgggcggcgggcacggcatgtccttgcaagagctgtgcctcaagagggagcagcagcagcagttcgccccgtcgtcgtggctgacggcgcaccatcagcaggagctgcccggatcggcgaggctgctagagcagcatgagtacatagggagctccacgccggagagcacggcgggcctcagcggcttcgtcgggctctcgccgtccgccgctggtgaagcggcggcctcggcgcacatgtcggcgacggcgctgctgcagaaggccgcgcagatgggtgcaacgctgagccggccgtcgaaccaggaacagatggcgagcactcacagtcacagcagcaccaccaatgctggcactggcagtgccagtgcggcagctgctgctgcaatcaacgtgcctggcactggcgctggtgccttcggctttggagcacctcatcacttcggagcggaggagaggaccaccaccagtgctgaccgggacgcctgcggcaatgccgccgccgtctcggtggtaggcgccaacgatggtttcaccagggacttcttggggctgagagccttctcccacggcgacatactcaccatggccggcttcgatccctgcatgtcgtcggcggcgtacgagcaagggcaccaccagagcagcaagcagtggcatgtctagacacgatccgtcgtcagcgcaatacacaatttcatatatagctcgctcgccatggatgaatgatgaaatgtcgatcctgaatgagccgcaagcccgcaacacgtacgcatgcatggacttggctggatcatattgggtaagtcggagcatcgatcgaatccacctcacttttctgcttgacacttattactttcatgttcatttgtgtgggtggggttggggggggggggggtacgtatgggcatttcaattcttacataaaaatttcattcaaggtgaaatatataccgaggacttgcagatgtttttgctcttatatataaaaatagtcaacaattcatgttgttagccagaatatatatgtacttgtagtcagtatgtaggtacttaatccataacctttgtagtttgtacgagaagctctactactacgactacgcatgcaaattcactctttactggatagctctttcatgatgatatgatatgggtacctgaaaaaaaaagatgttcaagtttccatctagtcttgaagtgtcattttaaatgatgcgaagttatgcatgaaattaaaactgttatatataggccgtatataagtaaaattaacgaaggaaacgtgatctatatattaacagctacattttcctttttttttgaagaaattaggaattaagaatacttctgaagtttggttatccatggatttttatggtatatatacattattgtaagaaaaacatgctgtatcaatttgaattgacaaattaattaaactccgttctctggctagatcgagtgatgttttaaaattttattaatgggtatattcattcattgtgaagagctagtgtgccagaaaaccaaccaattgtttttttttttatgaaaagaggaaacccagttcattcttctcagcatagtaaccttgtgcttccatttgctgtatgcattaataattactggtagccgagacatgcgtgaacaccatgacacagcaagcatataaagttgccagccccattattgtgttagcaaagaaagaataaacatgctacagacacatctctgctccattgatcacctccatgagagtatgtaacggcacagaaaagaaaaggcacaccccgctgaatagtagattgaatatattatcgtagatgaaaaggacgaataatgggcattgtattagttaagtgtagtgtatgtactagctatagcttagtatacactcctgactcccccccctaagatcgtgcaacaaccatcttataatattactacttaattacagcactaacaattttttagtcccaggcccatgcttctagattttgtcccgaagtcgtagagaggaaaaactggtcgtacaatttgttcataggctatatggagcatgcatgcattcatacacacatacagaccagtgaaacttctaataagcatatattaccggtgtatggtagggctggaaacgagacgagtcgagctcagctcggcttggctcggtgcggctcgatgcctgaacgagcttggtttggctcgtccattcctcgagctggcgaaagaggctcggttcggctcgcgagccatgttctggtacttattgttgtattatttagtgaattaacattacataaatttgaaatgtagaat

SEQ ID NO: 75671 - DNA, 4079 bp, Zea Mays
gcctaggagttgtaatgccttactagcaatatattaccctcttcggcatagtgttattatcttgtattgtttataattattctcactcatatgcattatgcatatcaattaggtacgttatttgatcgcacgatgtggaggaaaagtgttggattaacctcaaagtgatgctgacgaataaaccagaggaatggatgatctgatcaagtgccaggatggaagatgctcaccaagtggtcatcatctaacaacacttagtgttatcccagctctccattgatggcagctagctgcgccctcacttcctcccatggtgagctcgcccatggtggctcctcctgctcggcgtactcccctctgcaggagctcgcccagcccctctctgctaggaacagcagcacctccctccatggatgcctagttgttgacttgtgcaattcatagtcatcggatttagtggagaagaagcacagtccaatatgacgcccgccgggtgttcgacgaaatgggagaccaaggaactgtcgtcgttcttgcaagaaaaatcaagtcggatcatgatgtggtacgttatttgatcgcacgatgtggaggaaaagtgttggattaacctcaaagtgatgctaacgaataaaccagaggaatggatgatctgatcaagtgccaggatggaagatgctcaccaagtggtcatcatctaacaacacttagtgttatcccaggacaggcgcactagctgatctgggtgcaactgcaagcacccaccacgcaccactgcacatgatcgggtcgcccagagccccgcccgacggtgagatctcgtccttctgccgctggcgcctgttgcgcctcagttcggagttctgacacccagccgcctgcatgcgcccgcgcaagctgatctgatccaccactgcaccacccaaagtcatccgcagaagcaagcagctagctggtataggtgagcatcgccaggaaaggagcaaaagctaaggcagctggatcgatcgatcgaagagatgatgctcaaggatttggcagcaattcagcaccagcagcagcaactggctgccgacgaaaacatgtctaacctgacctccgcttcaggcgacctgcaggccagcgtctcgtcccaccccgccccgcctcccgccaagaagaagcgcagcctccccgggaacccagacccggacgcggaggtcatcgcgctgtcgccgcggacgctgatggcgacgaaccgctacgtgtgcgaggtgtgcggcaaggggttccagcgcgaccagaacctgcagctgcaccggcgcggccacaacctgccgtggaagctcaagcagcgcaaccccaaggaggcggtgcgcaagaaggcgtacgtgtgcccggagcccggctgcgtgcaccacgaccccgcgcgcgcgctcggcgacctcaccggcatcaagaagcacttcagccgcaagcacggcgagaagaagtggaagtgcgaccgctgcgccaagcgctacgctgtgcactccgactggaaggcgcactccaaggtctgcggcacgcgcgagtaccgatgcgactgcggcacccacttctcaaggagggacagcttcatcacgcacagggccttctgcgacgcgctcgcggaggagagcgcgagggcggtgaccgcggcggcggcagtcgtcgtgggacagcagcaggccgctggagggggagatggcagcgcggggttgcacctgccgccggacgtgctggacccgtcgcagacgctgggcggcgggcacggcatgtccttgcaagagctgtgcctcaagagggagcagcagcagcagttcgccccgtcgtcgtggctgacggcgcaccatcagcaggagctgcccggatcggcgaggctgctagagcagcatgagtacatagggagctccacgccggagagcacggcgggcctcagcggcttcgtcgggctctcgccgtccgccgctggtgaagcggcggcctcggcgcacatgtcggcgacggcgctgctgcagaaggccgcgcagatgggtgcaacgctgagccggccgtcgaaccaggaacagatggcgagcactcacagtcacagcagcaccaccaatgctggcactggcagtgccagtgcggcagctgctgctgcaatcaacgtgcctggcactggcgctggtgccttcggctttggagcacctcatcacttcggagcggaggagaggaccaccaccagtgctgaccgggacgcctgcggcaatgccgccgccgtctcggtggtaggcgccaacgatggtttcaccagggacttcttggggctgagagccttctcccacggcgacatactcaccatggccggcttcgatccctgcatgtcgtcggcggcgtacgagcaagggcaccaccagagcagcaagcagtggcatgtctagacacgatccgtcgtcagcgcaatacacaatttcatatatagctcgctcgccatggatgaatgatgaaatgtcgatcctgaatgagccgcaagcccgcaacacgtacgcatgcatggacttggctggatcatattgggtaagtcggagcatcgatcgaatccacctcacttttctgcttgacacttattactttcatgttcatttgtgtgggtggggttggggggggggggggtacgtatgggcatttcaattcttacataaaaatttcattcaaggtgaaatatataccgaggacttgcagatgtttttgctcttatatataaaaatagtcaacaattcatgttgttagccagaatatatatgtacttgtagtcagtatgtaggtacttaatccataacctttgtagtttgtacgagaagctctactactacgactacgcatgcaaattcactctttactggatagctctttcatgatgatatgatatgggtacctgaaaaaaaaagatgttcaagtttccatctagtcttgaagtgtcattttaaatgatgcgaagttatgcatgaaattaaaactgttatatataggccgtatataagtaaaattaacgaaggaaacgtgatctatatattaacagctacattttcctttttttttgaagaaattaggaattaagaatacttctgaagtttggttatccatggatttttatggtatatatacattattgtaagaaaaacatgctgtatcaatttgaattgacaaattaattaaactccgttctctggctagatcgagtgatgttttaaaattttattaatgggtatattcattcattgtgaagagctagtgtgccagaaaaccaaccaattgtttttttttttatgaaaagaggaaacccagttcattcttctcagcatagtaaccttgtgcttccatttgctgtatgcattaataattactggtagccgagacatgcgtgaacaccatgacacagcaagcatataaagttgccagccccattattgtgttagcaaagaaagaataaacatgctacagacacatctctgctccattgatcacctccatgagagtatgtaacggcacagaaaagaaaaggcacaccccgctgaatagtagattgaatatattatcgtagatgaaaaggacgaataatgggcattgtattagttaagtgtagtgtatgtactagctatagcttagtatacactcctgactcccccccctaagatcgtgcaacaaccatcttataatattactacttaattacagcactaacaattttttagtcccaggcccatgcttctagattttgtcccgaagtcgtagagaggaaaaactggtcgtacaatttgttcataggctatatggagcatgcatgcattcatacacacatacagaccagtgaaacttctaataagcatatattaccggtgtatggtagggctggaaacgagacgagtcgagctcagctcggcttggctcggtgcggctcgatgcctgaacgagcttggtttggctcgtccattcctcgagctggcgaaagaggctcggttcggctcgcgagccatgttctggtacttattgttgtattatttagtgaattaacattacataaatttgaaatgtagaat

SEQ ID NO: 75672 - DNA, 3945 bp, Zea Mays
tgtttgcctaggagttgtaatgccttactagcaatatattaccctcttcggcatagtgttattatcttgtattgtttataattattctcactcatatgcattatgcatatcaattaggtacgttatttgatcgcacgatgtggaggaaaagtgttggattaacctcaaagtgatgctaacgaataaaccagaggaatggatgatctgatcaagtgccaggatggaagatgctcaccaagtggtcatcatctaacaacacttagtgttatcccaggtacgttatttgatcgcacgatgtggaggaaaagtgttggattaacctcaaagtgatgctgacgaataaaccagaggaatggatgatctgatcaagtgccaggatggaagatgctcaccaagtggtcatcatctaacaacacttagtgttatcccaggtacgttatttgatcgcacgatgtggaggaaaagtgttggattaacctcaaagtgatgctaacgaataaaccagaggaatggatgatctgatcaagtgccaggatggaagatgctcaccaagtggtcatcatctaacaacacttagtgttatcccaggacaggcgcactagctgatctgggtgcaactgcaagcacccaccacgcaccactgcacatgatcgggtcgcccagagccccgcccgacggtgagatctcgtccttctgccgctggcgcctgttgcgcctcagttcggagttctgacacccagccgcctgcatgcgcccgcgcaagctgatctgatccaccactgcaccacccaaagtcatccgcagaagcaagcagctagctggtataggtgagcatcgccaggaaaggagcaaaagctaaggcagctggatcgatcgatcgaagagatgatgctcaaggatttggcagcaattcagcaccagcagcagcaactggctgccgacgaaaacatgtctaacctgacctccgcttcaggcgacctgcaggccagcgtctcgtcccaccccgccccgcctcccgccaagaagaagcgcagcctccccgggaacccagacccggacgcggaggtcatcgcgctgtcgccgcggacgctgatggcgacgaaccgctacgtgtgcgaggtgtgcggcaaggggttccagcgcgaccagaacctgcagctgcaccggcgcggccacaacctgccgtggaagctcaagcagcgcaaccccaaggaggcggtgcgcaagaaggcgtacgtgtgcccggagcccggctgcgtgcaccacgaccccgcgcgcgcgctcggcgacctcaccggcatcaagaagcacttcagccgcaagcacggcgagaagaagtggaagtgcgaccgctgcgccaagcgctacgctgtgcactccgactggaaggcgcactccaaggtctgcggcacgcgcgagtaccgatgcgactgcggcacccacttctcaaggagggacagcttcatcacgcacagggccttctgcgacgcgctcgcggaggagagcgcgagggcggtgaccgcggcggcggcagtcgtcgtgggacagcagcaggccgctggagggggagatggcagcgcggggttgcacctgccgccggacgtgctggacccgtcgcagacgctgggcggcgggcacggcatgtccttgcaagagctgtgcctcaagagggagcagcagcagcagttcgccccgtcgtcgtggctgacggcgcaccatcagcaggagctgcccggatcggcgaggctgctagagcagcatgagtacatagggagctccacgccggagagcacggcgggcctcagcggcttcgtcgggctctcgccgtccgccgctggtgaagcggcggcctcggcgcacatgtcggcgacggcgctgctgcagaaggccgcgcagatgggtgcaacgctgagccggccgtcgaaccaggaacagatggcgagcactcacagtcacagcagcaccaccaatgctggcactggcagtgccagtgcggcagctgctgctgcaatcaacgtgcctggcactggcgctggtgccttcggctttggagcacctcatcacttcggagcggaggagaggaccaccaccagtgctgaccgggacgcctgcggcaatgccgccgccgtctcggtggtaggcgccaacgatggtttcaccagggacttcttggggctgagagccttctcccacggcgacatactcaccatggccggcttcgatccctgcatgtcgtcggcggcgtacgagcaagggcaccaccagagcagcaagcagtggcatgtctagacacgatccgtcgtcagcgcaatacacaatttcatatatagctcgctcgccatggatgaatgatgaaatgtcgatcctgaatgagccgcaagcccgcaacacgtacgcatgcatggacttggctggatcatattgggtaagtcggagcatcgatcgaatccacctcacttttctgcttgacacttattactttcatgttcatttgtgtgggtggggttggggggggggggggtacgtatgggcatttcaattcttacataaaaatttcattcaaggtgaaatatataccgaggacttgcagatgtttttgctcttatatataaaaatagtcaacaattcatgttgttagccagaatatatatgtacttgtagtcagtatgtaggtacttaatccataacctttgtagtttgtacgagaagctctactactacgactacgcatgcaaattcactctttactggatagctctttcatgatgatatgatatgggtacctgaaaaaaaaagatgttcaagtttccatctagtcttgaagtgtcattttaaatgatgcgaagttatgcatgaaattaaaactgttatatataggccgtatataagtaaaattaacgaaggaaacgtgatctatatattaacagctacattttcctttttttttgaagaaattaggaattaagaatacttctgaagtttggttatccatggatttttatggtatatatacattattgtaagaaaaacatgctgtatcaatttgaattgacaaattaattaaactccgttctctggctagatcgagtgatgttttaaaattttattaatgggtatattcattcattgtgaagagctagtgtgccagaaaaccaaccaattgtttttttttttatgaaaagaggaaacccagttcattcttctcagcatagtaaccttgtgcttccatttgctgtatgcattaataattactggtagccgagacatgcgtgaacaccatgacacagcaagcatataaagttgccagccccattattgtgttagcaaagaaagaataaacatgctacagacacatctctgctccattgatcacctccatgagagtatgtaacggcacagaaaagaaaaggcacaccccgctgaatagtagattgaatatattatcgtagatgaaaaggacgaataatgggcattgtattagttaagtgtagtgtatgtactagctatagcttagtatacactcctgactcccccccctaagatcgtgcaacaaccatcttataatattactacttaattacagcactaacaattttttagtcccaggcccatgcttctagattttgtcccgaagtcgtagagaggaaaaactggtcgtacaatttgttcataggctatatggagcatgcatgcattcatacacacatacagaccagtgaaacttctaataagcatatattaccggtgtatggtagggctggaaacgagacgagtcgagctcagctcggcttggctcggtgcggctcgatgcctgaacgagcttggtttggctcgtccattcctcgagctggcgaaagaggctcggttcggctcgcgagccatgttctggtacttattgttgtattatttagtgaattaacattacataaatttgaaatgtagaat

SEQ ID NO: 75673 - DNA, 1164 bp, Zea Mays
gcctaggagttgtaatgccttactagcaatatattaccctcttcggcatagtgttattatcttgtattgtttataattattctcactcatatgcattatgcatatcaattaggtacgttatttgatcgcacgatgtggaggaaaagtgttggattaacctcaaagtgatgctgacgaataaaccagaggaatggatgatctgatcaagtgccaggatggaagatgctcaccaagtggtcatcatctaacaacacttagtgttatcccagctctccattgatggcagctagctgcgccctcacttcctcccatggtgagctcgcccatggtggctcctcctgctcggcgtactcccctctgcaggagctcgcccagcccctctctgctaggaacagcagcacctccctccatggatgcctagttgttgacttgtgcaattcatagtcatcggatttagtggagaagaagcacagtccaatatgacgcccgccgggtgttcgacgaaatgggagaccaaggaactgtcgtcgttcttgcaagaaaaatcaagtcggatcatgatgtggtacgttatttgatcgcacgatgtggaggaaaagtgttggattaacctcaaagtgatgctaacgaataaaccagaggaatggatgatctgatcaagtgccaggatggaagatgctcaccaagtggtcatcatctaacaacacttagtgttatcccaggcaagccccggtgcatttgccacctccttgttgttataaaacttttatcacttatatgttgcattaggtgataggagttgagtgatgaaacaattgatgcattgccattccttggaatttgattatcttccttgattcctctttttataaagagaactaaagatgcttagccctgcttagataattaaaagttgttctttttaaaaaaagatgatgtgttacacgggatatgggaaattgttgtgaacaagaaattgggatggtgaatccatatggccatgatggattcaacatccagaaaaagtacccctgtcgggtaccaaaaatgggagaatggttggaataaatctagaccagacactgagcaggaaaggtcgctcgtctgtgtcgcttaaggaccgttccgattgttggcctgctgatctaggaccctttaactggc

SEQ ID NO: 75674 - DNA, 983 bp, Zea Mays
gcctaggagttgtaatgccttactagcaatatattaccctcttcggcatagtgttattatcttgtattgtttataattattctcactcatatgcattatgcatatcaattaggtacgttatttgatcgcacgatgtggaggaaaagtgttggattaacctcaaagtgatgctgacgaataaaccagaggaatggatgatctgatcaagtgccaggatggaagatgctcaccaagtggtcatcatctaacaacacttagtgttatcccaggatttagtggagaagaagcacagtccaatatgacgcccgccgggtgttcgacgaaatgggagaccaaggaactgtcgtcgttcttgcaagaaaaatcaagtcggatcatgatgtggtacgttatttgatcgcacgatgtggaggaaaagtgttggattaacctcaaagtgatgctaacgaataaaccagaggaatggatgatctgatcaagtgccaggatggaagatgctcaccaagtggtcatcatctaacaacacttagtgttatcccaggcaagccccggtgcatttgccacctccttgttgttataaaacttttatcacttatatgttgcattaggtgataggagttgagtgatgaaacaattgatgcattgccattccttggaatttgattatcttccttgattcctctttttataaagagaactaaagatgcttagccctgcttagataattaaaagttgttctttttaaaaaaagatgatgtgttacacgggatatgggaaattgttgtgaacaagaaattgggatggtgaatccatatggccatgatggattcaacatccagaaaaagtacccctgtcgggtaccaaaaatgggagaatggttggaataaatctagaccagacactgagcaggaaaggtcgctcgtctgtgtcgcttaaggaccgttccgattgttggcctgctgatctaggaccctttaactggc

SEQ ID NO: 75675 - DNA, 4384 bp, Zea Mays
gattcaggaaaagtacttaacttgtgaagtaaaattttggcataaggatccactactagtatgcttttctgcaaaaacgagtctttgaaatttgatgagccttaccttgattcccaataaaccagcatacccttgagagtcttttctttagtcgggtaagtcttgctgagtaattgtgtactcagggttttattccctgttgtttttcaggttataattttgttctgttgtggatgctgctaagtgccggtgggctcggccttcttatataagtatatcccatctttagcttctttattgaggattgtcacttaagctagcatgtattttaaaacttataaatgttttatacattcaaattgtaatctttttgaatcaatttcttttgtaaccaactccgatgatatatattgtaatcttgctataacttgtaaatgttgtaacttgtaaccattttgtaataaataatttattttcgctgcaaatattggtgtgtgatttgtgtttacttaatcttgcgatcttggcggtaagtcatttatccggggtcctcggggcactcgtacagatcctgttaagttgtttggtgcacatgcatagctgtctgaggtctttgagacaaggacaggtgcatgtgggcccgataacttgggaggttctgcgacagctggcatcggagcttgattaagtatgatacggtcacatacgtatttttaaaacaaaattttggttttgaaaaatctattttcaactaaacacattgtttggttttgaaaaacatatttgaaaaactataatgctagcgacatcctctgttaagccctaaattaaggactattaggtggcttagttcagaatactaacccacaatctgggaagggtaatgcatacatgtgtaatgttatttttgaggtcattcagttttgaatggatcgacgctcaaggtaaggtgagatgtgagagcatgaccgaacaaccgtcggtctagggaagagcataaaaagcgcttgattatatacatgttacacatatgtatatatgaaggctgcgaagtggagtaattactttttgggattcagtaccccatggatgtgtatgggtatacagacatgggaatactgagaagtgtaatgtacttgcaacgacacacctacgcttaggtaagaaggtaatgtaccacaatgggctgccctgtggttaaagtgtggcagcggcgcctatgcgtggctcggcgcttaatgaggagctggcctccatatagcaatatatggagtataaactgtgataaactgtcatgtgtgaattgcatcattgggaattgggctgtaatggatttttctacaggtacactaacttcgaactcgtatgtgtagctgacgactagcaatatatcgagagagacgtagatatgccaccgatatagagcgctattgccatattaagttggcaaaattcgtgaggacgaataggacgagcatgcatcttgattgttgcattgtgtttgttgtttgcgcacagaaatgcttccctcacctttattctaataataggtgattgtaaatgaacatgcttttctcatctttattctgataataaataactgaaaactgtgtgaagcattactgtcctataagtaatttctagctttgtttgatgtgtcctttagacatgtttttatgtggcctgaggttcttcttaatttgaccgctagtctaacttgtgtttgttctggtgtgtttctgctgatagaatgttggtggtatgtttgtgtaaactaaaaatttggacatgtcctcatctaggagccatgacccaaatcgatgttaatcccctgaaattttccccagtttccaaatgcggacgagtctgaatttttccatcgttactttgtgatcaaggtcatataaatagatgtttaggtaatccccttattggacctaagatgcactcaaacttaaaaaaataataatctcgagtcccctgatcttaacagccaacttgtagctcttatggtcctattttcatcctaaaacatacctttgttcggttggtgcaagctgatgtaccttatcgagtttgcctgtttttatggaccgccatgtgactttatcgacctaacttaggaaagatatgtccgatcattttactgagttcggtgcctttggttttctcatatctatcaaaggcataccaacttaatcctatgattgttttccctccgtatctaatcagataataatccttgaccttgtaatttctgcgatgggcatagaaatatgcttggggatgaagtatcagtctcccatcgtactcgctcaccaataagtttaggtcatggccatgccttgttcagttcatcgggccatgatctatttggatctctacttgtaatcattcttacatgtggagtatctcattgtatattgtcacccttgctcaatccatttgtaccgcatgagatttcttattggttacatctagtaatggtgttatgactaaaaccgatggtgctgcgacgaaatcgagggccttctgtgggtgcgcacacatggttgtgctactcggcacgcgctggtatcacagttagtagttgtaatccattatgagactatgtcaatgtgttatcttggcacaatctatttttgctatgtgagattgttattggtgtcagttcggtagtggtgtcacgattaaggacttatggtgccgcagcgaaactgagagcctcctttgaatgcgcacacagggatgtgctactcgtcggatgctggtatcaaggtctctagtcatgatccattgtggaactacactgatatgttgtcttccgtaaactacttccttgaaacaatttctatgttgtttgtgaagtgatcaagcaacatttatcgtctctgttggatcaaacgagcataccactttcatatgtgatctcttttcttttgatcttggtagtgactactcatacaagttccctttatgtcctttttgtaaaggtgaagccttggagctttttagtgtgggaaaacaactggttagctctcaaaatggagattgactttcccagctgctgagatgcaggagtttgttcattcgctctcttattttatccatgtattcccgaaccaagtctgttcatttcgcatggaagaaacggatgaacaacctgaccaaatggatttctacccaagaggttgcatctgattctgtttgggtaaaatcgcatatctgtcgcttgctcaacagactcagatagtacagtgtcatcagaaaaaaaacaaactgcacacgtgaaaccttatgtgttcttctggcagacatcgtctctattggtggacatctctaaattagcgtaaggctatacatgatatgtccactagagaaacaacattctgagacactcgcctttgcttggaactgtcttatgattataactgatatggacaagagttacatgcctctctactcttagaagtctttcgttctgaatctcgggacgagattcttttaagggggaaggttgtaacaccccaggtgtttgtctcccgttcaacagcgactatggatttaagcgcgggatatcggtaaataaattggacactaatttttaatcaacctcgtttatcacgattttgatctcgtgtctgcctccgtctgtctaaatttttccaaatccatttcttttaaaattcagcctttggtaatctttggaacatcgaatccagtatcgtttgggttgagccctcgacgtcttgcctaaactataatttttgaaatcaaaagtagcttcttaaacttcatttgaaattctttcacgcttgcgttgcacgtgtctctctgtggcctgacaccgtgacgcgtgtggcgggtgctaaccggtgtctggacagcgcccagcttctcgccccgtgaatgatgcgtgacgtcgcttccgaaaggatcacaatttcgatgctacatcgatcccgcgtatttatttcgcgatatgtcgagtctggtgcctgtttaaaaatttattgatcagatgaatgtacaactgattttaaccaaatcaaccacgtctgaaatcttataaccaatattattttggttggtccatttgcatctcactaaaaatccccacttaagaacagagttaaattttgtagtcttttgtaaaagaaaaatttggagaaacaaaaaatttgaattcttattctcttcctagactgccacctcctcccccacgtggtcttccttctggaattctcccagccgaccgaagccaggcttcatctcctcacggcgctctgccctggctacctccaccatgccgtcctcccttgcttcccccacacggtgtctccttctctgattgcagttgtggagcagcagctgccgttgtctt

SEQ ID NO: 75676 - DNA, 1527 bp, Zea Mays
gtcaaccaacggcctcgcgcatggggaggcgtgagcgtgacagcgggcgtggtgatgacgccacggcgctgctctcccgtcgtgctgacgtactaggatgtatgcaatgcagggcagctgtgcgagcacagcagtagcacgtgtttcttgtttgacgaagcccagttgggtacgccatgttcgtcgtccgcctcggaagcgcaacgcaagcaccgtgtgaaggagattcttcccagctctccttcactcgactgactggcatgcagccttggccgggccggagaaaactcagctcactgcgcagtgcgcaccgccaccgccacccgctccgtggagtggcgtacgtggcgccgcgttgaattaatggcgtccctccccatccggttccggcccgggcacgtgacggtgacgcaacctccggccccacgcatcccccgtcaggccgtcaccggcccgcctgacgtcaccttccccgtcaccccacccggcccgccggtatgccgggggggccattaggccatgtggtgtgtctgcctctgcccgtctgccgccccggccgggtatatatatgcggttgcggtcctctcgtctaggcgagctcgtccggtcccgtcgatcttccaggccgccgctctcagctaatcggcacgcaggccggccggcaggtgggtgggtgggtgggtggtccaggtcgagagcatgcaggcggtgggcatccggcggcgcgggctgaccatcgacccggcgggggaggaggaggcccccgcggcgcgcgtggggcggctggtccgggagagccccgtggtgatcttcgcgcggcgcggctgctgcatggcgcacgtgatgcggcggctgctggcggccgtgggcgcgcacgccaccgtcatcgagctaggcagcgccgaggaggaggaggaagagctggcggcggccgagggcggcggcgtcccggcgctcttcgtaggcggcgaccccgtcggcggcctcgagggcctcatgcggctccacctcagcggccgcctcgtgccccggctccgggagctcggcgccctctgcgcctgagctgctctctctctccgccgtctgtactgtacatagcacgcgcgcgcgcggcctcttcgatcgatcagggtgctcggcgcaaaacacagccgaccggtggtgtactgtactagtactagtgctgtgcacatgattgccgtgtacatacatcctatccccttcctggaaggcgtaacttgtgcttcggaagacaacatacaaaaacctgaaagatcaacgtcaccgcgaacccaaaatcgcaacgctaatgccggctgccgggccggcccgcccatcgatcgcgccccgcaggtacgtcaagtacatggattagtgctgagaattgggccggcccatgccagcctggtccaaacccatcgttcttcgtgtcaaacaggtttggaccagtaaagcctgaaagatttttaagccgtgtcgtgctagcccgaagtgtaaaaacagtgacacagtccggccctaaactat

SEQ ID NO: 75677 - DNA, 2588 bp, Zea Mays
ccctcgctgcgccgcgcgctcccctctaccgcctccgcaccgcagagccgcagccaagcaagctgcgcccctggacttggcctcaccggtgaagcggagcttgaggataggcggtgctcgggagataccaagcggtcggccgcaggcgccacgtcggcggagatgacggacggtcaccacttcaacaacatcctcctcggagggcgcggcggcacaaaccctggtcagtttaaagtgcattctggtggacttgcatggaagagacaaggtggaggaaagaccattgagatcgacaaagctgatgtaactgcagttacttggatgaaagtccccagagcatatcagcttggagtcaggattaaggctggcctgttctacagatttattggcttccgtgaacaggatgtaagcaacttgaccaacttcatacaaaagaatatgggtgtcacaccagatgaaaaacagctttctgttagtggccagaattggggagggattgatatagatggaaacatgctaacctttatggttggttcaaagcaagcatttgaggtgtccctaccagatgttgcacaaacccagatgcaaggaaaaacagatgttctcttagagcttcatgttgatgatactactggagccaatgagactccctcatggatttgagttttcatgtgcctacttcgaatactcagtttgttggggatgagagtcgccctccggctcatattttatgggagaccatattgaaatttgctgatgttggttcttctgaagaaccagttgtcacatttgaaggaattgcgatccttacaccaagaggacgttatagtgttgaacttcatctgtcatttctgcgactccaaggacaagctaacgattttaaaatccaatacagcagtattgttcgcctctttcttttgccgaagtcaaacaatcctcatacatttgttgttatcactcttgatccaccaatccgtaaaggacaaacattgtatcctcacattgttattcagtttgagacagaggcagtagtggaaagagatctggcattgagtaaagaactgttggttgaaaaatacaaggacaggcttgaggaatcttacaagggtctaatacatgaggtatttaccaaagtccttcgtggtctatctggtgctaaagtcacaaggccaggttctttcagaagttgccaagatggatatgcagttaaatcatctctcaaagctgaagatggactgttgtatccactggaaaagggtttcttcttcctgccaaagccacctacactcattcttcatgaggagattgagtttgttgagtttgaacgtcatggtgctgggggtgccagtatatcatctcactattttgacctccttgtcaaactgaaaaatgaccaagagcatctcttcagaaacattcaaaggaatgaataccacaacctcttcaatttcatcaatggaaagaacattaaaataatgaaccttggaggagatggtcaaggtgcaagtggtgtagttacagatgttctacgagacactgatgatgatgctgttgatccacatctagagcgtattaagaatcaggccggggatgaggaaagcgatgaagaggatgaagatttcgttgcagacaaggatgatagtggatctcctactgatgactcaggtgatgaggaatcagatgctagtgatagtggtggtgaaaaggagaaatcatccaagaaggaagcaagcagttcaaagccagttcagaaaagaaagcataagggcagggatgacgaaggacaagagaagaaaaagccaaagaagaaaaaagatccgaatgctccgaaacgagccatgaccccgttcatgtatttctcaatggctgagcgaggaaacatgaagagcagcaacccagatttgcctacgactgagatcgcaaagaagcttggggagatgtggcaaaagatgtcaggcgaagagaaacagccttacatccagcaggcccaggtcgacaagaaacgttatgaaaaagaatccgctgtctatcgcggtgaagctacagtcgatgtggattctgggaacgagtctgactagagatccaagctcttgggctggcatggtggcacgggatgaaagtctagtgccatgtgtgctattgttatgtcagcaaccgttgcctccaacattgctgacagtaaagagagtttctctcgcagcttacctctgcagggcaaaagaatgtacgagtgtagtctagtgattttgtgtaaaacaaccaacatacgtggttttctgagagatggtaagacgtcagtttaactgttgtcgattggctgttttgcctcctctcgttggtcagatactcatccaaagttaagagatgcccacctcaaggcaggcgttccggtcctcgccgcgcctaggtttggtttcgacctcggtgtgcagtagcatggtggtgcagtccaatactggtcggtagtaccgactagtatgctaaagaagaactggtcggtattggtcggtttgaccgttggttgccattaattagttcgcgaagttttcatcatttaaagtaaaaaaagacagaaaatctaatgaaaa

SEQ ID NO: 75678 - DNA, 841 bp, Zea Mays
ctaatgtgctattttatatcacatttgacctaaaagtaggttgcctgcagttaggtgtgattatacatggccactctattgcttctcattacatataacatacgtcttaaggtcagcacaatagacactacatagcaaattaaagtccagatgttgctcttttgcagataaagctaggcctttgtttgaagtttagatttaaacctcatcttcctctgtgcacattcatcttatgttgttgccttgttggggttattttgcagaaacatgcacttttgatggcactcatggtgttacgtgaggactgtaaataatgactatagtgtgacgtagcctctcatgaactcatgataatgatgatcatttgggcaaacctttctttgttcctttgttatatatatgctatgcaaacacagccatgcagttcaaagcatggtgcgtgatgaagctaggacatcaaatggtggtctgaagagtgacccaatgtgcaatacctgtgagatggctgtggtttggatgcaaaaccaactttcccagaacaagacatagaaactcatcctaaactacatcaatcagttttgtgagcgttgtccgagtcccatgggagaatcagtcgtcgactctgccagtctgacattgtattcactattggaggcaagaagtccaagctggaacccgagtaggtgtgatctcttctccattatcacactattggcccttggcccttgatctttattagcatgccatagggtctgcctaaaatctttagttgtcagatttgatcgtgcttgtttatccaggttttgaataatattgagatgctgaccgatcgacagtttgg

SEQ ID NO: 75679 - DNA, 687 bp, Zea Mays
gtccaggtcagcatttctcttcccctcttcttcttggttcttgattgctacgagcctacgaccagcgttagcttcttatggttttcagtcgttagcttcttggttcattatttaatacaattatattacaaaatgatgtgaaaagaaggctactcacaaatcaacttcccccgtctaccgtcgtttatgtgaaagagaacttgttttctataagatctctttcttaatattttattttataccatgggtataattttcttatggttttcagtaatgttccttaaccaaatttatttctctcagcgcttgtggcatgtgcggtacctgttttacatagcttgatttattatgagattactaaacttaagttgggagaagatccctagatcatccaacatagctgggccctatgtcaaatctgacatggctgaaaggcttgaagaattaagagtgcagtagaatttgtccaagttcgaactactataatatttgagttcataagaaaaccaattgcacttgagccttgatgcggctaaataactaggcatcaagatcatttctgttttatctgacatgctaaagtattagtctaatgagctaggtagttttgcaagaagcgtttgagatgactgtatggtgactactaacatgttcagaactagacgctcaattctactgaactttatg

SEQ ID NO: 75680 - DNA, 846 bp, Zea Mays
atgtgctctaacacaacgtatatcgataaggtagaaaacaggaaaattacaacatcttacaccgtcaacaggttccatgccaatttcgttctatccgaggcgcccgcgaagcgccggcgcggggggcggtcgtgcccgttcagctgctgctgctgcttctgctggacgctcctcgtcgtcgtcctcctcgccgtcctggccgccgtggccgggggcgccttctacctgctgtaccggccgcaccggccggccttcacgctgaccgcggcgcgcgtgacgaggctgagcctgtcgtcgtccgccaccgcgcccgcgctgagcgacgccatcgacgtgacgctgaccgccaggaaccccaacaagaagctggtgtacgtctacgacgacttcgccgtgacggccgccacggccgccaacgccgtgccgctgggcgcggccaccgcgcccgggttcgcgcacgaggccggcaacgtcaccgtcatccgggccaccgtctccgcgtccgcgctcgcggtcgaccccgccgcggccggctccgacgtcaagaggtccggcgagttccccatcgtcctggacctggagaccagggccggcgtccgggttggcgcgctcaggaccaagaagatcggcatcctggtgcactgcgacggcgtcaaggtggccgcgcccgcgcccgcgccggccaagaagacgaagaagctggcgaaggccgcggccgacaccccagcccccgccgccgcggccgtcgacgacgcgccggcgccgcccgccgcgtcggccacggccaccgtcgctcgcgcgtgccagtaggacactcgaggctgaggcgaaggtgctgccagttgg

SEQ ID NO: 75681 - DNA, 327 bp, Zea Mays
ttttttttttgtaaattggtaactgtatagatttgatttcatacatggaagcaggtgacgatggtaaacagaatgccacttgtgaagtaagcctaaaaaccggaacaacagttcatgacttcagacaagagatgagctggtatggccctatatatgccttaacagccatgcccttaccttacctctgtattatatttgtaaatccattggtctcgtgccttataaaccatatggcatcaagcagcaggaaccttccttccatcttcaatgaagaaaatggccgactcaggtacctgataaaggacaaaagcaatgacaattcaataa

SEQ ID NO: 75682 - DNA, 1635 bp, Zea Mays
atgtccatctctgatcactatgcagctttggtagatgcttctcttctcctgtggtagtcgtctagctcgtcactatttgaaactggccggcgttgttaaaaagaagaaccaggtagtacgatagcatacatggacatggatagcggcagctggctccatggctatgccaccaccaacgccagcggcaacaacggcttcatgtgcggctacgctgccggcagcagctgcagccctgcagagcagcagcagtgcatggaggacgagcagcagcagtttctcgtcagctcgcagattcagcaccacctcaaccagatcagcatgcgcatgaacatggacgacgaagcagcagtcgtctaccacatgtcttccaacggcggtgccaccgccatcgacatgcacgaccctatcgtggacggcctcctcgacgacccgcaccacggcgccggcggccgcgcctgcagcagcttcccttcgtcgtcgtcgtgctcctcgctctcgctgcctgctgcctctgcatccctctcctgcagccccgacgaccccgacagctcctcggcgcatcatatcctcgccgcgccggccgcgggcggcggcaaccagcagtacccggaggtctcctcacacgtgccgttattaccaccaccaccaccaccacccgtcgtgccatcttacgaccaccaccaccagtacaccgaccttcacgcgccggcgccggccaaacccaccggtgcgttcaagcactacgcgcggcaccttgggccgaagaggccgcctaagcccggcgcgtgcgggcagcggatgttcaagacggccatgtcggtgctgtccaagatgcacgtggcggcgaggtacagccaacagcagtactactaccaggcggccgctgccgctgaggcggcgcagccgccgccgtcggtgaaccagctgcagcacatgttctcggagcgcaagcggcgagagaagctcaacgacagcttccacgccctcaaggcagcccttccgcccggcgccaaaaaggacaagacgtcgatactgatcagggcaagggactacgtgaggtcactggaggccaaggtggccgagctggaggagaagaacaagtcgctcgagtcgcggctgacccgccgcacggacggcagcagtgacgacgacgacaacggctccggcgagacgacgaaggtggaggtcgagataaccaggacggcgaacgaagaactctgcacggtgaagatagaggtgagatcgccgccggcggcggcggcgtcgccgtgcaataggactgacgtggtggtcaggacgctccagtgcctgaaagagcagatcggagatggcgtcagcctggtggcaatgagcaccagcggcggcgctgagccggcggctaccggagtgaagaacgcctttccacgagctgtcctgacgatgcagatcaagtcgccaggaaccgactgggaggagcagccggtcaaggacgccgtggccaaggtcgtcgccgacgcgctgacgacgacgacgacgccgccactgccacccgcggcggccaccaccgtaccgccagctgcttcgccggggcttctcatcaacgactcgtcatcagctaataattcattaacaatccggccggccataatgaaatag

SEQ ID NO: 75683 - DNA, 1283 bp, Zea Mays
ccaattcccagcggaaaacccccagccccctagcctcctagcaccttctcctgtccttctaaccctagccgcccaagcccaccagccgccgctagctgctgccgttctccactctccacggaccatggctccacggccagccgccaaccaccaggccacggccgagcagggcgccaagcacctaggccggccgagcggtgcgccgagcgcccgagcacccaggccaccgcccgccgcaccagagcggccaacggggcgccgagccgagcagagtttcaacagtgttcctgaccgtgtgttcttgatccaggtggctgccagcaagacgaagatctacatggtgcttgagctcgtcaacggcggcgagctgctggacaggattgtaagccgccccggccgttcgttcttcctcccttgtgatcacaggcggccagtgagggaaagctcccggagcaggagctccccaggtgctaattccttatgccgaatgcctgcaggttctgcagaacagaggattgtactttacttggagctttatgcaagctgtgtggagtacatcacgccgctaagagacagcatgtcatcagtgtttccctcagcacatttagcttttgccagcatcgacctgaatgcacacactgtctttgcgatcacaacggccttggcaattctccaaacagtctgtctcaggaacctcagtctcctctcgtatctttctgctgacggtgtgatggcgacaattgcagtcatcctctgcctgttctgggttgcctgttctgggttgctctgatactcccatgtgcgtgctacctctccatcaagaagggcgcagtgccattgtgggagatcatcctgtgcatagtcatcataatgatcggcgtcgtatgtgcatgcgtgggatcatacacctcagtcagccagatgattagcagcaccaaatagcgcacgctagctgatatttatctagtgtctacggatccttccaaatgctttgacagagttggaactggcagcttttcgtagctaagtttatttgttccttctttatggcagaaatttggtaagagagagtttagttgtgggaggacaggcggcgaaggagtaatctgagtttagtgtggtgcttttgtgactgatcatctctggagcttttgtgaatgatctagctagctatctgtaaatgatctagttgtgaatgatattataattgtgatgcttttgtgaatatataattgtggtgcttttgtatttatgtgatggatctatgactgtggtatactgat

SEQ ID NO: 75684 - DNA, 1163 bp, Zea Mays
ccaattcccagcggaaaacccccagccccctagcctcctagcaccttctcctgtccttctaaccctagccgcccaagcccaccagccgccgctagctgctgccgttctccactctccacggaccatggctccacggccagccgccaaccaccaggccacggccgagcagggcgccaagcacctaggccggccgagcggtggctgccagcaagacgaagatctacatggtgcttgagctcgtcaacggcggcgagctgctggacaggattcaggcggccagtgagggaaagctcccggagcaggaggcaaggaggctcttccagcacctggtcctttcctctactctactctactcactcactcatcactcccaggcggccaaacagctccccagattgtactttacttggagctttatgcaagctgtgtggagtacatcacgccgctaagagacagcatgtcatcagtgtttccctcagcacatttagcttttgccagcatcgacctgaatgcacacactgtctttgcgatcacaacggccttggcaattctccaaacagtctgtctcaggaacctcagtctcctctcgtatctttctgctgacggtgtgatggcgacaattgcagtcatcctctgcctgttctgggttgcctgttctgggttgctctgatactcccatgtgcgtgctacctctccatcaagaagggcgcagtgccattgtgggagatcatcctgtgcatagtcatcataatgatcggcgtcgtatgtgcatgcgtgggatcatacacctcagtcagccagatgattagcagcaccaaatagcgcacgctagctgatatttatctagtgtctacggatccttccaaatgctttgacagagttggaactggcagcttttcgtagctaagtttatttgttccttctttatggcagaaatttggtaagagagagtttagttgtgggaggacaggcggcgaaggagtaatctgagtttagtgtggtgcttttgtgactgatcatctctggagcttttgtgaatgatctagctagctatctgtaaatgatctagttgtgaatgatattataattgtgatgcttttgtgaatatataattgtggtgcttttgtatttatgtgatggatctatgactgtggtatactgat

SEQ ID NO: 75685 - DNA, 1129 bp, Zea Mays
ccaattcccagcggaaaacccccagccccctagcctcctagcaccttctcctgtccttctaaccctagccgcccaagcccaccagccgccgctagctgctgccgttctccactctccacggaccatggctccacggccagccgccaaccaccaggccacggccgagcagggcgccaagcacctaggccggccgagcggtggctgccagcaagacgaagatctacatggtgcttgagctcgtcaacggcggcgagctgctggacaggattcaggcggccagtgagggaaagctcccggagcaggagctccccaggtgctaattccttatgccgaatgcctgcaggttctgcagaacagaggattgtactttacttggagctttatgcaagctgtgtggagtacatcacgccgctaagagacagcatgtcatcagtgtttccctcagcacatttagcttttgccagcatcgacctgaatgcacacactgtctttgcgatcacaacggccttggcaattctccaaacagtctgtctcaggaacctcagtctcctctcgtatctttctgctgacggtgtgatggcgacaattgcagtcatcctctgcctgttctgggttgcctgttctgggttgctctgatactcccatgtgcgtgctacctctccatcaagaagggcgcagtgccattgtgggagatcatcctgtgcatagtcatcataatgatcggcgtcgtatgtgcatgcgtgggatcatacacctcagtcagccagatgattagcagcaccaaatagcgcacgctagctgatatttatctagtgtctacggatccttccaaatgctttgacagagttggaactggcagcttttcgtagctaagtttatttgttccttctttatggcagaaatttggtaagagagagtttagttgtgggaggacaggcggcgaaggagtaatctgagtttagtgtggtgcttttgtgactgatcatctctggagcttttgtgaatgatctagctagctatctgtaaatgatctagttgtgaatgatattataattgtgatgcttttgtgaatatataattgtggtgcttttgtatttatgtgatggatctatgactgtggtatactgat

SEQ ID NO: 75686 - DNA, 1399 bp, Zea Mays
ccaattcccagcggaaaacccccagccccctagcctcctagcaccttctcctgtccttctaaccctagccgcccaagcccaccagccgccgctagctgctgccgttctccactctccacggaccatggctccacggccagccgccaaccaccaggccacggccgagcagggcgccaagcacctaggccggccgagcggtgcgccgagcgcccgagcacccaggccaccgcccgccgcaccagagcggccaacggggcgccgagccgagcagagtttcaacagtgttcctgaccgtgtgttcttgatccaggtggctgccagcaagacgaagatctacatggtgcttgagctcgtcaacggcggcgagctgctggacaggattgtaagccgccccggccgttcgttcttcctcccttgtgatcacaggcggccagtgagggaaagctcccggagcaggaggcaaggaggctcttccagcacctggtcctttcctctactctactctactcactcactcatcactcccaggcggccaaacagctccccagattgtactttacttggagctttatgcaagctgtgtggagtacatcacgccgctaagagacagcatgtcatcagtgtttccctcagcacatttagcttttgccagcatcgacctgaatgcacacactgtctttgcgatcacaacggccttggcaattctccaaacagtctgtctcaggaacctcagtctcctctcgtatctttctgctgacggtgtgatggcgacaattgcagtcatcctctgcctgttctgggttgcctgttctgggttgtgagaaacactttcacctaaactcgtgcactgtactttcctttggccaacccaactgaacaagttgcttgatggtttacaggctctgatactcccatgtgcgtgctacctctccatcaagaagggcgcagtgccattgtgggagatcatcctgtgcatagtcatcataatgatcggcgtcgtatgtgcatgcgtgggatcatacacctcagtcagccagatgattagcagcaccaaatagcgcacgctagctgatatttatctagtgtctacggatccttccaaatgctttgacagagttggaactggcagcttttcgtagctaagtttatttgttccttctttatggcagaaatttggtaagagagagtttagttgtgggaggacaggcggcgaaggagtaatctgagtttagtgtggtgcttttgtgactgatcatctctggagcttttgtgaatgatctagctagctatctgtaaatgatctagttgtgaatgatattataattgtgatgcttttgtgaatatataattgtggtgcttttgtatttatgtgatggatctatgactgtggtatactgat

SEQ ID NO: 75687 - DNA, 1225 bp, Zea Mays
ccaattcccagcggaaaacccccagccccctagcctcctagcaccttctcctgtccttctaaccctagccgcccaagcccaccagccgccgctagctgctgccgttctccactctccacggaccatggctccacggccagccgccaaccaccaggccacggccgagcagggcgccaagcacctaggccggccgagcggtgcgccgagcgcccgagcacccaggccaccgcccgccgcaccagagcggccaacggggcgccgagccgagcagagtttcaacagtgttcctgaccgtgtgttcttgatccaggtggctgccagcaagacgaagatctacatggtgcttgagctcgtcaacggcggcgagctgctggacaggattgcggccagtgagggaaagctcccggagcaggaggcaaggaggctcttccagcacctggttctgcagaacagaggattgtactttacttggagctttatgcaagctgtgtggagtacatcacgccgctaagagacagcatgtcatcagtgtttccctcagcacatttagcttttgccagcatcgacctgaatgcacacactgtctttgcgatcacaacggccttggcaattctccaaacagtctgtctcaggaacctcagtctcctctcgtatctttctgctgacggtgtgatggcgacaattgcagtcatcctctgcctgttctgggttgcctgttctgggttgctctgatactcccatgtgcgtgctacctctccatcaagaagggcgcagtgccattgtgggagatcatcctgtgcatagtcatcataatgatcggcgtcgtatgtgcatgcgtgggatcatacacctcagtcagccagatgattagcagcaccaaatagcgcacgctagctgatatttatctagtgtctacggatccttccaaatgctttgacagagttggaactggcagcttttcgtagctaagtttatttgttccttctttatggcagaaatttggtaagagagagtttagttgtgggaggacaggcggcgaaggagtaatctgagtttagtgtggtgcttttgtgactgatcatctctggagcttttgtgaatgatctagctagctatctgtaaatgatctagttgtgaatgatattataattgtgatgcttttgtgaatatataattgtggtgcttttgtatttatgtgatggatctatgactgtggtatactgat

SEQ ID NO: 75688 - DNA, 1273 bp, Zea Mays
ccaattcccagcggaaaacccccagccccctagcctcctagcaccttctcctgtccttctaaccctagccgcccaagcccaccagccgccgctagctgctgccgttctccactctccacggaccatggctccacggccagccgccaaccaccaggccacggccgagcagggcgccaagcacctaggccggccgagcggtgcgccgagcgcccgagcacccaggccaccgcccgccgcaccagagcggccaacggggcgccgagccgagcagagtttcaacagtgttcctgaccgtgtgttcttgatccaggtggctgccagcaagacgaagatctacatggtgcttgagctcgtcaacggcggcgagctgctggacaggattcaggcggccagtgagggaaagctcccggagcaggaggcaaggaggctcttccagcacctggtcctttcctctactctactctactcactcactcatcactcccaggcggccaaacagctccccagattgtactttacttggagctttatgcaagctgtgtggagtacatcacgccgctaagagacagcatgtcatcagtgtttccctcagcacatttagcttttgccagcatcgacctgaatgcacacactgtctttgcgatcacaacggccttggcaattctccaaacagtctgtctcaggaacctcagtctcctctcgtatctttctgctgacggtgtgatggcgacaattgcagtcatcctctgcctgttctgggttgcctgttctgggctctgatactcccatgtgcgtgctacctctccatcaagaagggcgcagtgccattgtgggagatcatcctgtgcatagtcatcataatgatcggcgtcgtatgtgcatgcgtgggatcatacacctcagtcagccagatgattagcagcaccaaatagcgcacgctagctgatatttatctagtgtctacggatccttccaaatgctttgacagagttggaactggcagcttttcgtagctaagtttatttgttccttctttatggcagaaatttggtaagagagagtttagttgtgggaggacaggcggcgaaggagtaatctgagtttagtgtggtgcttttgtgactgatcatctctggagcttttgtgaatgatctagctagctatctgtaaatgatctagttgtgaatgatattataattgtgatgcttttgtgaatatataattgtggtgcttttgtatttatgtgatggatctatgactgtggtatactgat

SEQ ID NO: 75689 - DNA, 1126 bp, Zea Mays
ccaattcccagcggaaaacccccagccccctagcctcctagcaccttctcctgtccttctaaccctagccgcccaagcccaccagccgccgctagctgctgccgttctccactctccacggaccatggctccacggccagccgccaaccaccaggccacggccgagcagggcgccaagcacctaggccggccgagcggtggctgccagcaagacgaagatctacatggtgcttgagctcgtcaacggcggcgagctgctggacaggattcaggcggccagtgagggaaagctcccggagcaggagctccccaggtgctaattccttatgccgaatgcctgcaggttctgcagaacagaggattgtactttacttggagctttatgcaagctgtgtggagtacatcacgccgctaagagacagcatgtcatcagtgtttccctcagcacatttagcttttgccagcatcgacctgaatgcacacactgtctttgcgatcacaacggccttggcaattctccaaacagtctgtctcaggaacctcagtctcctctcgtatctttctgctgacggtgtgatggcgacaattgcagtcatcctctgcctgttctgggttgcctgttctgggctctgatactcccatgtgcgtgctacctctccatcaagaagggcgcagtgccattgtgggagatcatcctgtgcatagtcatcataatgatcggcgtcgtatgtgcatgcgtgggatcatacacctcagtcagccagatgattagcagcaccaaatagcgcacgctagctgatatttatctagtgtctacggatccttccaaatgctttgacagagttggaactggcagcttttcgtagctaagtttatttgttccttctttatggcagaaatttggtaagagagagtttagttgtgggaggacaggcggcgaaggagtaatctgagtttagtgtggtgcttttgtgactgatcatctctggagcttttgtgaatgatctagctagctatctgtaaatgatctagttgtgaatgatattataattgtgatgcttttgtgaatatataattgtggtgcttttgtatttatgtgatggatctatgactgtggtatactgat

SEQ ID NO: 75690 - DNA, 1299 bp, Zea Mays
cccgcatccccaattcccagcggaaaacccccagccccctagcctcctagcaccttctcctgtccttctaaccctagccgcccaagcccaccagccgccgctagctgctgccgttctccactctccacggaccatggctccacggccagccgccaaccaccaggccacggccgagcagggcgccaagcacctaggccggccgagcggtgcgccgagcgcccgagcacccaggccaccgcccgccgcaccagagcggccaacggggcgccgagccgagcagagtttcaacagtgttcctgaccgtgtgttcttgatccaggtggctgccagcaagacgaagatctacatggtgcttgagctcgtcaacggcggcgagctgctggacaggattgcggccagtgagggaaagctcccggagcaggaggcaaggaggctcttccagcacctgattgtactttacttggagctttatgcaagctgtgtggagtacatcacgccgctaagagacagcatgtcatcagtgtttccctcagcacatttagcttttgccagcatcgacctgaatgcacacactgtctttgcgatcacaacggccttggcaattctccaaacagtctgtctcaggaacctcagtctcctctcgtatctttctgctgacggtgtgatggcgacaattgcagtcatcctctgcctgttctgggttgcctgttctgggttgtgagaaacactttcacctaaactcgtgcactgtactttcctttggccaacccaactgaacaagttgcttgatggtttacaggctctgatactcccatgtgcgtgctacctctccatcaagaagggcgcagtgccattgtgggagatcatcctgtgcatagtcatcataatgatcggcgtcgtatgtgcatgcgtgggatcatacacctcagtcagccagatgattagcagcaccaaatagcgcacgctagctgatatttatctagtgtctacggatccttccaaatgctttgacagagttggaactggcagcttttcgtagctaagtttatttgttccttctttatggcagaaatttggtaagagagagtttagttgtgggaggacaggcggcgaaggagtaatctgagtttagtgtggtgcttttgtgactgatcatctctggagcttttgtgaatgatctagctagctatctgtaaatgatctagttgtgaatgatattataattgtgatgcttttgtgaatatataattgtggtgcttttgtatttatgtgatggatctatgactgtggtatactgat

SEQ ID NO: 75691 - DNA, 1262 bp, Zea Mays
gccacctagcatcccgctcccacggtccccgcatccccaattcccagcggaaaacccccagccccctagcctcctagcaccttctcctgtccttctaaccctagccgcccaagcccaccagccgccgctagctgctgccgttctccactctccacggaccatggctccacggccagccgccaaccaccaggccacggccgagcagggcgccaagcacctaggccggccgagcggtggctgccagcaagacgaagatctacatggtgcttgagctcgtcaacggcggcgagctgctggacaggattctatactacgtgtctgattcccctcctgtcgcttcccttttgctgcaacggcaactgaccagcaggcggccagtgagggaaagctcccggagcaggagctccccagattgtactttacttggagctttatgcaagctgtgtggagtacatcacgccgctaagagacagcatgtcatcagtgtttccctcagcacatttagcttttgccagcatcgacctgaatgcacacactgtctttgcgatcacaacggccttggcaattctccaaacagtctgtctcaggaacctcagtctcctctcgtatctttctgctgacggtgtgatggcgacaattgcagtcatcctctgcctgttctgggttgcctgttctgggttgtgagaaacactttcacctaaactcgtgcactgtactttcctttggccaacccaactgaacaagttgcttgatggtttacaggctctgatactcccatgtgcgtgctacctctccatcaagaagggcgcagtgccattgtgggagatcatcctgtgcatagtcatcataatgatcggcgtcgtatgtgcatgcgtgggatcatacacctcagtcagccagatgattagcagcaccaaatagcgcacgctagctgatatttatctagtgtctacggatccttccaaatgctttgacagagttggaactggcagcttttcgtagctaagtttatttgttccttctttatggcagaaatttggtaagagagagtttagttgtgggaggacaggcggcgaaggagtaatctgagtttagtgtggtgcttttgtgactgatcatctctggagcttttgtgaatgatctagctagctatctgtaaatgatctagttgtgaatgatattataattgtgatgcttttgtgaatatataattgtggtgcttttgtatttatgtgatggatctatgactgtggtatactgat

SEQ ID NO: 75692 - DNA, 1948 bp, Zea Mays
ccacgggccacctagcatcccgctcccacggtccccgcatccccaattcccagcggaaaacccccagccccctagcctcctagcaccttctcctgtccttctaaccctagccgcccaagcccaccagccgccgctagctgctgccgttctccactctccacggaccatggctccacggccagccgccaaccaccaggccacggccgagcagggcgccaagcacctaggccggccgagcggtgcgccgagcgcccgagcacccaggccaccgcccgccgcaccagagcggccaacggggcgccgagccgagcagagtttcaacagtgttcctgaccgtgtgttcttgatccaggtggctgccagcaagacgaagatctacatggtgcttgagctcgtcaacggcggcgagctgctggacaggattgcggccagtgagggaaagctcccggagcaggagctccccaggtgctaattccttatgccgaatgcctgcaggttctgcagaacagagggtacgacggctgaaatacacacaatttagttgaatttaagttatgcctagtgtgctatggccactagtttgaatttaagttagatttaaaggttacacacaatttactagttttattatctgaatggttgaattggtctcgtactactgtacataatgacagctgaaatacatcatgtctctaccactttagcctttcgttttttatacactaatactgatctacatggactgcaatagtattcacaccacagtgaatgttgagcgtttattcagtaacactaatataggcaagaggtatatgtatttcataggcaaaagtaacactgaagacataggcaagaagtataggcaacaataacactgatatacttagagggaaaagggtatatgtatttctagcccttttataacagtcatttctagcagttttagcaaatgactggttcagtgtgtatttatatagcagtttcagttttatagcagttttagttctagcacttttagcaaatgtatatatatatatatatatatttcatagcagtttcatagcccagccgccgcggcctccggctgggcacgaggcccagttgcccgacaggccgtccagggcgtgcctgagaatacagatttgtcttcgaaaatcatctcacctgttttcttttttgcagattgtactttacttggagctttatgcaagctgtgtggagtacatcacgccgctaagagacagcatgtcatcagtgtttccctcagcacatttagcttttgccagcatcgacctgaatgcacacactgtctttgcgatcacaacggccttggcaattctccaaacagtctgtctcaggaacctcagtctcctctcgtatctttctgctgacggtgtgatggcgacaattgcagtcatcctctgcctgttctgggttgcctgttctgggctctgatactcccatgtgcgtgctacctctccatcaagaagggcgcagtgccattgtgggagatcatcctgtgcatagtcatcataatgatcggcgtcgtatgtgcatgcgtgggatcatacacctcagtcagccagatgattagcagcaccaaatagcgcacgctagctgatatttatctagtgtctacggatccttccaaatgctttgacagagttggaactggcagcttttcgtagctaagtttatttgttccttctttatggcagaaatttggtaagagagagtttagttgtgggaggacaggcggcgaaggagtaatctgagtttagtgtggtgcttttgtgactgatcatctctggagcttttgtgaatgatctagctagctatctgtaaatgatctagttgtgaatgatattataattgtgatgcttttgtgaatatataattgtggtgcttttgtatttatgtgatggatctatgactgtggtatactgat

SEQ ID NO: 75693 - DNA, 1841 bp, Zea Mays
ccacgggccacctagcatcccgctcccacggtccccgcatccccaattcccagcggaaaacccccagccccctagcctcctagcaccttctcctgtccttctaaccctagccgcccaagcccaccagccgccgctagctgctgccgttctccactctccacggaccatggctccacggccagccgccaaccaccaggccacggccgagcagggcgccaagcacctaggccggccgagcggtggctgccagcaagacgaagatctacatggtgcttgagctcgtcaacggcggcgagctgctggacaggattcaggcggccagtgagggaaagctcccggagcaggagctccccaggtgctaattccttatgccgaatgcctgcaggttctgcagaacagagggtacgacggctgaaatacacacaatttagttgaatttaagttatgcctagtgtgctatggccactagtttgaatttaagttagatttaaaggttacacacaatttactagttttattatctgaatggttgaattggtctcgtactactgtacataatgacagctgaaatacatcatgtctctaccactttagcctttcgttttttatacactaatactgatctacatggactgcaatagtattcacaccacagtgaatgttgagcgtttattcagtaacactaatataggcaagaggtatatgtatttcataggcaaaagtaacactgaagacataggcaagaagtataggcaacaataacactgatatacttagagggaaaagggtatatgtatttctagcccttttataacagtcatttctagcagttttagcaaatgactggttcagtgtgtatttatatagcagtttcagttttatagcagttttagttctagcacttttagcaaatgtatatatatatatatatatatttcatagcagtttcatagcccagccgccgcggcctccggctgggcacgaggcccagttgcccgacaggccgtccagggcgtgcctgagaatacagatttgtcttcgaaaatcatctcacctgttttcttttttgcagattgtactttacttggagctttatgcaagctgtgtggagtacatcacgccgctaagagacagcatgtcatcagtgtttccctcagcacatttagcttttgccagcatcgacctgaatgcacacactgtctttgcgatcacaacggccttggcaattctccaaacagtctgtctcaggaacctcagtctcctctcgtatctttctgctgacggtgtgatggcgacaattgcagtcatcctctgcctgttctgggttgcctgttctgggttgctctgatactcccatgtgcgtgctacctctccatcaagaagggcgcagtgccattgtgggagatcatcctgtgcatagtcatcataatgatcggcgtcgtatgtgcatgcgtgggatcatacacctcagtcagccagatgattagcagcaccaaatagcgcacgctagctgatatttatctagtgtctacggatccttccaaatgctttgacagagttggaactggcagcttttcgtagctaagtttatttgttccttctttatggcagaaatttggtaagagagagtttagttgtgggaggacaggcggcgaaggagtaatctgagtttagtgtggtgcttttgtgactgatcatctctggagcttttgtgaatgatctagctagctatctgtaaatgatctagttgtgaatgatattataattgtgatgcttttgtgaatatataattgtggtgcttttgtatttatgtgatggatctatgactgtggtatactgat

SEQ ID NO: 75694 - DNA, 2019 bp, Zea Mays
ccacgggccacctagcatcccgctcccacggtccccgcatccccaattcccagcggaaaacccccagccccctagcctcctagcaccttctcctgtccttctaaccctagccgcccaagcccaccagccgccgctagctgctgccgttctccactctccacggaccatggctccacggccagccgccaaccaccaggccacggccgagcagggcgccaagcacctaggccggccgagcggtgcgccgagcgcccgagcacccaggccaccgcccgccgcaccagagcggccaacggggcgccgagccgagcagagtttcaacagtgttcctgaccgtgtgttcttgatccaggtggctgccagcaagacgaagatctacatggtgcttgagctcgtcaacggcggcgagctgctggacaggattgcggccagtgagggaaagctcccggagcaggaggcaaggaggctcttccagcacctggttctgcagaacagagggtacgacggctgaaatacacacaatttagttgaatttaagttatgcctagtgtgctatggccactagtttgaatttaagttagatttaaaggttacacacaatttactagttttattatctgaatggttgaattggtctcgtactactgtacataatgacagctgaaatacatcatgtctctaccactttagcctttcgttttttatacactaatactgatctacatggactgcaatagtattcacaccacagtgaatgttgagcgtttattcagtaacactaatataggcaagaggtatatgtatttcataggcaaaagtaacactgaagacataggcaagaagtataggcaacaataacactgatatacttagagggaaaagggtatatgtatttctagcccttttataacagtcatttctagcagttttagcaaatgactggttcagtgtgtatttatatagcagtttcagttttatagcagttttagttctagcacttttagcaaatgtatatatatatatatatatatttcatagcagtttcatagcccagccgccgcggcctccggctgggcacgaggcccagttgcccgacaggccgtccagggcgtgcctgagaatacagatttgtcttcgaaaatcatctcacctgttttcttttttgcagattgtactttacttggagctttatgcaagctgtgtggagtacatcacgccgctaagagacagcatgtcatcagtgtttccctcagcacatttagcttttgccagcatcgacctgaatgcacacactgtctttgcgatcacaacggccttggcaattctccaaacagtctgtctcaggaacctcagtctcctctcgtatctttctgctgacggtgtgatggcgacaattgcagtcatcctctgcctgttctgggttgcctgttctgggttgtgagaaacactttcacctaaactcgtgcactgtactttcctttggccaacccaactgaacaagttgcttgatggtttacaggctctgatactcccatgtgcgtgctacctctccatcaagaagggcgcagtgccattgtgggagatcatcctgtgcatagtcatcataatgatcggcgtcgtatgtgcatgcgtgggatcatacacctcagtcagccagatgattagcagcaccaaatagcgcacgctagctgatatttatctagtgtctacggatccttccaaatgctttgacagagttggaactggcagcttttcgtagctaagtttatttgttccttctttatggcagaaatttggtaagagagagtttagttgtgggaggacaggcggcgaaggagtaatctgagtttagtgtggtgcttttgtgactgatcatctctggagcttttgtgaatgatctagctagctatctgtaaatgatctagttgtgaatgatattataattgtgatgcttttgtgaatatataattgtggtgcttttgtatttatgtgatggatctatgactgtggtatactgat

SEQ ID NO: 75695 - DNA, 1814 bp, Zea Mays
  misc_feature (1)..(1): n is a, c, g, or t
natgctaacagcagcaacaaaggcttttaatcccaagcaagttgagttaggctagaattgaaacccaaccgaaaccgcaagtcaaggtttaggcacatgaatagctattttccatgcactcatattgaagactaaatctttagttatattctatccctttgagtctcatttactggctcttaccagttaccatgtcaaattcggtttttccctacctctcgttccgttgctatcgtgccttagagttctactacacactggtgtctttggagacccctgttggacatgtcaaaactatctcaaccggtgatggacaagtttttcttcaattggtgctacccctagcctattacgtatgtcatcattctagactcgatctcttctattttgaccataaatccaacgcaacatacacattttcacaacacttatgtgttgaacatatcatcttttgtaggcaacattctccaccatacagcatatcaggactaattgtcgtcctatacaacttgtcttttagcttctatagtaccatcttgtcgtatagaaaaagccagatgccacttcatccaccatgctttgattctatggctaacgtcttcatcaatatctccgtctgtttgtagcattgaaagtccagattgcccattactaataaatgatttgaactgaagaagtcatttgcaaatacacaatgtgatggatgaatattgaatatattttttcctgattattcttactggatgctcttgctatgcagatgatgatatcatcctcctctcttttgtcaatattagtaattgaaagagttgatgagagggttgggctatcttgtttggtctcactcctatctcttatattagtgagcagtgcatgtgaaaggtagccgtaactgacaccaacgcaatcaaagtcagttcgcccttagcgaaaacttttatctgactgacatctgggtgccaggcttgtaccttctggcaagatttgaaggcttggctgacaggaaagtctacagcgtgaaccggtacttcatcagcggccattccctggagcacctttgctttgccctggtgacggttatgctaactgtgatgctgaccttcagaaacattaagattgccagaaaattctgtgaaaaaattgcaagtttggaaggcagactccgagacgacacagagattcggctagatgatgcctagtagataatattctaccttaacattgtcccgtttgccggggctgattcacccttttccccgtgttgtttcagactgacggtggcataggtcatatagaggacgcaatttattggtctgcccgattcataccgtggaaggttgtctgtgtccgccgcggcgttacaccaaacggttcgatgcaggcatacagcagctgctctcaagggtttcatgcctagacactaccgatgttgaggtctgctatcgtcagtgagcccaagtagcaggggcattgtgtcctacttggacgagactgatctcatcttcccgttgcgctgccagaaggcggtgtcctccttctcccgagccaggagctcctcgaacgatatttcttgagcctccagctccattgcactcagctccatgatctgccatggcaaaacagtccacacacacacacacaaacaggacgctcaggtggctacaacttacaaggacaagagaagcggcgtaccattttgtatggcgctgacttctgaagacgctcttgcacaaagttgtagatggcggcgtctttctttaggctatcgctttcggtttccaatctacgtacctatgaaaacgcccgagggtaca

SEQ ID NO: 75696 - DNA, 1855 bp, Zea Mays
  misc_feature (1)..(1): n is a, c, g, or t
natgctaacagcagcaacaaaggcttttaatcccaagcaagttgagttaggctagaattgaaacccaaccgaaaccgcaagtcaaggtttaggcacatgaatagctattttccatgcactcatattgaagactaaatctttagttatattctatccctttgagtctcatttactggctcttaccagttaccatgtcaaattcggtttttccctacctctcgttccgttgctatcgtgccttagagttctactacacactggtgtctttggagacccctgttggacatgtcaaaactatctcaaccggtgatggacaagtttttcttcaattggtgctacccctagcctattacgtatgtcatcattctagactcgatctcttctattttgaccataaatccaacgcaacatacacattttcacaacacttatgtgttgaacatatcatcttttgtaggcaacattctccaccatacagcatatcaggactaattgtcgtcctatacaacttgtcttttagcttctatagtaccatcttgtcgtatagaaaaagccagatgccacttcatccaccatgctttgattctatggctaacgtcttcatcaatatctccgtctgtttgtagcattgaaagtccagattgcccattactaataaatgatttgaactgaagaagtcatttgcaaatacacaatgtgatggatgaatattgaatatattttttcctgattattcttactggatgctcttgctatgcagatgatgatatcatcctcctctcttttgtcaatattagtaattgaaagagttgatgagagggttgggctatcttgtttggtctcactcctatctcttatattagtgagcagtgcatgtgaaagggttcttgatgatatgcgcctatgggtgattctgaactttgttccttgcatcgccattcctgcaatgctattcttgtttcctcccaagtatacgcattcaaggttctggttccttgctacaggcttgtaccttctggcaagatttgaaggcttggctgacaggaaagtctacagcgtgaaccggtacttcatcagcggccattccctggagcacctttgctttgccctggtgacggttatgctaactgtgatgctgaccttcagaaacattaagattgccagaaaattctgtgaaaaaattgcaagtttggaaggcagactccgagacgacacagagattcggctagatgatgcctagtagataatattctaccttaacattgtcccgtttgccggggctgattcacccttttccccgtgttgtttcagactgacggtggcataggtcatatagaggacgcaatttattggtctgcccgattcataccgtggaaggttgtctgtgtccgccgcggcgttacaccaaacggttcgatgcaggcatacagcagctgctctcaagggtttcatgcctagacactaccgatgttgaggtctgctatcgtcagtgagcccaagtagcaggggcattgtgtcctacttggacgagactgatctcatcttcccgttgcgctgccagaaggcggtgtcctccttctcccgagccaggagctcctcgaacgatatttcttgagcctccagctccattgcactcagctccatgatctgccatggcaaaacagtccacacacacacacacaaacaggacgctcaggtggctacaacttacaaggacaagagaagcggcgtaccattttgtatggcgctgacttctgaagacgctcttgcacaaagttgtagatggcggcgtctttctttaggctatcgctttcggtttccaatctacgtacctatgaaaacgcccgagggtaca

SEQ ID NO: 75697 - DNA, 1771 bp, Zea Mays
  misc_feature (1)..(1): n is a, c, g, or t
natgctaacagcagcaacaaaggcttttaatcccaagcaagttgagttaggctagaattgaaacccaaccgaaaccgcaagtcaaggtttaggcacatgaatagctattttccatgcactcatattgaagactaaatctttagttatattctatccctttgagtctcatttactggctcttaccagttaccatgtcaaattcggtttttccctacctctcgttccgttgctatcgtgccttagagttctactacacactggtgtctttggagacccctgttggacatgtcaaaactatctcaaccggtgatggacaagtttttcttcaattggtgctacccctagcctattacgtatgtcatcattctagactcgatctcttctattttgaccataaatccaacgcaacatacacattttcacaacacttatgtgttgaacatatcatcttttgtaggcaacattctccaccatacagcatatcaggactaattgtcgtcctatacaacttgtcttttagcttctatagtaccatcttgtcgtatagaaaaagccagatgccacttcatccaccatgctttgattctatggctaacgtcttcatcaatatctccgtctgtttgtagcattgaaagtccagattgcccattactaataaatgatttgaactgaagaagtcatttgcaaatacacaatgtgatggatgaatattgaatatattttttcctgattattcttactggatgctcttgctatgcagatgatgatatcatcctcctctcttttgtcaatattagtaattgaaagagttgatgagagggttgggctatcttgtttggtctcactcctatctcttatattagtgagcagtgcatgtgaaaggcttgtaccttctggcaagatttgaaggcttggctgacaggaaagtctacagcgtgaaccggtacttcatcagcggccattccctggagcacctttgctttgccctggtgacggttatgctaactgtgatgctgaccttcagaaacattaagattgccagggactcctgacctgtcactgattgtaacttgggtgcagaaaattctgtgaaaaaattgcaagtttggaaggcagactccgagacgacacagagattcggctagatgatgcctagtagataatattctaccttaacattgtcccgtttgccggggctgattcacccttttccccgtgttgtttcagactgacggtggcataggtcatatagaggacgcaatttattggtctgcccgattcataccgtggaaggttgtctgtgtccgccgcggcgttacaccaaacggttcgatgcaggcatacagcagctgctctcaagggtttcatgcctagacactaccgatgttgaggtctgctatcgtcagtgagcccaagtagcaggggcattgtgtcctacttggacgagactgatctcatcttcccgttgcgctgccagaaggcggtgtcctccttctcccgagccaggagctcctcgaacgatatttcttgagcctccagctccattgcactcagctccatgatctgccatggcaaaacagtccacacacacacacacaaacaggacgctcaggtggctacaacttacaaggacaagagaagcggcgtaccattttgtatggcgctgacttctgaagacgctcttgcacaaagttgtagatggcggcgtctttctttaggctatcgctttcggtttccaatctacgtacctatgaaaacgcccgagggtaca

SEQ ID NO: 75698 - DNA, 1852 bp, Zea Mays
  misc_feature (1)..(1): n is a, c, g, or t
natgctaacagcagcaacaaaggcttttaatcccaagcaagttgagttaggctagaattgaaacccaaccgaaaccgcaagtcaaggtttaggcacatgaatagctattttccatgcactcatattgaagactaaatctttagttatattctatccctttgagtctcatttactggctcttaccagttaccatgtcaaattcggtttttccctacctctcgttccgttgctatcgtgccttagagttctactacacactggtgtctttggagacccctgttggacatgtcaaaactatctcaaccggtgatggacaagtttttcttcaattggtgctacccctagcctattacgtatgtcatcattctagactcgatctcttctattttgaccataaatccaacgcaacatacacattttcacaacacttatgtgttgaacatatcatcttttgtaggcaacattctccaccatacagcatatcaggactaattgtcgtcctatacaacttgtcttttagcttctatagtaccatcttgtcgtatagaaaaagccagatgccacttcatccaccatgctttgattctatggctaacgtcttcatcaatatctccgtctgtttgtagcattgaaagtccagattgcccattactaataaatgatttgaactgaagaagtcatttgcaaatacacaatgtgatggatgaatattgaatatattttttcctgattattcttactggatgctcttgctatgcagatgatgatatcatcctcctctcttttgtcaatattagtaattgaaagagttgatgagagggttgggctatcttgtttggtctcactcctatctcttatattagtgagcagtgcatgtgaaaggtagccgtaactgacaccaacgcaatcaaagtcagttcgcccttagcgaaaacttttatctgactgacatctgggtgccaggcttgtaccttctggcaagatttgaaggcttggctgacaggaaagtctacagcgtgaaccggtacttcatcagcggccattccctggagcacctttgctttgccctggtgacggttatgctaactgtgatgctgaccttcagaaacattaagattgccagggactcctgacctgtcactgattgtaacttgggtgcagaaaattctgtgaaaaaattgcaagtttggaaggcagactccgagacgacacagagattcggctagatgatgcctagtagataatattctaccttaacattgtcccgtttgccggggctgattcacccttttccccgtgttgtttcagactgacggtggcataggtcatatagaggacgcaatttattggtctgcccgattcataccgtggaaggttgtctgtgtccgccgcggcgttacaccaaacggttcgatgcaggcatacagcagctgctctcaagggtttcatgcctagacactaccgatgttgaggtctgctatcgtcagtgagcccaagtagcaggggcattgtgtcctacttggacgagactgatctcatcttcccgttgcgctgccagaaggcggtgtcctccttctcccgagccaggagctcctcgaacgatatttcttgagcctccagctccattgcactcagctccatgatctgccatggcaaaacagtccacacacacacacacaaacaggacgctcaggtggctacaacttacaaggacaagagaagcggcgtaccattttgtatggcgctgacttctgaagacgctcttgcacaaagttgtagatggcggcgtctttctttaggctatcgctttcggtttccaatctacgtacctatgaaaacgcccgagggtaca

SEQ ID NO: 75699 - DNA, 3984 bp, Zea Mays
ctccactgctgcgtgcgtgcgtgcgtacatcgtcaaaaacctccatcaagcaactgatcatgacgatggctagagctacgacctccacggtcgcagcactctgcttcctcctcagctgcgtctccgcgaccccttccacgctcgccgcgtcctccgccatcatccacgacatcatccgcggcctcgcggacaccacggcggcgcgcgtccgcacggacgccgaggccacggcgcgcgcgtccaccgacttcggcaccaacgcgaccgcggacgacgcggcccggccggcggccgtgttctacccgtcgtgcgccgccgacatcgccgcgctgctgcgggcgtccagcgcgagcgcctcgccgttcccggtctccgcgaggggccgcgggcactcgacccggggccaggccacggcccccggcggcgtcgtcgtcgacatggcgtcgctagcagtagctgcagggcgcgacgagaccgccaccaccaacgcctcctccacctccgcctccgcaaggctcgccgtgtcggtggacgggcgctacatcgacgccggcggcgagcagctgtgggtggacgtgctgcacgccgccctggcgcacggcctcacgcctcgctcctggacggactacctccgcctcaccgtcggcggcacgctctccaacgcaggcatcagcggccaggccttccgccacggcccgcagatatccaacgtcctagagctcgacgtcgtcacgggtgacatggtgacgtgctccaaggagaaggacgccgacctcttcgacgccgtgctgggagggctggggcagttcggcatcataacgcgcgcgcggatcccgctggcgccggcgccggcgagggcgcgctggctgcggctcctctacaccggcgccgccgacctcacggccgaccaggagcggctcatcgccgacgacgagcgccgcggcggcgcgctggccgggctcatggactacgtcgagggctccgtcgtcaccgacctccagcagggcctcatcggcagctggcgctcgcagccgccgccgtcctcctcgtccttctactcggctaccgacgccgcgcgcatcgcggcgctagccgaggaggccggcggcgtcctctacttcctcgagggcgcggtgtactacggcggcgccagcgacacgaccgccgcagacgttgacaaggtaacacgatcgacgtacgacccaccgccggtttctacgtgcatacgccagtgccaccgaagccacgtgatctgtggatggttgatctggattgtcgtcttcagcctttggcttgtgatgcatgcatgtctggtggggcagcatcggcagtcgtgcagcgtcaacatcgtacttgcatggcctgccgttgtcgggccctcgtcgtgcatatcattccaaagctttttgggcatccccccccccccctgcttacctatagttttcaattttataagacctgcacgcatccatttgaagagtcaaaacctcgtgattttgaagcgacagttgtagcctgtacaacagttttgttgataccatatttttttatggaactacgccatccaaacagctccgtaaacttttgctggataataattaagtcgtagatggctagcgaattaaaaccttatatattgcatctattatatataagaaaaaaaaacctagctagtttactatattaaggtgcataaaatactactatcatatttcgtgaactcaaaacaaagaaataagaaatactctcgacgacaagttgatacaaatcctatgtaatttacattgctagtaccttaattcatcaactatggtatatctgcatgcagttggctaatgtttttggtaatactattccagttggatgacaggaacaagtcatgaccactatgcatgcatggagcagctaacaaaagccagctcgatatagaactgattcaagtagtcatatgataaggctagcgctaaaaaagtaggaatatagttacaaatgtggcaagtattggtacttggccaatggccacatagaaacgagtcattcacctatccaaatatttcttcacaatttcttagggcgctaaattaattttagttcgaaaataaataaaaatagagttcgatattaatcagatctgatcttctgtaaaaatttataacccattgtcatcccctaccctactagttattagaggatactcttataatagataatgcaagagatctaagcactgcaccatccaagcaaagctactgtagctcgacatgtgagtacacttcactgtgaccaaccagatactgcacagctcgcattcacaagcgctatagctagaaggacgaccgcatcagctctgcaaacgactcggatctgttcgctgttcgcaccaaggacagcaacagtgctagtgtctctttcttttctgttttttttatcggagaggcaacaccatatatttccagacaaatcttgagctatatatagagactttcgtacatatgtgttttagacgaccgcatcctagcaactttttttacttgagcagactttcgtacattctatattcaaggtcacaagaagtcaagctcgatctcacatcaaattatgttgtagtggtatttttttagtccccaaaatgaaatggtttttggacatccccaacgaacgacgatcggttatatatgtgtcagttgggacagtcacgtttctcgatgaaagtgaccgtgcaagcaaggtgcaagttgacgtgtagtcgtgtagtcgcgcgcgcatatccctacatatatggacacatcacacacatgcaaagaaacactagtgaccaaatcatataccttttgcacacaacgtgacactacttgtagagtatacgtagttagttcctgcatgcatggattaacacaaaatgcgtacatgcagcgcgtggacgtgatgctgcgtgagctgcggtacgcgcgggggttcgcgtacgtgcaggacgtgtcgtacgagcagttcctggaccgcgtgagcgccggcgagcgcaggctccgcggcgagggcctctgggacgtgccgcacccgtggctcaacctcttcctcccgcgctcccgcatcctcgacttcgccgcgggcgtcttccacggcgtgctgctccccacgcgcacggctggcggcggcggcggcgggcccgtgctggtctaccccatgaaccggggcaagtgggacggcgcgacgtcggcggtgctcccctacgacgatggcgacggcgacggcgacgaggtgttctacacggtggggatcctgcggtcggccgtggcggacggcgacctgcgccgcatggaggagcagaacgccgaggtggcgcgcttctgcgaggccgccggcatcccctgcacgcagtacctgccctcctacgccacgcaggcggactgggcggcgcgccacttcggccccgccggcagcggcaggtgggacaccttcctccgccgcaagaggaaatacgaccccatggcgatcttgtcgcgcggccagaggattttctcgtccccgctacttgcctcatgatccgccggttccggtctctcgatcgtcgtgtgttgctgttgctggcatgggctagctgcatgaaataatagtgcaagcaagcaaaggcaaagcaagcttcaaggcatgactgttttgctttagcgttttactgatcagtagtcaagtgacacagttactacgtactacgatctgtctctgactctcttccagagggtcccaaatatatgatgctttttattaactttatttgaccgttattaaaaatatagtgatattgtttactttaaacgagttattttattgttacagaattttatcatttacataaaaatataaatttaaataaatgatcaaatacaataatatctaaaaagtaaaaaaaaaccatcgtctatgtcaaaagaaacatcatcaaaacgagggaggaattttactagtaatagacatgcatgcacgtgatcg

SEQ ID NO: 75700 - DNA, 1612 bp, Zea Mays
actattgcagcaactaagtggaaggatgttggtacggggcatcatgttgaatatgatcagagacctgatatttttaggggaactgttcgctatgctagtgtgcatgctcacttgggaagaactgggagtaggagagatgatcttgaatcccttgcatacacgcttatttttcttctacgtggccgcctcccttggcaaggataccagggagagaacaagggttttcttgtctgcaagaaaaagatggcgacatctccggagtctttgtgtggaatctgtccacaacctttccgggattttgttgagtatgtggtgaacttgaaatttggtgaagaaccaaattatgcgaagtgcatctctctttttgatggcattgttggcccaaatccagacataagaccgataaacacagatggtgcccaaaagctaatatatcaggttggccagaagagaggccggttaatagtggatgaaaatgatgatgagcaacctaagaaaaagatcagaatggggatgccggcaactcagtggattagtgtctacaatgcccgtcgacccatgaaacagaggtaccactacaatgtagccgataatagattgctgcagcatattcaaaagggaaacgaagatggcttgtttattagttcagttgcctctagctcaaatctgtgggctttaattatggatgctggcactggctttacatctcaagtatacgaactttctaattactttcttcacaaggaatggataatggaacagtgggagagaaatttctatatcactgcactggctggggcgaataatggaagctctttggtgattatgtcaagaggaacacaatatgcccagcagtcctacaaagtaagcgatacatttcccttcaaatggataaacaaaaagtggaaggagggcttctatgtcactgctatggcaacagctggaagccgatgggcagttgtcatgtcccgcaatgctggtttcacttctcagtggagcttgatttcttatatccgagtgagggcatccacatgcgttgggacaatggctatcgcatcacggcaacggctgccacatgggaccaggcagcctttatcttgagcattccaaggagaaagcctagtgatgaaacacaggagacccttagaacatctgcgtttcctagccagcatgtgaaggacaaatggtccaagaacctgtacctagcttccatctgctatggaagatcggtgtcctgaaacccattttctcgatttggtttggttgccgagaggtatattgatatcaaagacaggtggttttatgatatcagatggagtgttttgaagctcaaaactctgctaacctactgcaactaacaaaagatttcattggaatgtcatcgggactggaggagacatgctgacacaaatgaacgacgacagggtcggcagaatcgatatcagctggtgtttcgaaattacaaagatggaatttttagttttttcttcatcagttctaagttacagatcattagctatgtcgtaattcattttgatacatcattcagaaggatacaaaattgcttctatgtatatcgttgtgcagttgtgctccaacaagcggccattcc

SEQ ID NO: 75701 - DNA, 1604 bp, Zea Mays
actattgcagcaactaagtggaaggatgttggtacggggcatcatgttgaatatgatcagagacctgatatttttaggggaactgttcgctatgctagtgtgcatgctcacttgggaagaactgggagtaggagagatgatcttgaatcccttgcatacacgcttatttttcttctacgtggccgcctcccttggcaaggataccagggagagaacaagggttttcttgtctgcaagaaaaagatggcgacatctccggagtctttgtgtggaatctgtccacaacctttccgggattttgttgagtatgtggtgaacttgaaatttggtgaagaaccaaattatgcgaagtgcatctctctttttgatggcattgttggcccaaatccagacataagaccgataaacacagatggtgcccaaaaggttggccagaagagaggccggttaatagtggatgaaaatgatgatgagcaacctaagaaaaagatcagaatggggatgccggcaactcagtggattagtgtctacaatgcccgtcgacccatgaaacagaggtaccactacaatgtagccgataatagattgctgcagcatattcaaaagggaaacgaagatggcttgtttattagttcagttgcctctagctcaaatctgtgggctttaattatggatgctggcactggctttacatctcaagtatacgaactttctaattactttcttcacaaggaatggataatggaacagtgggagagaaatttctatatcactgcactggctggggcgaataatggaagctctttggtgattatgtcaagaggaacacaatatgcccagcagtcctacaaagtaagcgatacatttcccttcaaatggataaacaaaaagtggaaggagggcttctatgtcactgctatggcaacagctggaagccgatgggcagttgtcatgtcccgcaatgctggtttcacttctcaggtagtggagcttgatttcttatatccgagtgagggcatccacatgcgttgggacaatggctatcgcatcacggcaacggctgccacatgggaccaggcagcctttatcttgagcattccaaggagaaagcctagtgatgaaacacaggagacccttagaacatctgcgtttcctagccagcatgtgaaggacaaatggtccaagaacctgtacctagcttccatctgctatggaagatcggtgtcctgaaacccattttctcgatttggtttggttgccgagaggtatattgatatcaaagacaggtggttttatgatatcagatggagtgttttgaagctcaaaactctgctaacctactgcaactaacaaaagatttcattggaatgtcatcgggactggaggagacatgctgacacaaatgaacgacgacagggtcggcagaatcgatatcagctggtgtttcgaaattacaaagatggaatttttagttttttcttcatcagttctaagttacagatcattagctatgtcgtaattcattttgatacatcattcagaaggatacaaaattgcttctatgtatatcgttgtgcagttgtgctccaacaagcggccattcc

SEQ ID NO: 75702 - DNA, 1589 bp, Zea Mays
actattgcagcaactaagtggaaggatgttggtacggggcatcatgttgaatatgatcagagacctgatatttttaggggaactgttcgctatgctagtgtgcatgctcacttgggaagaactgggagtaggagagatgatcttgaatcccttgcatacacgcttatttttcttctacgtggccgcctcccttggcaaggataccagggagagaacaagggttttcttgtctgcaagaaaaagatggcgacatctccggagtctttgtgtggaatctgtccacaacctttccgggattttgttgagtatgtggtgaacttgaaatttggtgaagaaccaaattatgcgaagtgcatctctctttttgatggcattgttggcccaaatccagacataagaccgataaacacagatggtgcccaaaagctaatatatcaggttggccagaagagaggccggttaatagtggatgaaaatgatgatgagcaacctaagaaaaagatcagaatggggatgccggcaactcagtggattagtgtctacaatgcccgtcgacccatgaaacagagattgctgcagcatattcaaaagggaaacgaagatggcttgtttattagttcagttgcctctagctcaaatctgtgggctttaattatggatgctggcactggctttacatctcaagtatacgaactttctaattactttcttcacaaggaatggataatggaacagtgggagagaaatttctatatcactgcactggctggggcgaataatggaagctctttggtgattatgtcaagaggaacacaatatgcccagcagtcctacaaagtaagcgatacatttcccttcaaatggataaacaaaaagtggaaggagggcttctatgtcactgctatggcaacagctggaagccgatgggcagttgtcatgtcccgcaatgctggtttcacttctcaggtagtggagcttgatttcttatatccgagtgagggcatccacatgcgttgggacaatggctatcgcatcacggcaacggctgccacatgggaccaggcagcctttatcttgagcattccaaggagaaagcctagtgatgaaacacaggagacccttagaacatctgcgtttcctagccagcatgtgaaggacaaatggtccaagaacctgtacctagcttccatctgctatggaagatcggtgtcctgaaacccattttctcgatttggtttggttgccgagaggtatattgatatcaaagacaggtggttttatgatatcagatggagtgttttgaagctcaaaactctgctaacctactgcaactaacaaaagatttcattggaatgtcatcgggactggaggagacatgctgacacaaatgaacgacgacagggtcggcagaatcgatatcagctggtgtttcgaaattacaaagatggaatttttagttttttcttcatcagttctaagttacagatcattagctatgtcgtaattcattttgatacatcattcagaaggatacaaaattgcttctatgtatatcgttgtgcagttgtgctccaacaagcggccattcc

SEQ ID NO: 75703 - DNA, 1093 bp, Zea Mays
agccttagcttctctctctctctctctctaagcgcaagtgaagcaaaagcaagccacggtagtgctccgcgcgccggccgggggcggcggcagcatatggagccggggctcggcaaacgcctcatgaccgtgctccatgccgtctaccacatgatgcgacgtggcctgtgccgcaagcgtctcatgatggacctccacctcctgctcggccggggcaagctcgcgggcaaggcgctccgcgacctcctcaccgccgcctcacaccaccagcaccaccaccacatggtcgtgccgcgtccgccctcccgcgcgccccccaccgccgccgcgggcctctcgctcccgtccgacccccagccccaggtcgacgtgcagtcgttcaactcctgcaccgccgcgccgtcatgctcctccggcaataacaatggcggcggcgtcgcacgtccggccgccgccggtggcctcggacgcgcgttgctccccttcaggatccgcggccgccgcggcgcctccgcagccaacgggtgcggcgacgacgggctcgtcctggcccaggtggcgcgcgcgctcgagacgatgcatgatgccgccgacgacgtcgccgttcacccgtcgccgttggcggccgccgccggagccacgccctcgcccatgctggcgcttagcctcgggcgcagccccgccggagcccgccgcctgcgcgtcaccgactcgcccttcccgctcgacccgcccgagggtctggacgcccgcgccgactccacgttcgacgccttcatcaccaagttctacgagactctccgcctacagcaggccgacgccacgcctgacaaccgcgcgcgccgctagctgtccatccagcacggacgcgggacgccgcgccgcccgcatggctacagcgtgcattgcatgcatatggctatgggcgcggaccgcggagcacgggggcctataaataaaataatatatactcctgctactgtcatgcgggcccgatctgttttactgcctgcatgtgtaattttactttactttcctcgtccgtgataatcgatctcgagtataagatagggtcggtcggtgaggagacgag

SEQ ID NO: 75704 - DNA, 3332 bp, Zea Mays
cagcaccagcaggcagaggctccggcccggctccaaatcctcctcgtgcttgccgatgtccgggcgttagaggaaagcggcaccggtgctccggccatatggcctctcgccccctcctcctccgcccatgaccgaccccacccggcccggccctattcttctactactccctactccacggctacgcccacgcacatgcctcccacaccctcatcacttgcattgagcaccacgtcgtcgagctatctgagcacaagtgctactaagctagtagccaccacctgctataggagtataggctataggcctatagctaccagagccgccagctgccagagctgtagctcagctagctagtaggagagtagggggtcgtcgtctgggtgttgctggccgctcgatcgagtactcagttgttggctgctgtgccattgcgacggcggccggcgggccggggagcgagcgcgagtcggaggcagatggtgacggccaaggaggccgcggcggcggcggcggccatggacgccagcaagtacgtgcggtacacgccggagcaggtggaggcgctggagcggctctactacgagtgccccaagccgagctcgctgcgccgccagcagctggtccgcgactgccccgtcctcgccagcgtcgaccccaagcagatcaaggtctggttccagaaccgcaggtgccgggagaagcagcggaaggagtcgtcccggctgcaggcggtaaaccggaagctgacggccatgaacaagctgctcatggaggagaacgaccgcctgcagaagcaggtctcgcagctcgtctacgagaacggctactaccgccagcagacgcagagcgcggggctggcgaccacggacacgagctgcgagtcggtcgtcaccagcggcccccagaacgtggccgcggtgctgccacaagcccagccgcgcgacgcgggccctgccgggctcatgtccatagcggaggagacactgacggagtttctgtccaaggccaccggcaccgccgtcgagtgggtccagatgcccgggatgaagcctggtccggattctattggaatcattgccatctcgcatggctgccccggtgtcgccgcgcgagcttgcggcctcgtgggcatggagcctgcgaaagtcgctgaggtcctcaaggaccgcccgctgtggctgcgagactgccgatccatggaagtggtgaacgttctccctgccggtaccagtggcacagtcgagcttctctacatgcagctctacgcccccacgacgctcgcgccagctcgcgacttctggctgctgcggtacacctccattctcgacgacggaagcttagtggtatgcgagagatcactcggcgccaaccagggcggcccaagcatgcctctcgtccagccttttgtcaggggcgagatgcttcccagtgggttcttggtccggcctagcgacggcggaggcagcgtcatacacatcgttgatcacatggacctggagccttggagcgtgcccgaagtcgttcgcccactgtacgagtcgtctgcgatggttgctcagaagatgtcaatggcggccttgcgctatctcaggcaggttgctcacgaagataccgcccattctgtggtaaccggcgggtggggacggcagcctgcttctctacgggctctgagccagaagctcaccagagggttcaatgaagctctcaatgggctcgctgacgacgggtggtctgtggtcggaagtgacggggtggacgatgtctgcgtctctgtcagttcatccccgagtagagtggtcagctgcaatgcaactttcagtaacggacctgtagtcggcactggcagcagcagtgtgctctgcgcaaaggcatcgatgctgctgcaggacgtttctccgccagagctcctgcgcttcatgcgggagcagcggtcgcagtgggccgacagcaatctagacgcgttcttcgcttctgcgatgaaaccggatttctgcagcttgcctattcctcctcgccttggagggtttggtggccagttcctcgaggttataaaagtaggaaatgccggtaactaccaagacgcgctcctgcaccgtgatctgtttctgttgcagatgtacaacggggtagacgagaacatggcaggcacttgttcagagctcatctttgcccctatagacgcatcgttcagcgacgactcgccactgctcccatccggctttcgtatcatcccgatcgacgctcctcttgacacgtccagccccaagtgcacgctggaccttgcctccaccctcgaagccggaactcccagaagcaggacaagcgggagcggcggccctggaactgccgccgccgcttgtgccggctccaaggccgtgatgacgatcgtgttccagtttgccttcgagagccatctgcaggacagcgtcgcagccatggcgaggcagtacgtgcggagcatcgtcgcgtcggtccagaggatcgcgctggcgctctcctccgcgcgcctggtcgtccctcatggcagcggtgtcagccacggtgctcctgctgctggtccggaggcagccacgcttgcaagatggatctgccagagttacaggttccatttcggggctgagcttatcaaatccgcagacggtagcggctgtggtgaagcagtgctgaaaactctctggcaccatgccggcgctatactctgctgctctctcaaggccttgccagtgttcacgttcgcgaaccagtccgggctcgacatgctggagacgacgctggtggcgctgcaggacatcgcgctggagagagtgttcgacgaccaagggaggaagaacctgtgcgcggagctccccggcgtcatggagcaggggttcgcgtgcgtccccggcgggatgtgcgtgtcgggcctaggccggccggtgtcgtacgagaaggcgctggcgtggaaggtgctcgacgacggcagcggcggcgtgcactgcgtctgcttcatgttcgtcaactggtcgtttgtgtgacgcgtctgctaccaggtccgtcgcgctcaggggaaaatcagttgatcggtgacgtgcttgagggtacgtacgtctcaaatcgccctttggttattgggatgtaaaatggtttcggttttttttttgttttttttttgaagaaaaatgtgaaatggtagaaggaaggacctgaatagcagtattgtacacggatggatcgtgtgatgtcaaacaagaatgactttttgtttgatggtgaagctagcatggcccctcctttatggttttgattattataaatggattgcataattataataagattaacatgtgtca

SEQ ID NO: 75705 - DNA, 1436 bp, Zea Mays
caacccccgcgggccttgccgaagtcccaacagccagattgtgaaagaggaaacctgggaagcagtaattgctgactcgttgctttatgcgaagggtttattgctggcagttactttggttattgattggtggctggcctttgcctactttctgggatttcttgttatatatgctgtagctcaacagccaccttatgatggcctaggccattcaaatcacttgaccccattgcaacttgaaagtttgctaactgaagagccaacatcacgattttggctggtatttctgtacatgtttttaatggaattctaatattgttatctcccaaatttccagtacattcctgcccgctttactattttgtcaagacttgtagcctgtaggtgcctacaattgttacaaatgtgtcactctcatcttatagaaggattagaggagcctgagaagaatttcatatggtttgatgggctgatggaaaccagttaaattccttgcccaactgcgcaacttgatttagagacacagttgctatataactttagtgcctatcattaaaaatatagtttgtctacttcgatagcaacggtatcaaaatctgactaccttatgaagtttggagtcttctcatttcttttggttagtgagggaacttgtagggggttcttttttaagaattgccccaaaagtttcttgcccataaagttaggtgtatgtttcaatttccctggttctttgatgactggatatttttatttcaatgcaaacaggtagaattccgaacttcattttcagcaaaatgtgtacaagcaagcagcattctgcctgaactttctatcgtgtactccaacaagaacatctcttttggaacaattgaccttgggcatttcccaaatgctgcagcaaagtttgggatatccatgtgggatcatctccccacttacatattgtttgacaaggtgactgaagtttctcggtttccagaaatcacaagtgaatcaaaagtatttgtgccaaaagttactaagaaacttctttgccagcattttgatctcgacagacgattgattggatacctatccacctgatctgacaccgatcccatatgcctcaaaggatggggacatctcccttttttgtcgctgaaccggacatctgtgtgtcagcagcaatcacttcaggggggtatcgtgagccttgtattattcggcgaactgcttattcccttttaattaaggcccagtaaactttgtggcggaaaaacacacacacacacacacaaccaatttctgtctaatctgtctgatactgaattatagaatttcactaccatgcagaggtttctgtaatgatttgccgactatgttttgtcacattgtgactgcagcagcagtcaattcagacagcatccacttccactgagccaggggtgtcccgg

SEQ ID NO: 75706 - DNA, 3950 bp, Zea Mays
ctcgcagcaccatgttagtatcaccaggaaaaaatctgaaataaaaaaagagatggaatggaagactaataaaaaatggaataaattataacactaaaacaccattaacatccaaccatcacacccattcaagctattcagatgttcagagaatcaagcgcgcaagggcattctggtggtggtggcttatggatagcatgatttttcaaaagcacatgatcaaccaaagttctctgcttcaaaatactaggtgtattataattttagaagcaactttatagattttgacgaatgattactcaaattatatgtatgcttagggttagtttggaaacttaaatctcctccgggattcccggagattgagtgggaaattagctcatcccccccccccccccccccccccaagtccccgggaatcccggaggggattaaagtttccaaactagcccttagtaaataaaagttgcatcaatagattcacatttgaacaaacagattttgaagcaattgatgacataatgtaagagtaatccaaaatcaacatcgaagtatgcttctaaatattttcccccaaatcctaacacaccttgtaaacagaaatagataagtgtagacacctgtatttcaagtttcaacatttagggtaccatatagtgcagcagtgcatgtaaatgtaggtgagaaaatagaataaaaactaaatcagtacaagaggggagatcctaaaactgtatgattaatatttgttgggattttcctctcctaagtttgaaaaactgtgcactaaaaagtaaaatccctatatataatgcatgtttccattccccaccaacatgtagccaactttatcagtatgacactaacaaaaggtgtgctttatcatgggagaggataagtggataaccaatctattggatatgagcattgtgtaactctatcacatgggaaaagaagaacatgatctgatagaaggcacatcaacaaacaccattgaacaaaatatgaagtatcctggtttaaaactgatactagcagaatctactaataaactaccacatctgttacaaattgtaagtcgttctggcttttataggtacatagattttgctacacacctacatatgcagtatgtcaagatacatagtaaaatctatgtatctaaaaaagataaaacaacttacaatttggaccagagggagtagattaataccccttgacgttattgttctaggttcgcagacaactacatttattttaacccatgaggcatgatccaattttcacatgctaccttcaacactagagagctagaagctatcaaaagtgccacaaactcagcaaaaaattccaccaatcagcgttgaactcaatcacgtcaatagccatactctagcttcatcattaaaatcaccaaaagtaaatcagaccttatcgattcacaaatttgcaaacccgaccaaggggtgagagtaccggtattatgtcccaacatggctaataaacccaaactgcaaacatgccggcactcgaactcatgacctctaaagttcctcatagtaacttgcttgtcaaagataaaaatccaacatattaaatggttaaaatgtattttcaattaggaaacttaatctgttggtccctgtttagacaatgttggtaatgtaggcatcaaaatcatcttgtaccctactgtactatgttctctgaatctctggagttatgttgggggtaagaagtccatagaccgatgatataaaattcttggaaatctgcatgcttatgttcaaaggggaactctctggcagcatcagatgagtgtttaagaaacattaccaattccacacgcacagatgccataaccagcctctaagcgtactgtactatactaatctaattacaaaacgaaacataaaactgtatgaatctaatgcagcagattattatacaataatccacacatcctaccatacccattgcatcgacttagctgggggcgaggcaacatacccgaaaacggtgacccactcctcctcgtcgacccgtccagcagccggagccgaatctctgggcatctccggccgcgccacctccctggggggcggcagcgtgatcagcgctaccttctgctgctgtgactgctgacccgacggcgtcgtcggggactgctgctggtactgcacgacgccatccatcggtgatccctccctgggattctcctccctcgagggggtccaccatgccgagggccccggcgagccgttggaccgcagcggcgaggagaagagaacggctccacgcgggggctgaggcgagggggtcgtcgtcgcctgcggaggcgtggccggctgcctggagggggagaggtgggagaggtcgtcgagggagagcagcggcggaggcggcggcggggtggaggcctgcgcctctcgccgcatcgaggccggtgggaggcgaaacgacgaggagatcggggacgagaggtcccgcaggaacggcgggtggcggcgacggtgatccggcctggaggcactcatgacggtggcggagagctgaaaccctagcaagagaaagcggagttccactgccgagtgcgccttgggtttttggaagcctcacgtgtgtgaatgtgaagaggcaaacagaacgcttgtgtcaccaacatgtggaccctagaactttacaggtcccacatgtcggagtgctggcgttttgattctcggctctactcgaaggcgatgaagaaattaagaatacgccaggctccttgtcgctcgtaaaatggaggtcgcgacggcgacggaggcgtctgcgccggcggcaagcggcggcgcggcggggcagggccacccgttcccgtggctagacgctgccatctctgagccctactacttcctgcatctcctcgccttcttctcttactttgcggcccgcagcgcggcgctctccgccgacgacggaggggagctccacgaccgcctcctccgtagggagatccaggcagtgctcgtgttcctggtgctcttcgtagtgaagcagattgtgaaagaggaaacctgggaagcagtaattgctgactcgttgctttatgcgaagggtttattgctggcagttactttggttattgattggtggctggcctttgcctactttctgggatttcttgttatatatgctgtagctcaacagccaccttatgatggcctaggccattcaaatcacttgaccccattgcaacttgaaagtttgctaactgaagagccaacatcacgattttggctggtagaattccgaacttcattttcagcaaaatgtgtacaagcaagcagcattctgcctgaactttctatcgtgtactccaacaagaacatctcttttggaacaattgaccttgggcatttcccaaatgctgcagcaaagtttgggatatccatgtgggatcatctccccacttacatattgtttgacaaggtgactgaagtttctcggtttccagaaatcacaagtgaatcaaaagtatttgtgccaaaagttactaagaaacttctttgccagcattttgatctcgacagacgattgattggatacctatccacctgatctgacaccgatcccatatgcctcaaaggatggggacatctcccttttttgtcgctgaaccggacatctgtgtgtcagcagcaatcacttcaggggggtatcgtgagccttgtattattcggcgaactgcttattcccttttaattaaggcccagtaaactttgtggcggaaaaacacacacacacacacacaaccaatttctgtctaatctgtctgatactgaattatagaatttcactaccatgcagaggtttctgtaatgatttgccgactatgttttgtcacattgtgactgcagcagcagtcaattcagacagcatccacttccactgagccaggggtgtcccgg

SEQ ID NO: 75707 - DNA, 5355 bp, Zea Mays
ctcgcagcaccatgttagtatcaccaggaaaaaatctgaaataaaaaaagagatggaatggaagactaataaaaaatggaataaattataacactaaaacaccattaacatccaaccatcacacccattcaagctattcagatgttcagagaatcaagcgcgcaagggcattctggtggtggtggcttatggatagcatgatttttcaaaagcacatgatcaaccaaagttctctgcttcaaaatactaggtgtattataattttagaagcaactttatagattttgacgaatgattactcaaattatatgtatgcttagggttagtttggaaacttaaatctcctccgggattcccggagattgagtgggaaattagctcatcccccccccccccccccccccccaagtccccgggaatcccggaggggattaaagtttccaaactagcccttagtaaataaaagttgcatcaatagattcacatttgaacaaacagattttgaagcaattgatgacataatgtaagagtaatccaaaatcaacatcgaagtatgcttctaaatattttcccccaaatcctaacacaccttgtaaacagaaatagataagtgtagacacctgtatttcaagtttcaacatttagggtaccatatagtgcagcagtgcatgtaaatgtaggtgagaaaatagaataaaaactaaatcagtacaagaggggagatcctaaaactgtatgattaatatttgttgggattttcctctcctaagtttgaaaaactgtgcactaaaaagtaaaatccctatatataatgcatgtttccattccccaccaacatgtagccaactttatcagtatgacactaacaaaaggtgtgctttatcatgggagaggataagtggataaccaatctattggatatgagcattgtgtaactctatcacatgggaaaagaagaacatgatctgatagaaggcacatcaacaaacaccattgaacaaaatatgaagtatcctggtttaaaactgatactagcagaatctactaataaactaccacatctgttacaaattgtaagtcgttctggcttttataggtacatagattttgctacacacctacatatgcagtatgtcaagatacatagtaaaatctatgtatctaaaaaagataaaacaacttacaatttggaccagagggagtagattaataccccttgacgttattgttctaggttcgcagacaactacatttattttaacccatgaggcatgatccaattttcacatgctaccttcaacactagagagctagaagctatcaaaagtgccacaaactcagcaaaaaattccaccaatcagcgttgaactcaatcacgtcaatagccatactctagcttcatcattaaaatcaccaaaagtaaatcagaccttatcgattcacaaatttgcaaacccgaccaaggggtgagagtaccggtattatgtcccaacatggctaataaacccaaactgcaaacatgccggcactcgaactcatgacctctaaagttcctcatagtaacttgcttgtcaaagataaaaatccaacatattaaatggttaaaatgtattttcaattaggaaacttaatctgttggtccctgtttagacaatgttggtaatgtaggcatcaaaatcatcttgtaccctactgtactatgttctctgaatctctggagttatgttgggggtaagaagtccatagaccgatgatataaaattcttggaaatctgcatgcttatgttcaaaggggaactctctggcagcatcagatgagtgtttaagaaacattaccaattccacacgcacagatgccataaccagcctctaagcgtactgtactatactaatctaattacaaaacgaaacataaaactgtatgaatctaatgcagcagattattatacaataatccacacatcctaccatacccattgcatcgacttagctgggggcgaggcaacatacccgaaaacggtgacccactcctcctcgtcgacccgtccagcagccggagccgaatctctgggcatctccggccgcgccacctccctggggggcggcagcgtgatcagcgctaccttctgctgctgtgactgctgacccgacggcgtcgtcggggactgctgctggtactgcacgacgccatccatcggtgatccctccctgggattctcctccctcgagggggtccaccatgccgagggccccggcgagccgttggaccgcagcggcgaggagaagagaacggctccacgcgggggctgaggcgagggggtcgtcgtcgcctgcggaggcgtggccggctgcctggagggggagaggtgggagaggtcgtcgagggagagcagcggcggaggcggcggcggggtggaggcctgcgcctctcgccgcatcgaggccggtgggaggcgaaacgacgaggagatcggggacgagaggtcccgcaggaacggcgggtggcggcgacggtgatccggcctggaggcactcatgacggtggcggagagctgaaaccctagcaagagaaagcggagttccactgccgagtgcgccttgggtttttggaagcctcacgtgtgtgaatgtgaagaggcaaacagaacgcttgtgtcaccaacatgtggaccctagaactttacaggtcccacatgtcggagtgctggcgttttgattctcggctctactcgaaggcgatgaagaaattaagaatacgccaggctccttgtcgctcgtaaaatggaggtcgcgacggcgacggaggcgtctgcgccggcggcaagcggcggcgcggcggggcagggccacccgttcccgtggctagacgctgccatctctgagccctactacttcctgcatctcctcgccttcttctcttactttgcggcccgcagcgcggcgctctccgccgacgacggaggggagctccacgaccgcctcctccgtagggagatccaggcagtgctcgtgttcctggtgctcttcgtagtgaagattgtgaaagaggaaacctgggaagcagtaattgctgactcgttgctttatgcgaagggtttattgctggcagttactttggttattgattggtggctggcctttgcctactttctgggatttcttgttatatatgctgtagctcaacagccaccttatgatggcctaggtatgtatgctcatattgggtatagaatattataagtgcatgtcttatattaatagaatgtttatatgtaactctttgacagctgagaactgtattcttaagtgttggatactatgcttttaataaatattttgtatgattgtatctttggttgcacccttgggttgctcgttcttaatgtgtttttagctaaatttttttacccacacatcccatgagacactaaagcacatgtacctttcgcaaacgaaaaaagcatctgtaacttactagttaatggctttgtgatgggttataccagtataagaagttttacatttggtaaagtaagcggttgcacatcaatcattaggtaatcactgcatgtggcatttttattatcagttttctcagcgtctcttgtacaaatcatggactgcttatatgattgagtgcttgcattggggccttggtggtaagtggttctttactgaatggaacactgtccactgtcctttattaagggtgaagcggactttggttggtatcatctatcttatctgttactttgagtgcagttgatgaggcatatctgttcacaaatagatctaccagtttttaatgtgatattcctagactggattgtcccgaaataaattgatttaactgggattaccaacaatattattgcaaatgttggtactttactactttggataaactgtttgtgctcctgtatacactaaaagctaaaatgcaacagcatcagatattgacacactgccagtacagatgtgaaaagcatatctatttgttagacaaactgtttgtcattttcttacctagtccagaaagatttgtatccatcctttgttttctacccagattcaaacattgcttttgtttctctcagttgcactgatattttacttttcacgcaggccattcaaatcacttgaccccattgcaacttgaaagtttgctaactgaagagccaacatcacgattttggctggtatttctgtacatgtttttaatggaattctaatattgttatctcccaaatttccagtacattcctgcccgctttactattttgtcaagacttgtagcctgtaggtgcctacaattgttacaaatgtgtcactctcatcttatagaaggattagaggagcctgagaagaatttcatatggtttgatgggctgatggaaaccagttaaattccttgcccaactgcgcaacttgatttagagacacagttgctatataactttagtgcctatcattaaaaatatagtttgtctacttcgatagcaacggtatcaaaatctgactaccttatgaagtttggagtcttctcatttcttttggttagtgagggaacttgtagggggttcttttttaagaattgccccaaaagtttcttgcccataaagttaggtgtatgtttcaatttccctggttctttgatgactggatatttttatttcaatgcaaacaggtagaattccgaacttcattttcagcaaaatgtgtacaagcaagcagcattctgcctgaactttctatcgtgtactccaacaagaacatctcttttggaacaattgaccttgggcatttcccaaatgctgcagcaaagtttgggatatccatgtgggatcatctccccacttacatattgtttgacaaggtgactgaagtttctcggtttccagaaatcacaagtgaatcaaaagtatttgtgccaaaagttactaagaaacttctttgccagcattttgatctcgacagacgattgattggatacctatccacctgatctgacaccgatcccatatgcctcaaaggatggggacatctcccttttttgtcgctgaaccggacatctgtgtgtcagcagcaatcacttcaggggggtatcgtgagccttgtattattcggcgaactgcttattcccttttaattaaggcccagtaaactttgtggcggaaaaacacacacacacacacacaaccaatttctgtctaatctgtctgatactgaattatagaatttcactaccatgcagaggtttctgtaatgatttgccgactatgttttgtcacattgtgactgcagcagcagtcaattcagacagcatccacttccactgagccaggggtgtcccgg

SEQ ID NO: 75708 - DNA, 4240 bp, Zea Mays
aaattttataacttaaacataaatacataatctctgttgaaggaggcttttaatattatggttctatattttaaaaatgcaactctattagataatcttataattggaaaaccgagcctgattcaagggctcagggtttaaacaggctccaactgtggtatccgtatttacgctgacgggcccagcaagagaagaaaggaaaccataaacctgcggctccatcgaactctgcagccagcctgcgtgcgccgccctagcttccgtcgtcgtcatcttcttcgtcggagcctcggaggatacgaggggcccctgcgcttcgctacattctcaacgaagcccctctcgcagcgggcagaggccgtacggcggtgcgtaccccaccggcacggggccgcgtttgcagggtgccgccgtactaccacacaaggcgcccttatttttcccttgtgcgcgcccgcaatgcgctcttgagatccccggctcctcctcctcggtctgcttctcctgctccggctgctggccctggccacctacccggagcgggaagagcggcgggagccctgcattttgttccggttctccgcgtgcctcatccgcccgcccgcgatccccgggaggactcttgggaagccctccctgtacgtgactactgggacctccaccaagctcttcaagtgcaagaattcgactgcagattttaatcgtgattgacacgattcctggtttgagggcatctgttggtgtttcgagctaacaggctcctttctccctgctcgaagtttcacttacttcaacatgtggtttctatggatccagacttccaaagttggaatctgatcactcgcgtcagtgcttctcagctcccttgtttgccgttatggaggagcagaactcgtggctcaggaccaagttctccaatactgtctatgctagggtggatccccggagagtacctgttgctccgcttagcaaggatgttgagcggaaactgcacaaattcttcaagatgaagaagactgtatcgatgcctgttgatcgggatgatggagacacagggactgcattcaagcactgtgctagcttgccgctagttcgatcccagcctcagcttgacagggaaaaggtcaacaagcccgagagggcgagcctggagattccttcaagctcccagatgatctcagagagttgcaagactccaaaagcaaggagcctggtcaagaccccaagttcgatgatgctcctgagctacttgaacaagtcaccgtcaaatcaagggcatagttctcacaaggcttatggatccagaccgagatcgaagtccccccttcctagtattgtgccttccgaagtgtttagggaagcaaagtctagcagccagaggtttgcaagccctcctccacagcgaggaggatctgcaaagagtatatatggcaagtcatttggtaggcaggtctctgatatgggtcaaagtcctagatggcgctcaactccagttgtatctggtaagcacaagtctcaaaaggataatgcttggacaaggaaatacagtggtggaaggagggttagtgcagtgaaccctgctgatgatcgaagggcacagatggttagaatgaaccaggcagtgcagacgacagttgattggacactcgatccgtccaagctgctcgtggggcacaggtttgctagtggagcatatagccggctgtacagggggtactatgatgataatccagttgcgatcaaatttatccgccaacccgatgatgacgacaatgggaagatggctgcaatgcttgagaagcagtataacagtgagatcaattcattatctcacctgtaccacaagaatgtgatcaagcttgtagcagcctacaaatgcccaccagttttttacattattaccgagttccttcctggaggctcaataaggtcatacctaaacaatccagagaaccaccccatccctctagagagaaccatatccatcgctctggatgtcgctcgtggcttggagtacatacattctcaggggatcgttcaccgtgacatcaagcccgagaacattctcttcgacgagaacctctgcgtgaagatcgctgatttcggcattgcctgccaggaggccttatgcgatgtgctcgtggaggacgaaggcacttacaggtggatggcgcccgagatgatcaagcagaaggcgtacaaccgaaaggtcgacgtctacagcttcggactgctcttgtgggagatggtgtccggtagaatcccttacgagaacctgaccccttaccaggtggcttacgcagtagccaacaggaaattgacgccaacaatttccccagaatgtccaccggccctcagatccctgattgaggagtgctgcgccttgcggcctgacaagaggcccgacttctggcagatcgtgaaagtgctggaacagttccactccgttctcttgcagggtggctgcctcgacataccgaagagcggccccggcacctgccaggatcccaagaagcggctcatgcggtggattcagaaactgaagccgaagcatagcgcctgaataactaaactcttatagttgtagcatcgttgcagccgcagtttttgtcaggttgggtatgctcagtagtttagatctcgattcaaggaaccagcgttccaaggatgctcttagctgtgcatccgctgatctgcaatatagatcttacagtacatggttatgcttttgcgtttttgccttctcccttgttgaatttatcatggtaccgtagcatgtgcctctcactcgttgaggtggaagcatcaggaaaagcaaaagggcgtatgcttaatacaattcttgcgcctttccgttctgttattagcagctgccctgccgtgcttacttgtcgtgatgctgatatctgagacagcaacttctggtggctgcttgacttgagctccattatccttgaggtcacaaactatggtattttcagtttttcaccatgtcatgtcgacagtatcattctttttgtcgtgttgagaggtttttctgaatctggtttcgtatccattggtttgcactatggtctctttgacaacgattgttgtacaaacaaaccttagatgcaaacgcgcaaaagcatcccaaactttttagatcgttgaagctgaagccgcttttttagaaggccgttgctttcactcacatagtataatttccgcgggcggcgcatgaactcagctttccgcttccagcgctccaaacagctgaaaatggaggatccccttggtcccagtcactgagcatctcgtcgaaaaggtcagcatatgtacctactacaaagctaccagactaagacttgttctatatgcaccccaacaaggttacaagaacagctgcttcaacaaagctcccaggtctgagatttggtgaaatcacagtgaagaagggtttcagtttcaggctcggcgagcaaacacttcaaccaaagcccacctgatgatacatgactcactctggtcaccgagacactccgccaataaacaaatcacctccccctcaccttcacaccctctgcttctcccaccctgtacatagcatggcatagcatagcatagcgtcccaccacccgaaaccagcacaggaccgaacaaaaggttccaactccaaccgatcttgttggagagcgcctcactgttgcacggcctgataactggagcggctggaagggaagaccgggatggcgccaaaatcggcgggcctcatgccgccctggtgatgtccatggtccctcctcgctctcgacttctccacccgggttcgccggaagacttcttggatttgccggtcgttctcttttagcatctcgtcgacgacgctgcccgaagggcaggtcaggggcccagaatggtggatcttgttgcccttggatccgtagccctgttttgtcaaagccatgaaatggtaggaagttttacttacaatagctccatcagccctaatagtgttcctgtcatccttcttcgggaacacttgatcgtacttcccactgttactgagatgctcattgatggattccgacagcctccgcccatgagaaaatgctccagcttgagcaaccattgtccaactactatcatctgctcggggacctgttctagatgacacaaccacagggtggttcgcaacaccagggacctgaagttcatcatttttgccacctccagcctttgatggctgactctgattaac

SEQ ID NO: 75709 - DNA, 2676 bp, Zea Mays
tacctctcggggtgggcgggttttggtcgatttccttctcaaaaggactcttgggaagccctccctgtacgtgactactgggacctccaccaagctcttcaagttccaggatcagttcctctgtattgggcaatctctagacctctgtagattatcagcctgattcacaacttgttgcaggtgcaagaattcgactgcagattttaatcgtgattgacacgattcctggtttgagggcatctgttggtgtttcgagctaacaggctcctttctccctgctcgaagtttcacttacttcaacatgtggtttctatggatccagacttccaaagttggaatctgatcactcgcgtcagtgcttctcagctcccttgtttgccgttatggaggagcagaactcgtggctcaggaccaagttctccaatactgtctatgctagggtggatccccggagagtacctgttgctccgcttagcaaggatgttgagcggaaactgcacaaattcttcaagatgaagaagactgtatcgatgcctgttgatcgggatgatggagacacagggactgcattcaagcactgtgctagcttgccgctagttcgatcccagcctcagcttgacagggaaaaggtcaacaagcccgagagggcgagcctggagattccttcaagctcccagatgatctcagagagttgcaagactccaaaagcaaggagcctggtcaagaccccaagttcgatgatgctcctgagctacttgaacaagtcaccgtcaaatcaagggcatagttctcacaaggcttatggatccagaccgagatcgaagtccccccttcctagtattgtgccttccgaagtgtttagggaagcaaagtctagcagccagaggtttgcaagccctcctccacagcgaggaggatctgcaaagagtatatatggcaagtcatttggtaggcaggtctctgatatgggtcaaagtcctagatggcgctcaactccagttgtatctggtaagcacaagtctcaaaaggataatgcttggacaaggaaatacagtggtggaaggagggttagtgcagtgaaccctgctgatgatcgaagggcacagatggttagaatgaaccaggcagtgcagacgacagttgattggacactcgatccgtccaagctgctcgtggggcacaggtttgctagtggagcatatagccggctgtacagggggtactatgatgataatccagttgcgatcaaatttatccgccaacccgatgatgacgacaatgggaagatggctgcaatgcttgagaagcagtataacagtgagatcaattcattatctcacctgtaccacaagaatgtgatcaagcttgtagcagcctacaaatgcccaccagttttttacattattaccgagttccttcctggaggctcaataaggtcatacctaaacaatccagagaaccaccccatccctctagagagaaccatatccatcgctctggatgtcgctcgtggcttggagtacatacattctcaggggatcgttcaccgtgacatcaagcccgagaacattctcttcgacgagaacctctgcgtgaagatcgctgatttcggcattgcctgccaggaggccttatgcgatgtgctcgtggaggacgaaggcacttacaggtggatggcgcccgagatgatcaagcagaaggcgtacaaccgaaaggtcgacgtctacagcttcggactgctcttgtgggagatggtgtccggtagaatcccttacgagaacctgaccccttaccaggtggcttacgcagtagccaacaggaaattgacgccaacaatttccccagaatgtccaccggccctcagatccctgattgaggagtgctgcgccttgcggcctgacaagaggcccgacttctggcagatcgtgaaagtgctggaacagttccactccgttctcttgcagggtggctgcctcgacataccgaagagcggccccggcacctgccaggatcccaagaagcggctcatgcggtggattcagaaactgaagccgaagcatagcgcctgaataactaaactcttatagttgtagcatcgttgcagccgcagtttttgtcaggttgggtatgctcagtagtttagatctcgattcaaggaaccagcgttccaaggatgctcttagctgtgcatccgctgatctgcaatatagatcttacagtacatggttatgcttttgcgtttttgccttctcccttgttgaatttatcatggtaccgtagcatgtgcctctcactcgttgaggtggaagcatcaggaaaagcaaaagggcgtatgcttaatacaattcttgcgcctttccgttctgttattagcagctgccctgccgtgcttacttgtcgtgatgctgatatctgagacagcaacttctggtggctgcttgacttgagctccattatccttgaggtcacaaactatggtattttcagtttttcaccatgtcatgtcgacagtatcattctttttgtcgtgttgagaggtttttctgaatctggtttcgtatccattggtttgcactatggtctctttgacaacgattgttgtacaaacaaaccttagatgcaaacgcgcaaaagcatcccaaactttttagatcgttgaagctgaagccgcttttt

SEQ ID NO: 75710 - DNA, 2581 bp, Zea Mays
cttccgtcgtcgtcatcttcttcgtcggagcctcggaggatacgaggggcccctgcgcttcgctacattctcaacgaagcccctctcgcagcgggcagaggccgtacggcggtgcgtaccccaccggcacggggccgcgtttgcagggtgccgccgtactaccacacaaggcgcccttatttttcccttgtgcgcgcccgcaatgcgctcttgagatccccggctcctcctcctcggtctgcttctcctgctccggctgctggccctggccacctacccggagcgggaagagcggcgggagccctgcattttgttccggttctccgcgtgcctcatccgcccgcccgcgatccccgggaggactcttgggaagccctccctgtacgtgactactgggacctccaccaagctcttcaaacttccaaagttggaatctgatcactcgcgtcagtgcttctcagctcccttgtttgccgttatggaggagcagaactcgtggctcaggaccaagttctccaatactgtctatgctagggtggatccccggagagtacctgttgctccgcttagcaaggatgttgagcggaaactgcacaaattcttcaagatgaagaagactgtatcgatgcctgttgatcgggatgatggagacacagggactgcattcaagcactgtgctagcttgccgctagttcgatcccagcctcagcttgacagggaaaaggtcaacaagcccgagagggcgagcctggagattccttcaagctcccagatgatctcagagagttgcaagactccaaaagcaaggagcctggtcaagaccccaagttcgatgatgctcctgagctacttgaacaagtcaccgtcaaatcaagggcatagttctcacaaggcttatggatccagaccgagatcgaagtccccccttcctagtattgtgccttccgaagtgtttagggaagcaaagtctagcagccagaggtttgcaagccctcctccacagcgaggaggatctgcaaagagtatatatggcaagtcatttggtaggcaggtctctgatatgggtcaaagtcctagatggcgctcaactccagttgtatctggtaagcacaagtctcaaaaggataatgcttggacaaggaaatacagtggtggaaggagggttagtgcagtgaaccctgctgatgatcgaagggcacagatggttagaatgaaccaggcagtgcagacgacagttgattggacactcgatccgtccaagctgctcgtggggcacaggtttgctagtggagcatatagccggctgtacagggggtactatgatgataatccagttgcgatcaaatttatccgccaacccgatgatgacgacaatgggaagatggctgcaatgcttgagaagcagtataacagtgagatcaattcattatctcacctgtaccacaagaatgtgatcaagcttgtagcagcctacaaatgcccaccagttttttacattattaccgagttccttcctggaggctcaataaggaggccttatgcgatgtgctcgtggaggacgaaggcacttacaggtggatggcgcccgagatgatcaagcagaaggcgtacaaccgaaaggtcgacgtctacagcttcggactgctcttgtgggagatggtgtccggtagaatcccttacgagaacctgaccccttaccaggtggcttacgcagtagccaacaggaaattgacgccaacaatttccccagaatgtccaccggccctcagatccctgattgaggagtgctgcgccttgcggcctgacaagaggcccgacttctggcagatcgtgaaagtgctggaacagttccactccgttctcttgcagggtggctgcctcgacataccgaagagcggccccggcacctgccaggatcccaagaagcggctcatgcggtggattcagaaactgaagccgaagcatagcgcctgaataactaaactcttatagttgtagcatcgttgcagccgcagtttttgtcaggttgggtatgctcagtagtttagatctcgattcaaggaaccagcgttccaaggatgctcttagctgtgcatccgctgatctgcaatatagatcttacagtacatggttatgcttttgcgtttttgccttctcccttgttgaatttatcatggtaccgtagcatgtgcctctcactcgttgaggtggaagcatcaggaaaagcaaaagggcgtatgcttaatacaattcttgcgcctttccgttctgttattagcagctgccctgccgtgcttacttgtcgtgatgctgatatctgagacagcaacttctggtggctgcttgacttgagctccattatccttgaggtcacaaactatggtattttcagtttttcaccatgtcatgtcgacagtatcattctttttgtcgtgttgagaggtttttctgaatctggtttcgtatccattggtttgcactatggtctctttgacaacgattgttgtacaaacaaaccttagatgcaaacgcgcaaaagcatcccaaactttttagatcgttgaagctgaagccgcttttt

SEQ ID NO: 75711 - DNA, 3191 bp, Zea Mays
ggaaaccataaacctgcggctccatcgaactctgcagccagcctgcgtgcgccgccctagcttccgtcgtcgtcatcttcttcgtcggagcctcggaggatacgaggggcccctgcgcttcgctacattctcaacgaagcccctctcgcagcgggcagaggccgtacggcggtgcgtaccccaccggcacggggccgcgtttgcagggtgccgccgtactaccacacaaggcgcccttatttttcccttgtgcgcgcccgcaatgcgctcttgagatccccggctcctcctcctcggtctgcttctcctgctccggctgctggccctggccacctacccggagcgggaagagcggcgggagccctgcattttgttccggttctccgcgtgcctcatccgcccgcccgcgatccccgggaggactagtgccagcttacctctcggggtgggcgggttttggtcgatttccttctcaaaagattggttttgcttgtggtgggcaagcgcatctatacacactcctcgcttttcgacgccatcgacgcgcaactccgtttgaggactcttgggaagccctccctgtacgtgactactgggacctccaccaagctcttcaagttccaggatcagttcctctgtattgggcaatctctagacctctgtagattatcagcctgattcacaacttgttgcaggtgcaagaattcgactgcagattttaatcgtgattgacacgattcctggtttgagggcatctgttggtgtttcgagctaacaggctcctttctccctgctcgaagtttcacttacttcaacatgtggtttctatggatccagacttccaaagttggaatctgatcactcgcgtcagtgcttctcagctcccttgtttgccgttatggaggagcagaactcgtggctcaggaccaagttctccaatactgtctatgctagggtggatccccggagagtacctgttgctccgcttagcaaggatgttgagcggaaactgcacaaattcttcaagatgaagaagactgtatcgatgcctgttgatcgggatgatggagacacagggactgcattcaagcactgtgctagcttgccgctagttcgatcccagcctcagcttgacagggaaaaggtcaacaagcccgagagggcgagcctggagattccttcaagctcccagatgatctcagagagttgcaagactccaaaagcaaggagcctggtcaagaccccaagttcgatgatgctcctgagctacttgaacaagtcaccgtcaaatcaagggcatagttctcacaaggcttatggatccagaccgagatcgaagtccccccttcctagtattgtgccttccgaagtgtttagggaagcaaagtctagcagccagaggtttgcaagccctcctccacagcgaggaggatctgcaaagagtatatatggcaagtcatttggtaggcaggtctctgatatgggtcaaagtcctagatggcgctcaactccagttgtatctggtaagcacaagtctcaaaaggataatgcttggacaaggaaatacagtggtggaaggagggttagtgcagtgaaccctgctgatgatcgaagggcacagatggttagaatgaaccaggcagtgcagacgacagttgattggacactcgatccgtccaagctgctcgtggggcacaggtttgctagtggagcatatagccggctgtacagggggtactatgatgataatccagttgcgatcaaatttatccgccaacccgatgatgacgacaatgggaagatggctgcaatgcttgagaagcagtataacagtgagatcaattcattatctcacctgtaccacaagaatgtgatcaagcttgtagcagcctacaaatgcccaccagttttttacattattaccgagttccttcctggaggctcaataaggtcatacctaaacaatccagagaaccaccccatccctctagagagaaccatatccatcgctctggatgtcgctcgtggcttggagtacatacattctcaggggatcgttcaccgtgacatcaagcccgagaacattctcttcgacgagaacctctgcgtgaagatcgctgatttcggcattgcctgccaggaggccttatgcgatgtgctcgtggaggacgaaggcacttacaggtggatggcgcccgagatgatcaagcagaaggcgtacaaccgaaaggtcgacgtctacagcttcggactgctcttgtgggagatggtgtccggtagaatcccttacgagaacctgaccccttaccaggtggcttacgcagtagccaacaggaaattgacgccaacaatttccccagaatgtccaccggccctcagatccctgattgaggagtgctgcgccttgcggcctgacaagaggcccgacttctggcagatcgtgaaagtgctggaacagttccactccgttctcttgcagggtggctgcctcgacataccgaagagcggccccggcacctgccaggatcccaagaagcggctcatgcggtggattcagaaactgaagccgaagcatagcgcctgaataactaaactcttatagttgtagcatcgttgcagccgcagtttttgtcaggttgggtatgctcagtagtttagatctcgattcaaggaaccagcgttccaaggatgctcttagctgtgcatccgctgatctgcaatatagatcttacagtacatggttatgcttttgcgtttttgccttctcccttgttgaatttatcatggtaccgtagcatgtgcctctcactcgttgaggtggaagcatcaggaaaagcaaaagggcgtatgcttaatacaattcttgcgcctttccgttctgttattagcagctgccctgccgtgcttacttgtcgtgatgctgatatctgagacagcaacttctggtggctgcttgacttgagctccattatccttgaggtcacaaactatggtattttcagtttttcaccatgtcatgtcgacagtatcattctttttgtcgtgttgagaggtttttctgaatctggtttcgtatccattggtttgcactatggtctctttgacaacgattgttgtacaaacaaaccttagatgcaaacgcgcaaaagcatcccaaactttttagatcgttgaagctgaagccgcttttt

SEQ ID NO: 75712 - DNA, 951 bp, Zea Mays
caccatacaatcagataaagcattagcgggcttgccacagtggccttggccgtagcagcagcacgccacgagcagcgacgccagagaagagggagttccaaatggcgattacaatgaagatcagacgacaaaagacatgagcgagtattagtgtccaataaactaggtgctggaaatccacatgcagcacacctatcagtttatgtttcagggcttattggctgctccgccgaggtcatgcaatggccctactgggagctcgacgagatggacgacacactcacctacagaggggagctagggattttgcagctcctactagagaatggcattagagtaaatgaactaacaaggatagaggttgctctcgtcgtcccataagtgaagctcgagtcgtccactggtggcttatcttctctgcctggtgagagctggcactaccgtttggtgtcgtgaccttgctgatgcttgttcgcctagtgaagagtttggggcatattcagttttacagagtttgggccatcacccatcaggctggagctttatagagttaatgaacacgaagttgagttcaacatgcaatttctgccgtgctcttcactaaccaccacacatgcacattgacatgatgtaaacaaagaaccgattttgttggatttgattgtgtattatgtgctgtaaatatctgttttatatgattgtcctgccacctgggctgctgtaatttgatggatatggtaatttttatgataaaatatggacatggtataaagattcatttttaatctggcgccttactaattgctgtcaggctgccccaacataaacttgtgatatggtgttgtgtttgtttgctgctttcaagttgatctgcagttatgttttcagtagctagcaacttcagaggttatggcaacagagaggtcatggcactaggtgggcgccggctct

SEQ ID NO: 75713 - DNA, 895 bp, Zea Mays
ctgaaggccccaccatacaatcagataaagcattagcgggcttgccacagtggccttggccgtagcagcagcacgccacgagcagcgacgccagagaagagggagttccaaatggcgattacaatgaagatcagacgacaaaagacatgagcgagggcttattggctgctccgccgaggtcatgcaatggccctactgggagctcgacgagatggacgacacactcacctacagaggggagctagggattttgcagctcctactagagaatggcattagagtaaatgaactaacaaggatagaggttgctctcgtcgtcccataagtgaagctcgagtcgtccactggtggcttatcttctctgcctggtgagagctggcactaccgtttggtgtcgtgaccttgctgatgcttgttcgcctagtgaagagtttggggcatattcagttttacagagtttgggccatcacccatcaggctggagctttatagagttaatgaacacgaagttgagttcaacatgcaatttctgccgtgctcttcactaaccaccacacatgcacattgacatgatgtaaacaaagaaccgattttgttggatttgattgtgtattatgtgctgtaaatatctgttttatatgattgtcctgccacctgggctgctgtaatttgatggatatggtaatttttatgataaaatatggacatggtataaagattcatttttaatctggcgccttactaattgctgtcaggctgccccaacataaacttgtgatatggtgttgtgtttgtttgctgctttcaagttgatctgcagttatgttttcagtagctagcaacttcagaggttatggcaacagagaggtcatggcactaggtgggcgccggctct

SEQ ID NO: 75714 - DNA, 2636 bp, Zea Mays
ctgaaggccccaccatacaatcagataaagcattagcgggcttgccacagtggccttggccgtagcagcagcacgccacgagcagcgacgccagagaagagggagttccaaatggcgattacaatgaagatcagacgacaaaagacatgagcgagtattagtgtccaataaactaggtgctggaaatccacatgcagcacacctatcagtttatgtttcagggcttattggctgctccgccgaggtcatgcaatggccctactgggagctcgacgagatggacgacacactcacctacagaggggagctagggtgtgttgtgcatgcctgcgagctgtagagaagagggggcagtctggatccgaaccctcagcaaggattttgcagctcctactagagaatggcattagagtaaatgaactaacaaggatagaggttgctctcgtcgtcccataagtggtgcagaaaatggcacccaattactgccctcgaggtgttgttagacttaatgggtcactacgcgaacagtcagtgtagttctatgcatgcatctacaataacaggttagtagtagtgtatttgtgcatggaccccatgttttccttttcattgaaaattgaaagcttgttctttttttactggaagatatggtctcttttgacaccatgaaatgtcgtagattgtctctcacctctgctttgcttcagtacctgtcttttttcccatgtccctaaattataagctatgtgtggtgtgagctgtgcctgcttccaacacttgggttaggttcagtgtcaagtatgtagattatacttaagcacacgacatgttcttcctctcctcatcgcaatatgttgattggattagatttcattttggcatatttttataatatttgtcttgctggcaacaccatctggaaccctttcgtgaaccagcatgagtggacaacactggtgggtagccacatgcacaaaaaaggaaaaaatggtctttttccttcatgatttaattattgtgccttcacatacatagggttgaaattgtcctccattaaaactcttttggtatacatgcatactgagaagttgtcatattttctataattttataactactaattatcgaataatgtcttagggaccgtctgtttcccttcactttgagaattgaaatctaagtaatggaataggctatctttttaaaatgtgacattccataactacctgcattctttatttgaccgacaatcttataaaagtgtatgtagatatgtatgtagatgtttatgtagatgtggatgcattcttctatacgagctcccctctagcatgtaacttgtgtaaaacctcaagatagtgagttatattttgtcttgattattgtacagggctacatgcatgttgtttcattactaagagagaggaaacatagcagtagcacacaagtttttcttgattattggtatattcagatcagtgctatattgctaagtttttttattattggtatactcagatcagcacttaaaagaatcacagacttaaatcacattgtagagagttatattcagatctgcacttgcttttttcatgcaatgtactcatagcagtagcacttaaatcatttcagtgactcattccatgacttaaatatatatttttagattacttctcgtttcttgctacatgtttacgcgctagctgtttaagtgcatctggtcgaccttctttttatgaagtgcttttcattgactgcttttgtgttacctgtttacgcgctagctgtttaagttgcacaggcgcgagacaaatggggtcgtagcgccatcgttttgttgtcgcgtggtcatgatattccatcggcgaacatcgacaactctgccacgcacatgagtatttgtgttcaacctttaatggtggatctgtttttttagaaatgtgtcaagagagttgagaatgatgatactggtcaccaaaactgcattgggtaatattttgattactggtcatgcatcgacaaatgtgtagcaccaaagctctttaagaagctcaaatcatttatgcgataagctcgagtcgtccactggtggcttatcttctctgcctggtgagagctggcactaccgtttggtgtcgtgaccttgctgatgcttgttcgcctagtgaagagtttggggcatattcagttttacagagtttgggccatcacccatcaggctggagctttatagagttaatgaacacgaagttgagttcaacatgcaatttctgccgtgctcttcactaaccaccacacatgcacattgacatgatgtaaacaaagaaccgattttgttggatttgattgtgtattatgtgctgtaaatatctgttttatatgattgtcctgccacctgggctgctgtaatttgatggatatggtaatttttatgataaaatatggacatggtataaagattcatttttaatctggcgccttactaattgctgtcaggctgccccaacataaacttgtgatatggtgttgtgtttgtttgctgctttcaagttgatctgcagttatgttttcagtagctagcaacttcagaggttatggcaacagagaggtcatggcactaggtgggcgccggctct

SEQ ID NO: 75715 - DNA, 1130 bp, Zea Mays
ctgaaggccccaccatacaatcagataaagcattagcgggcttgccacagtggccttggccgtagcagcagcacgccacgagcagcgacgccagagaagagggagttccaaatggcgattacaatgaagatcagacgacaaaagacatgagcgagtattagtgtccaataaactaggtgctggaaatccacatgcagcacacctatcagtttatgtttcagggcttattggctgctccgccgaggtcatgcaatggccctactgggagctcgacgagatggacgacacactcacctacagaggggagctagggtgtgttgtgcatgcctgcgagctgtagagaagagggggcagtctggatccgaaccctcagcaaggattttgcagctcctactagagaatggcattagagtaaatgaactaacaaggatagaggttgctctcgtcgtcccataagtggtgcagaaaatggcacccaattactgccctcgaggtgttgttagacttaatgggtcactacgcgaacagtcagtgtagttctatgcatgcatctacaataacagaagctcgagtcgtccactggtggcttatcttctctgcctggtgagagctggcactaccgtttggtgtcgtgaccttgctgatgcttgttcgcctagtgaagagtttggggcatattcagttttacagagtttgggccatcacccatcaggctggagctttatagagttaatgaacacgaagttgagttcaacatgcaatttctgccgtgctcttcactaaccaccacacatgcacattgacatgatgtaaacaaagaaccgattttgttggatttgattgtgtattatgtgctgtaaatatctgttttatatgattgtcctgccacctgggctgctgtaatttgatggatatggtaatttttatgataaaatatggacatggtataaagattcatttttaatctggcgccttactaattgctgtcaggctgccccaacataaacttgtgatatggtgttgtgtttgtttgctgctttcaagttgatctgcagttatgttttcagtagctagcaacttcagaggttatggcaacagagaggtcatggcactaggtgggcgccggctct

SEQ ID NO: 75716 - DNA, 2575 bp, Zea Mays
atgactgaaggccccaccatacaatcagataaagcattagcgggcttgccacagtggccttggccgtagcagcagcacgccacgagcagcgacgccagagaagagggagttccaaatggcgattacaatgaagatcagacgacaaaagacatgagcgagtattagtgtccaataaactaggtgctggaaatccacatgcagcacacctatcagtttatgtttcagggcttattggctgctccgccgaggtcatgcaatggccctactgggagctcgacgagatggacgacacactcacctacagaggggagctagggattttgcagctcctactagagaatggcattagagtaaatgaactaacaaggatagaggttgctctcgtcgtcccataagtggtgcagaaaatggcacccaattactgccctcgaggtgttgttagacttaatgggtcactacgcgaacagtcagtgtagttctatgcatgcatctacaataacaggttagtagtagtgtatttgtgcatggaccccatgttttccttttcattgaaaattgaaagcttgttctttttttactggaagatatggtctcttttgacaccatgaaatgtcgtagattgtctctcacctctgctttgcttcagtacctgtcttttttcccatgtccctaaattataagctatgtgtggtgtgagctgtgcctgcttccaacacttgggttaggttcagtgtcaagtatgtagattatacttaagcacacgacatgttcttcctctcctcatcgcaatatgttgattggattagatttcattttggcatatttttataatatttgtcttgctggcaacaccatctggaaccctttcgtgaaccagcatgagtggacaacactggtgggtagccacatgcacaaaaaaggaaaaaatggtctttttccttcatgatttaattattgtgccttcacatacatagggttgaaattgtcctccattaaaactcttttggtatacatgcatactgagaagttgtcatattttctataattttataactactaattatcgaataatgtcttagggaccgtctgtttcccttcactttgagaattgaaatctaagtaatggaataggctatctttttaaaatgtgacattccataactacctgcattctttatttgaccgacaatcttataaaagtgtatgtagatatgtatgtagatgtttatgtagatgtggatgcattcttctatacgagctcccctctagcatgtaacttgtgtaaaacctcaagatagtgagttatattttgtcttgattattgtacagggctacatgcatgttgtttcattactaagagagaggaaacatagcagtagcacacaagtttttcttgattattggtatattcagatcagtgctatattgctaagtttttttattattggtatactcagatcagcacttaaaagaatcacagacttaaatcacattgtagagagttatattcagatctgcacttgcttttttcatgcaatgtactcatagcagtagcacttaaatcatttcagtgactcattccatgacttaaatatatatttttagattacttctcgtttcttgctacatgtttacgcgctagctgtttaagtgcatctggtcgaccttctttttatgaagtgcttttcattgactgcttttgtgttacctgtttacgcgctagctgtttaagttgcacaggcgcgagacaaatggggtcgtagcgccatcgttttgttgtcgcgtggtcatgatattccatcggcgaacatcgacaactctgccacgcacatgagtatttgtgttcaacctttaatggtggatctgtttttttagaaatgtgtcaagagagttgagaatgatgatactggtcaccaaaactgcattgggtaatattttgattactggtcatgcatcgacaaatgtgtagcaccaaagctctttaagaagctcaaatcatttatgcgataagctcgagtcgtccactggtggcttatcttctctgcctggtgagagctggcactaccgtttggtgtcgtgaccttgctgatgcttgttcgcctagtgaagagtttggggcatattcagttttacagagtttgggccatcacccatcaggctggagctttatagagttaatgaacacgaagttgagttcaacatgcaatttctgccgtgctcttcactaaccaccacacatgcacattgacatgatgtaaacaaagaaccgattttgttggatttgattgtgtattatgtgctgtaaatatctgttttatatgattgtcctgccacctgggctgctgtaatttgatggatatggtaatttttatgataaaatatggacatggtataaagattcatttttaatctggcgccttactaattgctgtcaggctgccccaacataaacttgtgatatggtgttgtgtttgtttgctgctttcaagttgatctgcagttatgttttcagtagctagcaacttcagaggttatggcaacagagaggtcatggcactaggtgggcgccggctct

SEQ ID NO: 75717 - DNA, 1037 bp, Zea Mays
ttccgctatgactgaaggccccaccatacaatcagataaagcattagcgggcttgccacagtggccttggccgtagcagcagcacgccacgagcagcgacgccagagaagagggagttccaaatggcgattacaatgaagatcagacgacaaaagacatgagcgagtattagtgtccaataaactaggtgctggaaatccacatgcagcacacctatcagtttatgtttcagggcttattggctgctccgccgaggtcatgcaatggccctactgggagctcgacgagatggacgacacactcacctacagaggggagctagggtgtgttgtgcatgcctgcgagctgtagagaagagggggcagtctggatccgaaccctcagcaaggattttgcagctcctactagagaatggcattagagtaaatgaactaacaaggatagaggttgctctcgtcgtcccataagtgaagctcgagtcgtccactggtggcttatcttctctgcctggtgagagctggcactaccgtttggtgtcgtgaccttgctgatgcttgttcgcctagtgaagagtttggggcatattcagttttacagagtttgggccatcacccatcaggctggagctttatagagttaatgaacacgaagttgagttcaacatgcaatttctgccgtgctcttcactaaccaccacacatgcacattgacatgatgtaaacaaagaaccgattttgttggatttgattgtgtattatgtgctgtaaatatctgttttatatgattgtcctgccacctgggctgctgtaatttgatggatatggtaatttttatgataaaatatggacatggtataaagattcatttttaatctggcgccttactaattgctgtcaggctgccccaacataaacttgtgatatggtgttgtgtttgtttgctgctttcaagttgatctgcagttatgttttcagtagctagcaacttcagaggttatggcaacagagaggtcatggcactaggtgggcgccggctct

SEQ ID NO: 75718 - DNA, 1213 bp, Zea Mays
ttccgctatgactgaaggccccaccatacaatcagataaagcattagcgggcttgccacagtggccttggccgtagcagcagcacgccacgagcagcgacgccagagaagagggagttccaaatggcgattacaatgaagatcagacgacaaaagacatgagcgagtattagtgtccaataaactaggtgctggaaatccacatgcagcacacctatcagtttatgtttcagggcttattggctgctccgccgaggtcatgcaatggccctactgggagctcgacgagatggacgacacactcacctacagaggggagctagggattttgcagctcctactagagaatggcattagagtaaatgaactaacaaggatagaggttgctctcgtcgtcccataagtggtgcagaaaatggcacccaattactgccctcgaggtgttgttagacttaatgggtcactacgcgaacagtcagtgtagttctatgcatgcatctacaataacagaaatgtgtcaagagagttgagaatgatgatactggtcaccaaaactgcattgggtaatattttgattactggtcatgcatcgacaaatgtgtaagtagcaccaaagctctttaagaagctcaaatcatttatgcgataagctcgagtcgtccactggtggcttatcttctctgcctggtgagagctggcactaccgtttggtgtcgtgaccttgctgatgcttgttcgcctagtgaagagtttggggcatattcagttttacagagtttgggccatcacccatcaggctggagctttatagagttaatgaacacgaagttgagttcaacatgcaatttctgccgtgctcttcactaaccaccacacatgcacattgacatgatgtaaacaaagaaccgattttgttggatttgattgtgtattatgtgctgtaaatatctgttttatatgattgtcctgccacctgggctgctgtaatttgatggatatggtaatttttatgataaaatatggacatggtataaagattcatttttaatctggcgccttactaattgctgtcaggctgccccaacataaacttgtgatatggtgttgtgtttgtttgctgctttcaagttgatctgcagttatgttttcagtagctagcaacttcagaggttatggcaacagagaggtcatggcactaggtgggcgccggctct

SEQ ID NO: 75719 - DNA, 2891 bp, Zea Mays
gccgccgcaccgagccctccgcccccgtccgtctcgccgtgacgcgcgcggctcgcgataacttccaccagataactcccacgtcctacccgcgctcgttcattgctttcacgaggccaaggccgccgacgcccccgaggtcgtggtttaggggtcccctccccgccgccgagtacatcgagtccatggacagggccaacgccgcaaccacagggcccaccgccgagtccgcgcgggcggggcgcacgactccatggacagggctacctccccgttcgagggcgactcgccaatgttgcagtcgcaggccccgccgtcaagtccaccgagcggggcgcacgactccatggacagggccacctcgccgaggagcggctccgccacaggccgatccgacgccgcagccgtaggcccccgccgccaagtgtgccgagcggggcgcacatccctcgacgtcgccttcttcgacgacctctcgtcgagttcacgacgccaagaaggtcgtgcccgacgacaagcttgctcaacgcaccgggcgcgcgctccatagtaccagcgtgatgtcgcaccgccatccacgctcgacgcatccagctcctttggcgtcatctaggtgctcctctgcccgatcccggaggttcaaaacacctcacctcaatccaatgttaacaagcttggaggacatcaccaacgcaccatatgcagatcttctctctattaattcaatgaggaaaggaaaggggacttagaaattagtcttggcaaatggaggggaacgtctcaatgaccgaggcacattttttcttgttagttagctcatggtatgttaaaaggtaaggacctcaatccaatgaccagaatgtgtccatctttaaaaggtaaggaattggttaggcttcatattgtctctcttttgattggtatgttacatgattcttctccaaaaacaaatgcataatcatgtgtttaacaacattcttgtttatccttgtcttcgaaaaaacagaacgtactaattttggccgacaccaagatcacttattggaataactttacttatgatcagtagcattacctttttttgatgtacaatatattggatgatcagtagcatgtgagcagtttctaataaaaaggaagctgcaatgataacttacgttcctaatatgacacattgtgttttttaacttatcacacttgttgttatgtgcgagttgtagagaattcaaactgagcagaaatccatgtattgctggccacacaggggagggactcatcctccatctcccctcgccaccgcgccaggcgtgatgcttcgtctcctccccccaggaagccattgtagatggcactgtcggccaagggcaaggaggtctgccacaggtcctgtgacgtcctcgacatcaacgccgatgagtggggcaacgagaataggagcatgaccaccgagctcagggagcagcagtaccggctcaggaaggcactggaagaccgggtgcaagtcagtagggagaccgccaagatgtggcgatgggacaagctccatcagatatggattggaggaccttacaaaacccaacaagctcaattcaaaattcaagaggaacagcagcacgccacgagcagcgacgccagagaagagggagttccaaatggcgattacaatgaagatcagacgacaaaagacatgagcgagtattagtgtccaataaactaggtgctggaaatccacatgcagcacacctatcagtttatgtttcagggcttattggctgctccgccgaggtcatgcaatggccctactgggagctcgacgagatggacgacacactcacctacagaggggagctagggattttgcagctcctactagagaatggcattagagtaaatgaactaacaaggatagaggttgctctcgtcgtcccataagtggtgcagaaaatggcacccaattactgccctcgaggtgttgttagacttaatgggtcactacgcgaacagtcagtgtagttctatgcatgcatctacaataacagctgtttaagttgcacaggcgcgagacaaatggggtcgtagcgccatcgttttgttgtcgcgtggtcatgatattccatcggcgaacatcgacaactctgccacgcacatgagtatttgtgttcaacctttaatggtggatctgtttttttagaaatgtgtcaagagagttgagaatgatgatactggtcaccaaaactgcattgggtaatattttgattactggtcatgcatcgacaaatgtgtagcaccaaagctctttaagaagctcaaatcatttatgcgataagctcgagtcgtccactggtggcttatcttctctgcctggtgagagctggcactaccgtttggtgtcgtgaccttgctgatgcttgttcgcctagtgaagagtttggggcatattcagttttacagagtttgggccatcacccatcaggctggagctttatagagttaatgaacacgaagttgagttcaacatgcaatttctgccgtgctcttcactaaccaccacacatgcacattgacatgatgtaaacaaagaaccgattttgttggatttgattgtgtattatgtgctgtaaatatctgttttatatgattgtcctgccacctgggctgctgtaatttgatggatatggtaatttttatgataaaatatggacatggtataaagattcatttttaatctggcgccttactaattgctgtcaggctgccccaacataaacttgtgatatggtgttgtgtttgtttgctgctttcaagttgatctgcagttatgttttcagtagctagcaacttcagaggttatggcaacagagaggtcatggcactaggtgggcgccggctct

SEQ ID NO: 75720 - DNA, 2502 bp, Zea Mays
gccgccgcaccgagccctccgcccccgtccgtctcgccgtgacgcgcgcggctcgcgataacttccaccagataactcccacgtcctacccgcgctcgttcattgctttcacgaggccaaggccgccgacgcccccgaggtcgtggtttaggggtcccctccccgccgccgagtacatcgagtccatggacagggccaacgccgcaaccacagggcccaccgccgagtccgcgcgggcggggcgcacgactccatggacagggctacctccccgttcgagggcgactcgccaatgttgcagtcgcaggccccgccgtcaagtccaccgagcggggcgcacgactccatggacagggccacctcgccgaggagcggctccgccacaggccgatccgacgccgcagccgtaggcccccgccgccaagtgtgccgagcggggcgcacatccctcgacgtcgccttcttcgacgacctctcgtcgagttcacgacgccaagaaggtcgtgcccgacgacaagcttgctcaacgcaccgggcgcgcgctccatagtaccagcgtgatgtcgcaccgccatccacgctcgacgcatccagctcctttggcgtcatctaggtgctcctctgcccgatcccggaggttcaaaacacctcacctcaatccaatgttaacaagcttggaggacatcaccaacgcaccatatgcagatcttctctctattaattcaatgaggaaaggaaaggggacttagaaattagtcttggcaaatggaggggaacgtctcaatgaccgaggcacattttttcttgttagttagctcatggtatgttaaaaggtaaggacctcaatccaatgaccagaatgtgtccatctttaaaaggtaaggaattggttaggcttcatattgtctctcttttgattggtatgttacatgattcttctccaaaaacaaatgcataatcatgtgtttaacaacattcttgtttatccttgtcttcgaaaaaacagaacgtactaattttggccgacaccaagatcacttattggaataactttacttatgatcagtagcattacctttttttgatgtacaatatattggatgatcagtagcatgtgagcagtttctaataaaaaggaagctgcaatgataacttacgttcctaatatgacacattgtgttttttaacttatcacacttgttgttatgtgcgagttgtagagaattcaaactgagcagaaatccatgtattgctggccacacaggggagggactcatcctccatctcccctcgccaccgcgccaggcgtgatgcttcgtctcctccccccaggaagccattgtagatggcactgtcggccaagggcaaggaggtctgccacaggtcctgtgacgtcctcgacatcaacgccgatgagtggggcaacgagaataggagcatgaccaccgagctcagggagcagcagtaccggctcaggaaggcactggaagaccgggtgcaagtcagtagggagaccgccaagatgtggcgatgggacaagctccatcagatatggattggaggaccttacaaaacccaacaagctcaattcaaaattcaagaggaacagcagcacgccacgagcagcgacgccagagaagagggagttccaaatggcgattacaatgaagatcagacgacaaaagacatgagcgagtattagtgtccaataaactaggtgctggaaatccacatgcagcacacctatcagtttatgtttcagggcttattggctgctccgccgaggtcatgcaatggccctactgggagctcgacgagatggacgacacactcacctacagaggggagctagggattttgcagctcctactagagaatggcattagagtaaatgaactaacaaggatagaggttgctctcgtcgtcccataagtgaagctcgagtcgtccactggtggcttatcttctctgcctggtgagagctggcactaccgtttggtgtcgtgaccttgctgatgcttgttcgcctagtgaagagtttggggcatattcagttttacagagtttgggccatcacccatcaggctggagctttatagagttaatgaacacgaagttgagttcaacatgcaatttctgccgtgctcttcactaaccaccacacatgcacattgacatgatgtaaacaaagaaccgattttgttggatttgattgtgtattatgtgctgtaaatatctgttttatatgattgtcctgccacctgggctgctgtaatttgatggatatggtaatttttatgataaaatatggacatggtataaagattcatttttaatctggcgccttactaattgctgtcaggctgccccaacataaacttgtgatatggtgttgtgtttgtttgctgctttcaagttgatctgcagttatgttttcagtagctagcaacttcagaggttatggcaacagagaggtcatggcactaggtgggcgccggctct

SEQ ID NO: 75721 - DNA, 2866 bp, Zea Mays
gccgccgcaccgagccctccgcccccgtccgtctcgccgtgacgcgcgcggctcgcgataacttccaccagataactcccacgtcctacccgcgctcgttcattgctttcacgaggccaaggccgccgacgcccccgaggtcgtggtttaggggtcccctccccgccgccgagtacatcgagtccatggacagggccaacgccgcaaccacagggcccaccgccgagtccgcgcgggcggggcgcacgactccatggacagggctacctccccgttcgagggcgactcgccaatgttgcagtcgcaggccccgccgtcaagtccaccgagcggggcgcacgactccatggacagggccacctcgccgaggagcggctccgccacaggccgatccgacgccgcagccgtaggcccccgccgccaagtgtgccgagcggggcgcacatccctcgacgtcgccttcttcgacgacctctcgtcgagttcacgacgccaagaaggtcgtgcccgacgacaagcttgctcaacgcaccgggcgcgcgctccatagtaccagcgtgatgtcgcaccgccatccacgctcgacgcatccagctcctttggcgtcatctaggtgctcctctgcccgatcccggaggttcaaaacacctcacctcaatccaatgttaacaagcttggaggacatcaccaacgcaccatatgcagatcttctctctattaattcaatgaggaaaggaaaggggacttagaaattagtcttggcaaatggaggggaacgtctcaatgaccgaggcacattttttcttgttagttagctcatggtatgttaaaaggtaaggacctcaatccaatgaccagaatgtgtccatctttaaaaggtaaggaattggttaggcttcatattgtctctcttttgattggtatgttacatgattcttctccaaaaacaaatgcataatcatgtgtttaacaacattcttgtttatccttgtcttcgaaaaaacagaacgtactaattttggccgacaccaagatcacttattggaataactttacttatgatcagtagcattacctttttttgatgtacaatatattggatgatcagtagcatgtgagcagtttctaataaaaaggaagctgcaatgataacttacgttcctaatatgacacattgtgttttttaacttatcacacttgttgttatgtgcgagttgtagagaattcaaactgagcagaaatccatgtattgctggccacacaggtaatctatttccaacccttgccaattgccattgccattgtaatatttttttacggcagtactaggaattattgcattgggagactgctctgctagaggaaggttggggctcactaaatcctctttggtctgatgcgaaacaaggggagggactcatcctccatctcccctcgccaccgcgccaggcgtgatgcttcgtctcctccccccaggaagccattgtagatggcactgtcggccaagggcaaggaggtctgccacaggtcctgtgacgtcctcgacatcaacgccgatgagtggggcaacgagaataggagcatgaccaccgagctcagggagcagcagtaccggctcaggaaggcactggaagaccgggtgcaagtcagtagggagaccgccaagatgtggcgatgggacaagctccatcagatatggattggaggaccttacaaaacccaacaagctcaattcaaaattcaagaggaacagcagcacgccacgagcagcgacgccagagaagagggagttccaaatggcgattacaatgaagatcagacgacaaaagacatgagcgaggtgctggaaatccacatgcagcacacctatcagtttatgtttcagctagggcttattggctgctccgccgaggtcatgcaatggccctactgggagctcgacgagatggacgacacactcacctacagaggggagctagggattttgcagctcctactagagaatggcattagagtaaatgaactaacaaggatagaggttgctctcgtcgtcccataagtggtgcagaaaatggcacccaattactgccctcgaggtgttgttagacttaatgggtcactacgcgaacagtcagtgtagttctatgcatgcatctacaataacagaaatgtgtcaagagagttgagaatgatgatactggtcaccaaaactgcattgggtaatattttgattactggtcatgcatcgacaaatgtgtagcaccaaagctctttaagaagctcaaatcatttatgcgataagctcgagtcgtccactggtggcttatcttctctgcctggtgagagctggcactaccgtttggtgtcgtgaccttgctgatgcttgttcgcctagtgaagagtttggggcatattcagttttacagagtttgggccatcacccatcaggctggagctttatagagttaatgaacacgaagttgagttcaacatgcaatttctgccgtgctcttcactaaccaccacacatgcacattgacatgatgtaaacaaagaaccgattttgttggatttgattgtgtattatgtgctgtaaatatctgttttatatgattgtcctgccacctgggctgctgtaatttgatggatatggtaatttttatgataaaatatggacatggtataaagattcatttttaatctggcgccttactaattgctgtcaggctgccccaacataaacttgtgatatggtgttgtgtttgtttgctgctttcaagttgatctgcagttatgttttcagtagctagcaacttcagaggttatggcaacagagaggtcatggcactaggtgggcgccggctct

SEQ ID NO: 75722 - DNA, 2910 bp, Zea Mays
cggggcgcacatccctcgacgtcgccttcttcgacgacctctcgtcgagttcacgacgccaagaaggtcgtgcccgacgacaagcttgctcaacgcaccgggcgcgcgctccatagtaccagcgtgatgtcgcaccgccatccacgctcgacgcatccagctcctttggcgtcatctaggttcaaaacacctcacctcaatccaatgttaacaagcttggaggacatcaccaacgcaccatatgcagatcttctctctattaattcaatgaggaaaggaaaggggacttagaaattagtcttggcaaatggaggggaacgtctcaatgaccgaggcacattttttcttgttagttagctcatggtatgttaaaaggtaaggacctcaatccaatgaccagaatgtgtccatctttaaaaggtaaggaattggttaggcttcatattgtctctcttttgattggtatgttacatgattcttctccaaaaacaaatgcataatcatgtgtttaacaacattcttgtttatccttgtcttcgaaaaaacagaacgtactaattttggccgacaccaagatcacttattggaataactttacttatgatcagtagcattacctttttttgatgtacaatatattggatgatcagtagcatgtgagcagtttctaataaaaaggaagctgcaatgataacttacgttcctaatatgacacattgtgttttttaacttatcacacttgttgttatgtgcgagttgtagagaattcaaactgagcagaaatccatgtattgctggccacacaggtaatctatttccaacccttgccaattgccattgccattgtaatatttttttacggcagtactaggaattattgcattgggagactgctctgctagaggaaggttggggctcactaaatcctctttggtctgatgcgaaacaaggggagggactcatcctccatctcccctcgccaccgcgccaggcgtgatgcttcgtctcctccccccaggaagccattgtagatggcactgtcggccaagggcaaggaggtctgccacaggtcctgtgacgtcctcgacatcaacgccgatgagtggggcaacgagaataggagcatgaccaccgagctcagggagcagcagtaccggctcaggaaggcactggaagaccgggtgcaagtcagtagggagaccgccaagatgtggcgatgggacaagctccatcagatatggattggaggaccttacaaaacccaacaagctcaattcaaaattcaagaggaacagcagcacgccacgagcagcgacgccagagaagagggagttccaaatggcgattacaatgaagatcagacgacaaaagacatgagcgaggtgctggaaatccacatgcagcacacctatcagtttatgtttcagctagggcttattggctgctccgccgaggtcatgcaatggccctactgggagctcgacgagatggacgacacactcacctacagaggggagctagggattttgcagctcctactagagaatggcattagagtaaatgaactaacaaggatagaggttgctctcgtcgtcccataagtggtgcagaaaatggcacccaattactgccctcgaggtgttgttagacttaatgggtcactacgcgaacagtcagtgtagttctatgcatgcatctacaataacaggttagtagtagtgtatttgtgcatggaccccatgttttccttttcattgaaaattgaaagcttgttctttttttactggaagatatggtctcttttgacaccatgaaatgtcgtagattgtctctcacctctgctttgcttcagtacctgtcttttttcccatgtccctaaattataagctatgtgtggtgtgagctgtgcctgcttccaacacttgggttaggttcagtgtcaagtatgtagattatacttaagcacacgacatgttcttcctctcctcatcgcaatatgttgattggattagatttcattttggcatatttttataatatttgtcttgctggcaacaccatctggaaccctttcgtgaaccagcatgagtggacaacactggtgggtagccacatgcacaaaaaaggaaaaaatggtctttttccttcatgatttaattattgtgccttcacatacatagggttgaaattgtcctccattaaaactcttttggtatacatgcatactgagaagttgtcatattttctataattttataactactaattatcgaataatgtcttagggaccgtctgtttcccttcactttgagaattgaaatctaagtaatggaataggctatctttttaaaatgtgacattccataactacctgcattctttatttgaccgacaatcttataaaagtgtatgtagatatgtatgtagatgtttatgtagatgtggatgcattcttctatacgagctcccctctagcatgtaacttgtgtaaaacctcaagatagtgagttatattttgtcttgattattgtacagggctacatgcatgttgtttcattactaagagagaggaaacatagcagtagcacacaagtttttcttgattattggtatattcagatcagtgctatattgctaagtttttttattattggtatactcagatcagcacttaaaagaatcacagacttaaatcacattgtagagagttatattcagatctgcacttgcttttttcatgcaatgtactcatagcagtagcacttaaatcatttcagtgactcattccatgacttaaatatatatttttagattacttctcgtttcttgctacatgtttacgcgctagctgtttaagtgcatctggtcgaccttctttttatgaagtgcttttcattgactgcttttgtg

SEQ ID NO: 75723 - DNA, 3175 bp, Zea Mays
gccgccgcaccgagccctccgcccccgtccgtctcgccgtgacgcgcgcggctcgcgataacttccaccagataactcccacgtcctacccgcgctcgttcattgctttcacgaggccaaggccgccgacgcccccgaggtcgtggtttaggggtcccctccccgccgccgagtacatcgagtccatggacagggccaacgccgcaaccacagggcccaccgccgagtccgcgcgggcggggcgcacgactccatggacagggctacctccccgttcgagggcgactcgccaatgttgcagtcgcaggccccgccgtcaagtccaccgagcggggcgcacgactccatggacagggccacctcgccgaggagcggctccgccacaggccgatccgacgccgcagccgtaggcccccgccgccaagtgtgccgagcggggcgcacatccctcgacgtcgccttcttcgacgacctctcgtcgagttcacgacgccaagaaggtcgtgcccgacgacaagcttgctcaacgcaccgggcgcgcgctccatagtaccagcgtgatgtcgcaccgccatccacgctcgacgcatccagctcctttggcgtcatctaggtgctcctctgcccgatcccggaggttcaaaacacctcacctcaatccaatgttaacaagcttggaggacatcaccaacgcaccatatgcagatcttctctctattaattcaatgaggaaaggaaaggggacttagaaattagtcttggcaaatggaggggaacgtctcaatgaccgaggcacattttttcttgttagttagctcatggtatgttaaaaggtaaggacctcaatccaatgaccagaatgtgtccatctttaaaaggtaaggaattggttaggcttcatattgtctctcttttgattggtatgttacatgattcttctccaaaaacaaatgcataatcatgtgtttaacaacattcttgtttatccttgtcttcgaaaaaacagaacgtactaattttggccgacaccaagatcacttattggaataactttacttatgatcagtagcattacctttttttgatgtacaatatattggatgatcagtagcatgtgagcagtttctaataaaaaggaagctgcaatgataacttacgttcctaatatgacacattgtgttttttaacttatcacacttgttgttatgtgcgagttgtagagaattcaaactgagcagaaatccatgtattgctggccacacaggggagggactcatcctccatctcccctcgccaccgcgccaggcgtgatgcttcgtctcctccccccaggaagccattgtagatggcactgtcggccaagggcaaggaggtctgccacaggtcctgtgacgtcctcgacatcaacgccgatgagtggggcaacgagaataggagcatgaccaccgagctcagggagcagcagtaccggctcaggaaggcactggaagaccgggtgcaagtcagtagggagaccgccaagatgtggcgatgggacaagctccatcagatatggattggaggaccttacaaaacccaacaagctcaattcaaaattcaagaggaacagcagcacgccacgagcagcgacgccagagaagagggagttccaaatggcgattacaatgaagatcagacgacaaaagacatgagcgagggcttattggctgctccgccgaggtcatgcaatggccctactgggagctcgacgagatggacgacacactcacctacagaggggagctagggattttgcagctcctactagagaatggcattagagtaaatgaactaacaaggatagaggttgctctcgtcgtcccataagtggtgcagaaaatggcacccaattactgccctcgaggtgttgttagacttaatgggtcactacgcgaacagtcagtgtagttctatgcatgcatctacaataacaggttagtagtagtgtatttgtgcatggaccccatgttttccttttcattgaaaattgaaagcttgttctttttttactggaagatatggtctcttttgacaccatgaaatgtcgtagattgtctctcacctctgctttgcttcagtacctgtcttttttcccatgtccctaaattataagctatgtgtggtgtgagctgtgcctgcttccaacacttgggttaggttcagtgtcaagtatgtagattatacttaagcacacgacatgttcttcctctcctcatcgcaatatgttgattggattagatttcattttggcatatttttataatatttgtcttgctggcaacaccatctggaaccctttcgtgaaccagcatgagtggacaacactggtgggtagccacatgcacaaaaaaggaaaaaatggtctttttccttcatgatttaattattgtgccttcacatacatagggttgaaattgtcctccattaaaactcttttggtatacatgcatactgagaagttgtcatattttctataattttataactactaattatcgaataatgtcttagggaccgtctgtttcccttcactttgagaattgaaatctaagtaatggaataggctatctttttaaaatgtgacattccataactacctgcattctttatttgaccgacaatcttataaaagtgtatgtagatatgtatgtagatgtttatgtagatgtggatgcattcttctatacgagctcccctctagcatgtaacttgtgtaaaacctcaagatagtgagttatattttgtcttgattattgtacagggctacatgcatgttgtttcattactaagagagaggaaacatagcagtagcacacaagtttttcttgattattggtatattcagatcagtgctatattgctaagtttttttattattggtatactcagatcagcacttaaaagaatcacagacttaaatcacattgtagagagttatattcagatctgcacttgcttttttcatgcaatgtactcatagcagtagcacttaaatcatttcagtgactcattccatgacttaaatatatatttttagattacttctcgtttcttgctacatgtttacgcgctagctgtttaagtgcatctggtcgaccttctttttatgaagtgcttttcattgactgcttttgtg

SEQ ID NO: 75724 - DNA, 2216 bp, Zea Mays
gccgccgccgcaccgagccctccgcccccgtccgtctcgccgtgacgcgcgcggctcgcgataacttccaccagataactcccacgtcctacccgcgctcgttcattgctttcacgaggccaaggccgccgacgcccccgaggtcgtggtttaggggtcccctccccgccgccgagtacatcgagtccatggacagggccaacgccgcaaccacagggcccaccgccgagtccgcgcgggcggggcgcacgactccatggacagggctacctccccgttcgagggcgactcgccaatgttgcagtcgcaggccccgccgtcaagtccaccgagcggggcgcacgactccatggacagggccacctcgccgaggagcggctccgccacaggccgatccgacgccgcagccgtaggcccccgccgccaagtgtgccgagcggggcgcacatccctcgacgtcgccttcttcgacgacctctcgtcgagttcacgacgccaagaaggtcgtgcccgacgacaagcttgctcaacgcaccgggcgcgcgctccatagtaccagcgtgatgtcgcaccgccatccacgctcgacgcatccagctcctttggcgtcatctaggtgctcctctgcccgatcccggaggttcaaaacacctcacctcaatccaatgttaacaagcttggaggacatcaccaacgcaccatatgcagatcttctctctattaattcaatgaggaaaggaaaggggacttagaaattagtcttggcaaatggaggggaacgtctcaatgaccgaggcacattttttcttgttagttagctcatggtatgttaaaaggtaaggacctcaatccaatgaccagaatgtgtccatctttaaaaggtaaggaattggttaggcttcatattgtctctcttttgattggtatgttacatgattcttctccaaaaacaaatgcataatcatgtgtttaacaacattcttgtttatccttgtcttcgaaaaaacagaacgtactaattttggccgacaccaagatcacttattggaataactttacttatgatcagtagcattacctttttttgatgtacaatatattggatgatcagtagcatgtgagcagtttctaataaaaaggaagctgcaatgataacttacgttcctaatatgacacattgtgttttttaacttatcacacttgttgttatgtgcgagttgtagagaattcaaactgagcagaaatccatgtattgctggccacacaggggagggactcatcctccatctcccctcgccaccgcgccaggcgtgatgcttcgtctcctccccccaggaagccattgtagatggcactgtcggccaagggcaaggaggtctgccacaggtcctgtgacgtcctcgacatcaacgccgatgagtggggcaacgagaataggagcatgaccaccgagctcagggagcagcagtaccggctcaggaaggcactggaagaccgggtgcaagtcagtagggagaccgccaagatgtggcgatgggacaagctccatcagatatggattggaggaccttacaaaacccaacaagctcaattcaaaattcaagaggaagccgaatcgagatctaatgtgtgggcggaggaggcaaataaatagtgggaggtcggggacgctgcgctctggcctatggacatgagactgaaatgtgatcggtcgaatcgagatctaatgtgtgggcggaggaggcaaagaaatagtgggaggccggggacgctgcgcgctggcctatggacatgagactgaaatgtgatcggttgttctgctattgattttttgcacggatggaatgagaattgggtcgccaaggacgagcaattctggttggttgcttgctgttattctcgtatttgcttggccttccatttgtgtattttttctattatttatacccttttgtcgttgtaggcacatggctatgttggttgtctcagttgtcttttacaatgccacattctctttctcgggtccatctaaacatgactgtggactcaacctattttacattgtcttcacatcgattcttgttttttcatttgctatcatttccctgcacccgaaggtaccgtctcatagtctgttttcttccttttattgattttgcctatgcttttattacttgattcaatcagaaactatttcttgataagctatactggat

SEQ ID NO: 75725 - DNA, 2241 bp, Zea Mays
cccaccccgcgtgagccgccgccgccgcaccgagccctccgcccccgtccgtctcgccgtgacgcgcgcggctcgcgataacttccaccagataactcccacgtcctacccgcgctcgttcattgctttcacgaggccaaggccgccgacgcccccgaggtcgtggtttaggggtcccctccccgccgccgagtacatcgagtccatggacagggccaacgccgcaaccacagggcccaccgccgagtccgcgcgggcggggcgcacgactccatggacagggctacctccccgttcgagggcgactcgccaatgttgcagtcgcaggccccgccgtcaagtccaccgagcggggcgcacgactccatggacagggccacctcgccgaggagcggctccgccacaggccgatccgacgccgcagccgtaggcccccgccgccaagtgtgccgagcggggcgcacatccctcgacgtcgccttcttcgacgacctctcgtcgagttcacgacgccaagaaggtcgtgcccgacgacaagcttgctcaacgcaccgggcgcgcgctccatagtaccagcgtgatgtcgcaccgccatccacgctcgacgcatccagctcctttggcgtcatctaggtgctcctctgcccgatcccggaggttcaaaacacctcacctcaatccaatgttaacaagcttggaggacatcaccaacgcaccatatgcagatcttctctctattaattcaatgaggaaaggaaaggggacttagaaattagtcttggcaaatggaggggaacgtctcaatgaccgaggcacattttttcttgttagttagctcatggtatgttaaaaggtaaggacctcaatccaatgaccagaatgtgtccatctttaaaaggtaaggaattggttaggcttcatattgtctctcttttgattggtatgttacatgattcttctccaaaaacaaatgcataatcatgtgtttaacaacattcttgtttatccttgtcttcgaaaaaacagaacgtactaattttggccgacaccaagatcacttattggaataactttacttatgatcagtagcattacctttttttgatgtacaatatattggatgatcagtagcatgtgagcagtttctaataaaaaggaagctgcaatgataacttacgttcctaatatgacacattgtgttttttaacttatcacacttgttgttatgtgcgagttgtagagaattcaaactgagcagaaatccatgtattgctggccacacaggggagggactcatcctccatctcccctcgccaccgcgccaggcgtgatgcttcgtctcctccccccaggaagccattgtagatggcactgtcggccaagggcaaggaggtctgccacaggtcctgtgacgtcctcgacatcaacgccgatgagtggggcaacgagaataggagcatgaccaccgagctcagggagcagcagtaccggctcaggaaggcactggaagaccgggtgcaagtcagtagggagaccgccaagatgtggcgatgggacaagctccatcagatatggattggaggaccttacaaaacccaacaagctcaattcaaaattcaagaggaagtactaaagccgaatcgagatctaatgtgtgggcggaggaggcaaataaatagtgggaggtcggggacgctgcgctctggcctatggacatgagactgaaatgtgatcggtcgaatcgagatctaatgtgtgggcggaggaggcaaagaaatagtgggaggccggggacgctgcgcgctggcctatggacatgagactgaaatgtgatcggttgttctgctattgattttttgcacggatggaatgagaattgggtcgccaaggacgagcaattctggttggttgcttgctgttattctcgtatttgcttggccttccatttgtgtattttttctattatttatacccttttgtcgttgtaggcacatggctatgttggttgtctcagttgtcttttacaatgccacattctctttctcgggtccatctaaacatgactgtggactcaacctattttacattgtcttcacatcgattcttgttttttcatttgctatcatttccctgcacccgaaggtaccgtctcatagtctgttttcttccttttattgattttgcctatgcttttattacttgattcaatcagaaactatttcttgataagctatactggat

SEQ ID NO: 75726 - DNA, 1344 bp, Zea Mays
cagacagagagagtatgttggtatgtacaaacaaagcacatgtgcatgctggctggagaggtagatatgacggagatcagacaccaggcaagctgcaagcacgtacaagaggggtcaatcaatcaaaggagtggtaaatcaaaagtgcaagctagcccatcagagaattcaggaccaaaccaatgcagcagcaagggccagccaggccgcaggaatcatcagatcgagaggcactgccaacaccaccaccaccaccaccacaccatgctcaacatgatggtcaaggagcaggtggcggcggcgccgacgggctccggcgacaggcaggggcaggggagaggcaagatcgagatcaagcgcatcgagaacacgacgaaccggcaggtgaccttctgcaagcgccgcaacggcctgctcaagaaggcgtacgagctctcggtgctctgcgacgccgaggtcgcgctcgtcgtcttctccagccgcggccgcctctacgagtacgccaacaacagtgtgaagtccaccattgagaggtacaagaaggccaacagtgactcctccaactctggcacagttgcagaagtcaatgcccagtactaccagcaggagtcctccaagctgcgacagatgatccacagcttgcaaaacgcaaacactaggaacatagtgggagattccatccacaccatgggcctcagggatcttaaacaaatggagggcaagctggagaaagccataatcaagattagagctagaaagaatgagctgctatacgctgaagttgactatatgcaaaaaagggagatggatctgcagactgacaacatgtacctgaggagcaagatcgctgagagtaatgaaacggggcagccggcgatgcacatgacgatgggagcgccgccgacgagcgagtacgaccacatggcccctttcgactcgagaaactttctgcaagtgagcatgcctcagcactactcccatcagctgcaacctacaaccctccagctcggatgatgaaatcagcgctatacctggcggcgcccggcccccaatcgagatagatcacgcatgcagttatatcatgtgccaaatcgagatctcaagtaactctacgtacgtttgcttaattattaataattgtgattagtgcaactgttagggtatatatatttgtgagtgccaccactgtgtgcgtgcatttgtacgtgtgaatttagctgttgcatctactactattgtaccctccggccaggccatatcatcagaaacgcgggtttatttacgcatacttatatatatatgatttgtgtgctttatatagattgaaaagagtatgttggcctc

SEQ ID NO: 75727 - DNA, 1374 bp, Zea Mays
cagacagagagagtatgttggtatgtacaaacaaagcacatgtgcatgctggctggagaggtagatatgacggagatcagacaccaggcaagctgcaagcacgtacaagaggggtcaatcaatcaaaggagtggtaaatcaaaagtgcaagctagcccatcagagaattcaggaccaaaccaatgcagcagcaagggccagccaggccgcaggaatcatcagatcgagaggcactgccaacaccaccaccaccaccaccacaccatgctcaacatgatgactgatctgagctgcgggccgtcgtccaaggtcaaggagcaggtggcggcggcgccgacgggctccggcgacaggcaggggcaggggagaggcaagatcgagatcaagcgcatcgagaacacgacgaaccggcaggtgaccttctgcaagcgccgcaacggcctgctcaagaaggcgtacgagctctcggtgctctgcgacgccgaggtcgcgctcgtcgtcttctccagccgcggccgcctctacgagtacgccaacaacagtgtgaagtccaccattgagaggtacaagaaggccaacagtgactcctccaactctggcacagttgcagaagtcaatgcccagtactaccagcaggagtcctccaagctgcgacagatgatccacagcttgcaaaacgcaaacactaggaacatagtgggagattccatccacaccatgggcctcagggatcttaaacaaatggagggcaagctggagaaagccataatcaagattagagctagaaagaatgagctgctatacgctgaagttgactatatgcaaaaaagggagatggatctgcagactgacaacatgtacctgaggagcaagatcgctgagagtaatgaaacggggcagccggcgatgcacatgacgatgggagcgccgccgacgagcgagtacgaccacatggcccctttcgactcgagaaactttctgcaagtgagcatgcctcagcactactcccatcagctgcaacctacaaccctccagctcggatgatgaaatcagcgctatacctggcggcgcccggcccccaatcgagatagatcacgcatgcagttatatcatgtgccaaatcgagatctcaagtaactctacgtacgtttgcttaattattaataattgtgattagtgcaactgttagggtatatatatttgtgagtgccaccactgtgtgcgtgcatttgtacgtgtgaatttagctgttgcatctactactattgtaccctccggccaggccatatcatcagaaacgcgggtttatttacgcatacttatatatatatgatttgtgtgctttatatagattgaaaagagtatgttggcctc

SEQ ID NO: 75728 - DNA, 1846 bp, Zea Mays
gtgcagaacagaaatggtctaactgttagtttaggtccagaccatcagttacatggcagaacgtgtcgtgggtacgggctcatttgggatcgtcttccaggctaagtgtttggagactggagagaccttcgccattaagaaggtgctgcaggatcggcgttacaagaaccgggagctgcaacttatgcgtgccatggagcaccccaacgtcatctgcctgaagcactgcttcttctcaacaacgagcagggacgagttgtttctaaaccttgtcatggaatttgtccccgagaccctgtaccgtgtcctgaagcactacagcaacgcgaaccagaggatgcctcttatctacgtcaagctctacatgtatcagcttttcagaggcctagcctatattcataatgtaccaggagtctgccatagggatgtaaagccacaaaacgttttggttgatcctctcacccaccaggtcaagctctgtgactttggtagcgcaaaagtcctgattcctggtgaaccgaacatatcttacatatgctctcgttattatcgtgctccagagctcatatttggagcgacggagtatacaacttcaatagacatatggtcagctggctgtgttctagctgagttgcttcttggtcagccactgtttccgggagagagtgctgttgatcagttggtagagattatcaaggttcttggtactccaacccgtgaggagatacgatgcatgaatcccaactatactgagttcaggtttcctcagataaaggctcatccgtggcacaagattttccacaagagaatgcctccggaagccattgaccttgcttcccgtctccttcagtattcgccaagtcttcgctgctctgctcttgatgcatgcgctcatcccttctttgatgagctccgggcgccgaatgcacgtctaccaaacggccgtccattccctccgctctttaacttcaaacatgagctagcaaatgcctccccggacctcatcaacaggcttgtaccggagcagattagacggcagaacggtgtcaactttgggcataccgggagctaggagggcaggcggctgccatggtcaagtttttggtcttggtaccccatgtgcagggccgattgcaggtgacggtgatattgctgcaccatctggagaggaggggctcagcagtacctgagagagctgaaactatgtaaattatctgaccgcgaaggagtacggccagtgttaagccagtaaactggcgcatgttggtccagagtagttaagaatgtagcaggtggagactggtaaatgcctagggtcgtttttagttgttgttactagtattttgtaatgtaatgttcgtcggtacttcccagcagtagtgtagctgctcatgttttgttcgcccgtcatgatgtaaatgatcatcacccaactggaacccctgttatctcgttacatgcttaggcctctgatcgttccgtagttgctgtgatagagctctgacaagtctgagcaggaaagtgggtaggaattgcttctggtgaaatctggacaagttttgtcgaatacagatgcatctgctgattgatcgtctggttgcaagtagtctgcacattcccaaggccacagatcattactttcagattgttgataacgaccaaatggcaagtaacagaaacgaccgaaattcgcaagcaggcaattacagacgcggccgcgccagcacatcgccgccgtagtccttgaccttgctccacaaaaccggccatgcgtccttcctgatggcggctaggttctctccatcccagtctctggctgcgagctcctcagccatggcgaccgccg

SEQ ID NO: 75729 - DNA, 2159 bp, Zea Mays
cgccaagcgaggcaggcagcggctgtcccgagctgtcgaaagcgaggcgcggcggcagtcctcgcagcagggccgaccggtcaaaagcactgctgctccacaccacccccaccatccctttccccaacccccgaagccgagccagcgaaccaccccgcccgcagccgcaagcaagcagccaagcagtgtgaactgaccgtccgttccgtccagcccaccatggaggcgccgccggtaccggagctcatggatctggacgcgccccctcccgccgcagccgacgccgcagccgcggcgccggttccccccgccgtcagcgacaagaagaaggaaggggaagggggagacactgttacgggtcacatcatctccaccaccatcggtgggaagaacggcgagccgaagcggaccatcagttacatggcagaacgtgtcgtgggtacgggctcatttgggatcgtcttccaggctaagtgtttggagactggagagaccttcgccattaagaaggtgctgcaggatcggcgttacaagaaccgggagctgcaacttatgcgtgccatggagcaccccaacgtcatctgcctgaagcactgcttcttctcaacaacgagcagggacgagttgtttctaaaccttgtcatggaatttgtccccgagaccctgtaccgtgtcctgaagcactacagcaacgcgaaccagaggatgcctcttatctacgtcaagctctacatgtatcagcttttcagaggcctagcctatattcataatgtaccaggagtctgccatagggatgtaaagccacaaaacgttttggttgatcctctcacccaccaggtcaagctctgtgactttggtagcgcaaaagtcctgagctcatatttggagcgacggagtatacaacttcaatagacatatggtcagctggctgtgttctagctgagttgcttcttggtcagccactgtttccgggagagagtgctgttgatcagttggtagagattatcaaggttcttggtactccaacccgtgaggagatacgatgcatgaatcccaactatactgagttcaggtttcctcagataaaggctcatccgtggcacaagattttccacaagagaatgcctccggaagccattgaccttgcttcccgtctccttcagtattcgccaagtcttcgctgctctgctcttgatgcatgcgctcatcccttctttgatgagctccgggcgccgaatgcacgtctaccaaacggccgtccattccctccgctctttaacttcaaacatgagctagcaaatgcctccccggacctcatcaacaggcttgtaccggagcagattagacggcagaacggtgtcaactttgggcataccgggagctaggagggcaggcggctgccatggtcaagtttttggtcttggtaccccatgtgcagggccgattgcaggtgacggtgatattgctgcaccatctggagaggaggggctcagcagtacctgagagagctgaaactatgtaaattatctgaccgcgaaggagtacggccagtgttaagccagtaaactggcgcatgttggtccagagtagttaagaatgtagcaggtggagactggtaaatgcctagggtcgtttttagttgttgttactagtattttgtaatgtaatgttcgtcggtacttcccagcagtagtgtagctgctcatgttttgttcgcccgtcatgatgtaaatgatcatcacccaactggaacccctgttatctcgttacatgcttaggcctctgatcgttccgtagttgctgtgatagagctctgacaagtctgagcaggaaagtgggtaggaattgcttctggtgaaatctggacaagttttgtcgaatacagatgcatctgctgattgatcgtctggttgcaagtagtctgcacattcccaaggccacagatcattactttcagattgttgataacgaccaaatggcaagtaacagaaacgaccgaaattcgcaagcaggcaattacagacgcggccgcgccagcacatcgccgccgtagtccttgaccttgctccacaaaaccggccatgcgtccttcctgatggcggctaggttctctccatcccagtctctggctgcgagctcctcagccatggcgaccgccg

SEQ ID NO: 75730 - DNA, 1638 bp, Zea Mays
tccagggttgcgcgccctcttggttgtcccgaggctattggtctccgagaaacaaacaagatgagcgcatgttctagaatctggaatcaacaaccttccacatcacgaggggacagttattttgcgtccaaagtacaaacacaactgtttaaccccgctgcctcgactttcccagaagacactgcacgagtttcccaaacaatgcacaaacgattaccagttccatcccataagtacttttccacagtgcagttgtctccgtttaactagtttgttcagagatgcacgcgttgcacgacgaaatgttcatgaaaaaaaagtttcggttgatgtgatgaccaggtattggaataaagaatactccggaaaccttcaataatccggtgacagcttttaaaatgctgtggatagtaatgagggttgcggagggatgcagcgttacacgttggatccaacgcagggggcaggaagaaactgtataacggaagcaaaagaaaatttccttcgtatttttagcaccccccccccccccccttttcttttttctttttacaaataagacattaggtttgggcagggcagcttattcagggcaatatgtatatgatgcacttgagtgcttgtactatacgttagcgaccatgaatcttaaaaaaaaaaacaagctgacactggatacttgtacaggtcaactgagacatcgagcgtatctttagggccttatactgaacagatgttacataatggtgctacgatggtgaacacatgctaaacacaatagtcttcactcacgccaaagcagatgcaacgcatgtctggaacagtactctaatgaggaggaacaggtctcgtaaaaaaagaaagtggtttcggcaaatcctcaggccgtcatgtgggcctctcatccacccctggtacttctgtttgggccccggcccaacgttgccccttgaaagggtttccttttactcttgcatgcctcagccgggcccagctaagatcacctttgtccaatcactcagcgccgcctgagccaccttatcatgtctgcatgtacccgtactcgcaaaggattcttgatctcttgtcatgtctgctatcaattatggaccgtgcctgcttgccgccatggcgatcacatgactgaagtaaaaggctgcctttctattaccctcaaggccgctaaactgttgttctggggccctgggcacctgcaaaaccagggcgcgtgttcagcgtagtagccggaggcgatcaaaccatgagcaccagcctaccagggccgccaggcaataggcatacgccgccgcctcttgtctcagatccactgagaacgtagtggtagttccttggcacgcatgacacattggcacccaccagccaccatggcagggtgacaaactgacaataaagcggcgcacgtgctgcaccaccagcaacggcaagtgacatgcaggaggcatgtacacccatgcatgcatgtactacgtacgtatggcgtgcgtgatccacgccgcagctaccgtcgcgcactcgcgctagcgaacaacgccgcctcacggggccctcgcgccggcacgacatgtcaggcacggccatcccccgtccaggctgcgcccccccgcgcctctgtcattg

SEQ ID NO: 75731 - DNA, 1996 bp, Zea Mays
cgtccatcgtggccgtcgtcgtctgcagatattcgaaactacgcaatgggatttagcattgtttgactcctggccgggttctgtgggctctcgtccatcgtgcccgtcgtcgtctgcagagattcgaaacgaaagtgagagagcatcgcagaggaaaggaggcacccttcgctggctcgatcgccgctgtgttcacgcggaggaactagatcagcacgcgaaagccaacagcgcagtcgaggaggaagcgagcagtccaggtccaggatggcggcggccgtggcgtcgctgtacaggcgggtcctcccgtcgccgccggcggtggacttcgcttcgccggagggcaagcgcctattcgcggaggccctggcggcgggcaccatggagggtttcttccccctggtctccgtcttccagacgcagtcggagccggccttctgcggcctggcctcccttgccgtcgtgctcaacgcgctcgccatcgacccgggccgccgctggaaggggccctggcggtggttcgacgagtccatgctcgactgctgcgagcccctcgataaggtcaaggccgagggcatcaccttcggcaaggtcgcctgtctcgcgcactgctccggagccgacgtccaatccttccgcaccaaccgggttaccatccacgacctacggcggcatctcatccgatgcgtctcctcgcaggactgccatctgatcgcctcctaccacaggcggcctttcggacagactggaactggtcatttctccccaattggtggctaccatgccggacaggatatggtgctcatcttggatgtcgcccgtttcaaatatcctccgcattgggttccattgcaacttctttgggaagccatgaatacaactgatgactcaactggacttctcagagggttcatgcttatatcaagaaaggttgcagccccttcattgttgtacacagtgagttgcagagatgaaaactggaaacgcatgtcaaaatattgtgttgaagatttaccgagtcttctgaaggcagggaacctagacgatgttccagcgcttctgtcccgtttaattgagtctcttccagctgacgctgaatctttgatcaaatgggttgtcgaagtcaggagaaaagaggagggtggaccaagcttaaacaaagaggagaaagaaaggcttttcttgaaggaaaatgtactaaagcaagttcgtgataccaggctatttaccatagtccatgatttgcagtatgctaataaaccatgttataattgctcatcgtcgagcgaagatgattcccttactaggattgcagccgttgtgtgctgtcagggagctgcaatgctatcaggctccgtggtatgtgaaggcagtgaacaaggtgttgatatgcttttaccaatgtcttcacctggtgccagttcatgcaattcaaacttgaagagcaatgccgtcaaatatccatcaagcgtggatgttctaactgttcttctgctggctttacatcccaacacgtggttgggcatcaaagacgagaagctcaaagctgaatttcagactcttatttcaacagacagtctacctgatgatctgaaacgagagatattgcacctaaggcggcaactctactatctaaaggcctgtaaagaagaggaatgcgaagatgccgagcaaccatcgcctaagcagcagtgctgaagtggcagtgtgcccatgtcgttaattttacttgtaagaaattgatgtgaagggaaaagttaccagagggtatagactatgaaatggtcagaattatgatgatagtagtgtagtgatgattatcttgttgttcagttctggtgttgtttccttctacgagaggctattacaccctccttgctcaaggaggtgctgatgttctttttctagatgatgattaaaccatccatccttgctttgtgctaaaccttgtcatattctctttgcattgaataaatccctcgtatcgtatcctatc

SEQ ID NO: 75732 - DNA, 2770 bp, Zea Mays
gtccacttccgcttcctcttcctctcagtccaaccgcccctcgtgcccaccgcttctacaatggcgccatccgccgctaccgcgagcatcctcctcgccctcatcgccatcctcctcccctccgtaacggcggccgcggcgctgcagatgcggcatcgcctcggcgcgtccttgcaggtcgcctccctcaacgcgtcggagccgccgaccaccttcttcgaggtcgatcgcccgatccgccctccgcgcggcagcgcggggccttgctccacgcttctcctctcggctaccttcggcgccacatacggccgcccccccgccaccgccgcctacgcgccgccggcttgcctcggcgacgcgggcggcgccggtgccctcgcgctcgccgtgctcgagtgggccgccgactgtcgcggccgccagttcgaccgcatcttcggcgtctggctctcgggcgccgagctcctccgcagctgcaccgccgagccgcgtcccaacggcatcctctggtccgtgtcccgcgacgtcaccaggtacgccgccctcctcgcggagcccggtgaggtcgcggtgtacctcggcaacctcatcgacaaaacatacaccggcgtctatcacgccaacctcacgctccacctctacttccgcaccgatccgcagccgcagccgccaccgcagcagcagcagcaggctgatctgattgtgcccatttcaaggagcttacccttgaacgacgggcagtggttcgccatccagaatgctactgatgtgcagtcaaagaagctcgccattccgtcgaacacctacagggcggtccttcaagtgttcgtttccttccattccgacgacgagttctggtataccaatccgcccaacgattacattcgggcgaacaacttgtccagtgtccccggcaatggcgcattcagggaagtcgtagctagggtggatggtgaagtcgtcggcgctgtttggccattcactgtgatttacaccggtggtgttaacccgcttctatggcggccaatcacaggaatcggctcattcaatctcccgacatatgacattgacatcacgccattcttgggcaagctcctggacggcgaggaacatgatttcgggtttggcgtgacaaatgctcttgatgtgtggtacgttgatgccaatttgcatctgtggctggatcacaagagcgagaagaccactggaggcttgctcagctatgaggcatccggattgaaccttaatgtgagctcagaattcactggattagacgggcagtttgtgacaagcgcaagtcggcacgtctctgccacgggatgggtgaaatcgtcgtacggggaggtcaccacaaccttcaatcagagattctgctatgagaacatcaatgtgtttagaaagaacggcactgtgcagatcgtgaaccaaacaatcgatgcgaagtctggcatttttgccaaggatgcttctgccgtgctgctctctgaggaattccatgaggttttcccgctgtacctttatactggaacctcagatcaagcggacgatgagtactcattggattcaattgttaaatttggtatcaatgggaagaagacctccggtgggaaaccgggcttcttgtacagctccctacggaattcacagtcggcacaaggcactatgagggtgaagaagaatttggtggtcagtggattggggaagacccatcaggtgtataagtatgtgggaactgatggatgctacttcagggatgtgagcagcaggaactacactatagtttccgaccgctccgatgattcttgttcaaaaagagcatatagctctgtcagcgagaagttgaatgatcagccagcaagaagaaagttgctggcaaacaaattgtaaagtacggaaagggaatagttcgtccacgtttcagttttttactttgcttcttgaataaaggctgcttggcagctcgtgcttcagaaagtaggtaagaaacttgaatgtccctttataaacacgccaattcggatctagtggcaaggtattgttatcagtgactatcaattgcatcaccatcatgtctatagctgcacaggatgatgcacgacagaacgagggatgaccattttatactggcagcaatactagtactaatcaagattctgacacgatcacactattaatttatgccagcattgcttattccgcatcgattggatttgttccggatctcgatctctttcaaggcatcagcagattcttgatgctcttctctgtcctctttgcagatgtgtgttttggaagtttttttcctttcgaaaagctctttgcagatgtgtggtggtacttattttttgatgtcaagacatacttggaccttgattgccatgtaccaccaactgtgatcttcactctagccttcatagctgaactaggtgagtgtacgtgcattgcaatagagacatataatatcacgataacttatgtacaaatgtgtattacactgttatgagatggagcacgacgtccgcgagtcgtccgacatggtgtcgaagtgaaactcgggctacagtcgagccgatcccacggcgtgaggccacccgtctgcaaggcgcgtgaggttgaggacgagggggcagtttcaaggagggaatataatctccataggacgacaatggagtggcggagcatggtcacaagggccttgttgacgacggcgtgcagtcgataaggtacgtgtgggtgccggcgcagggatggcgcagcgaccggcaaagat

SEQ ID NO: 75733 - DNA, 2469 bp, Zea Mays
gtccacttccgcttcctcttcctctcagtccaaccgcccctcgtgcccaccgcttctacaatggcgccatccgccgctaccgcgagcatcctcctcgccctcatcgccatcctcctcccctccgtaacggcggccgcggcgctgcagatgcggcatcgcctcggcgcgtccttgcaggtcgcctccctcaacgcgtcggagccgccgaccaccttcttcgaggtcgatcgcccgatccgccctccgcgcggcagcgcggggccttgctccacgcttctcctctcggctaccttcggcgccacatacggccgcccccccgccaccgccgcctacgcgccgccggcttgcctcggcgacgcgggcggcgccggtgccctcgcgctcgccgtgctcgagtgggccgccgactgtcgcggccgccagttcgaccgcatcttcggcgtctggctctcgggcgccgagctcctccgcagctgcaccgccgagccgcgtcccaacggcatcctctggtccgtgtcccgcgacgtcaccaggtacgccgccctcctcgcggagcccggtgaggtcgcggtgtacctcggcaacctcatcgacaaaacatacaccggcgtctatcacgccaacctcacgctccacctctacttccgcaccgatccgcagccgcagccgccaccgcagcagcagcagcaggctgatctgattgtgcccatttcaaggagcttacccttgaacgacgggcagtggttcgccatccagaatgctactgatgtgcagtcaaagaagctcgccattccgtcgaacacctacagggcggtccttcaagtgttcgtttccttccattccgacgacgagttctggtataccaatccgcccaacgattacattcgggcgaacaacttgtccagtgtccccggcaatggcgcattcagggaagtcgtagctagggtggatggtgaagtcgtcggcgctgtttggccattcactgtgatttacaccggtggtgttaacccgcttctatggcggccaatcacaggaatcggctcattcaatctcccgacatatgacattgacatcacgccattcttgggcaagctcctggacggcgaggaacatgatttcgggtttggcgtgacaaatgctcttgatgtgtggtacgttgatgccaatttgcatctgtggctggatcacaagagcgagaagaccactggaggcttgctcagctatgaggcatccggattgaaccttaatgtgagctcagaattcactggattagacgggcagtttgtgacaagcgcaagtcggcacgtctctgccacgggatgggtgaaatcgtcgtacggggaggtcaccacaaccttcaatcagagattctgctatgagaacatcaatgtgtttagaaagaacggcactgtgcagatcgtgaaccaaacaatcgatgcgaagtctggcatttttgccaaggatgcttctgccgtgctgctctctgaggaattccatgaggttttcccgctgtacctttatactggaacctcagatcaagcggacgatgagtactcattggattcaattgttaaatttggtatcaatgggaagaagacctccggtgggaaaccgggcttcttgtacagctccctacggaattcacagtcggcacaaggcactatgagggtgaagaagaatttggtggtcagtggattggggaagacccatcaggtgtataagtatgtgggaactgatggatgctacttcagggatgtgagcagcaggaactacactatagtttccgaccgctccgatgattcttgttcaaaaagagcatatagctctgtcagcgagaagttgaatgatcagccagcaagaagaaagttgctggcaaacaaattgtaaagtacggaaagggaatagttcgtccacgtttcagttttttactttgcttcttgaataaaggctgcttggcagctcgtgcttcagaaagtagatgtgtgttttggaagtttttttcctttcgaaaagctctttgcagatgtgtggtggtacttattttttgatgtcaagacatacttggaccttgattgccatgtaccaccaactgtgatcttcactctagccttcatagctgaactaggtgagtgtacgtgcattgcaatagagacatataatatcacgataacttatgtacaaatgtgtattacactgttatgagatggagcacgacgtccgcgagtcgtccgacatggtgtcgaagtgaaactcgggctacagtcgagccgatcccacggcgtgaggccacccgtctgcaaggcgcgtgaggttgaggacgagggggcagtttcaaggagggaatataatctccataggacgacaatggagtggcggagcatggtcacaagggccttgttgacgacggcgtgcagtcgataaggtacgtgtgggtgccggcgcagggatggcgcagcgaccggcaaagat

SEQ ID NO: 75734 - DNA, 2666 bp, Zea Mays
gcgtctccctccccacgaaacccccttccccaaactacctctgctgctctccttgatccccaattctctcttctgcctacttgcctccatctcggcctccacctccactcctcgcccccgaacatccggcgctgtccgcaccccgactcctctcgtcctttcgcggtcgcgatggtggcgtccatggcgtcgccgtaggggcgatcgatctaggagaaagtgctggagaatgtggcgtcgtaccaccagcaacaacggaggcagaagctacgcaagagcctcacctacaccggcggcgagctctcgttcactgtctgggcccgtggggatgaccccacctccacgtccgtcgaggcacagaaggaggacatgcctcttgagcacgtcttcaaaatcatcagatctgatggcaaaagtgtgtgtttatggttcctgagtcagatgatctttcttcagttttagatgtgatagatattggtataaaagataaaaactagaatgctatgtctgtcaaaggagctttcttcagttcaggtactgctctgctttattagccatccagccgatggatattttctatatgtgtaccgcccctgcactttcaaacacttatgttcaatgtttacaatcacattttttcttctcatagatttactatgtggttgtggtcttagtttggcttgtaggttaatttgtatactcatgtcattttagtttttctatgttgattcagtatgtcttaatttagttaatttcaattcttgatgctaataatatggatagattgtgacactactttctggcttgagcagaaatgggtttgttgcatatagcagaatatagttgtcgtaactggcaacaatgacccctctatggatgatctgaaaactattccgtggtcatgtagttaaatatagctgaatatacattactatgttttattaatcttatttggtttttctctcaaaagaacacacctctccatctttcagtgcttggtggatcaccgtctaaacgatccaccaccagaaccgccctaccccaagatagctatgtgcaggttcaactactcatttagatattggtacagcctgtaatagactttggtacaataggatttggttttgctattcacttagtttttagttccaaacaaccaacaaattgcatgtcctttaggaaaaatatcacatgaatatcagtaatataacactgataataaaaaatgcttcgattctatatatttttcatgttataaggttgaaaacattctgtctcacggatcagaatgtgtacaaggcgacatactgtgtttacaaatatatttaaccataataaaaacatatttggaaactgaatatcatttaagtccaaaaatgtttttgctgactgttcattaagctagagtaaagagtaaacttagcatttcttttctatatctctctttcgtgctcatgccgccgcagtctcctccatcccacctttcctacgcaggcagctccatctcagtcgttgtacccattcaacgccgagctggtggcagcgatgcaggagatgatccagccgaggtgtacaagtacatgttagtggacgtcacctgccaaagatacacagtttctactgtttttcagttggagaaaatatttaagacaacattttcatcgtttgttctccatatggggcttgtttcacgccacttgaaggaaggagggaatgatggtgttaagttcggacaatacatctacacatctatgaaatgtacaaccacgatgtagagcatagagtttctaaagttggagatttggatgatgttggagatgtgctttggtgtagttcatctctcccgaatcaagagtctggtttatggggctaaggtagaggctgccatcgccattggattcaatgacttcattacatatgctctgagaggcattgggttctaccagaaggataacatggagatcaagaaggccaatggcaatggcacactgatccctgagcagatctttgaaaagactaggagaagttctagatgaattgatgcttggctgaagagggatgtcagatttgtacaatgctcacccacaaagaataatacatttctccaatgtccactgttttgaaaaatacctccattccaatgtttaacattctaacgatgtctgaatttattgtaaagagacacatgattgttcattgttgtaacttatgtacaatatatgcgtgtgtgaaataaagatcatcttggagcaccggcatcaatgttatcaatcttctcaaatttcaaattatcctggtctcttcgtgaaaccataaaagtttattaagtcacttatctgagtggtctaaaagtctagcatatttttgttcctttgcctgtcgagacggatcagctggcatgaataatatccggtgaatactgcaagagctattcatgatcccccgtgaactagctggtatgatataacttagtttgtgaagtgctaatgccacaaacaggaaataggatgatacttcatgtatatttttttctttcttgaaaatgaactataggatactgtttacaatccataccaagcttctgcagttatcaacatttttctatgttcaaccttgttaacatattaagacgagtttttctttcatttttcaaaaaaataaatcaa

SEQ ID NO: 75735 - DNA, 2186 bp, Zea Mays
gcgtctccctccccacgaaacccccttccccaaactacctctgctgctctccttgatccccaattctctcttctgcctacttgcctccatctcggcctccacctccactcctcgcccccgaacatccggcgctgtccgcaccccgactcctctcgtcctttcgcggtcgcgatggtggcgtccatggcgtcgccgtaggggcgatcgatctaggagaaagtgctggagaatgtggcgtcgtaccaccagcaacaacggaggcagaagctacgcaagagcctcacctacaccggcggcgagctctcgttcactgtctgggcccgtggggatgaccccacctccacgtccgtcgaggcacagaaggaggacatgcctcttgagcacgtcttcaaaatcatcagatgtgatagatattggtataaaagataaaaactagaatgctatgtctgtcaaaggagctttcttcagttcaggcagctccatctcagtcgttgtacccattcaacgccgagctggtggcagcgatgcaggagatgatccagccgaggtgtacaagtacatgttagtggacgtcacctgccaaagatacacagtttctactggtacacattttatttttttcatggtgataattaattcgtagcttgcgcaaaaccaaaggttgtgtgatttttcaaggcagaaatcagtatcatgatagtttttcagttggagaaaatatttaagacaacattttcatcgtttgttctccatatggggcttgtttcacgccacttgaaggaaggagggaatgatggtgttaagttcggacaatacatctacacatctatgaaatgtacaaccacgatgtagagcatagagtttctaaagttgggtaagctgtttggctgttttatagaaatttgtatcaacatcaacatagatttttagtcccaaacaaattggggtaggctagatttgaaacccaacaagaagtcaccaaaaagagaaagagagataaaggggaggggaaaagcttttgagagaactaaaagagaaaatgcctaatcacggttcgggcacgtggatagcttctttccaagcatttctatccaaacacaactcctttgggtgtgtggggtgatattagaagcttcatgttaggtgtttgatactttcttgaatataggatttttgtgtgtgtggtgtagtataaataatgtccatagttgaataccaaaatgtggatattgtacagtgggagttatggctgccttcttcattgcttgatcttagttgttggttgcaatcttctaacttagagtatgatgcttgaagagatttggatgatgttggagatgtgctttggtgtagttcatctctcccgaatcaagagtctggtttatggggctaaggtagaggctgccatcgccattggattcaatgacttcattacatatgctctgagaggcattgggttctaccagaaggataacatggagatcaagaaggccaatggcaatggcacactgatccctgagcagatctttgaaaagactaggagaagttctagatgaattgatgcttggctgaagagggatgtcagatttgtacaatgctcacccacaaagaataatacatttctccaatgtccactgttttgaaaaatacctccattccaatgtttaacattctaacgatgtctgaatttattgtaaagagacacatgattgttcattgttgtaacttatgtacaatatatgcgtgtgtgaaataaagatcatcttggagcaccggcatcaatgttatcaatcttctcaaatttcaaattatcctggtctcttcgtgaaaccataaaagtttattaagtcacttatctgagtggtctaaaagtctagcatatttttgttcctttgcctgtcgagacggatcagctggcatgaataatatccggtgaatactgcaagagctattcatgatcccccgtgaactagctggtatgatataacttagtttgtgaagtgctaatgccacaaacaggaaataggatgatacttcatgtatatttttttctttcttgaaaatgaactataggatactgtttacaatccataccaagcttctgcagttatcaacatttttctatgttcaaccttgttaacatattaagacgagtttttctttcatttttcaaaaaaataaatcaa

SEQ ID NO: 75736 - DNA, 2499 bp, Zea Mays
gcgtctccctccccacgaaacccccttccccaaactacctctgctgctctccttgatccccaattctctcttctgcctacttgcctccatctcggcctccacctccactcctcgcccccgaacatccggcgctgtccgcaccccgactcctctcgtcctttcgcggtcgcgatggtggcgtccatggcgtcgccgtaggggcgatcgatctaggagaaagtgctggagaatgtggcgtcgtaccaccagcaacaacggaggcagaagctacgcaagagcctcacctacaccggcggcgagctctcgttcactgtctgggcccgtggggatgaccccacctccacgtccgtcgaggcacagaaggaggacatgcctcttgagcacgtcttcaaaatcatcagatctgatggcaaaagtgtgtgtttatggttcctgagtcagatgatctttcttcagttttagtgcttggtggatcaccgtctaaacgatccaccaccagaaccgccctaccccaagatagctatgtgcaggttcaactactcatttagatattggtacagcctgtaatagactttggtacaataggatttggttttgctattcacttagtttttagttccaaacaaccaacaaattgcatgtcctttaggaaaaatatcacatgaatatcagtaatataacactgataataaaaaatgcttcgattctatatatttttcatgttataaggttgaaaacattctgtctcacggatcagaatgtgtacaaggcgacatactgtgtttacaaatatatttaaccataataaaaacatatttggaaactgaatatcatttaagtccaaaaatgtttttgctgactgttcattaagctagagtaaagagtaaacttagcatttcttttctatatctctctttcgtgctcatgccgccgcagtctcctccatcccacctttcctacgcaggcagctccatctcagtcgttgtacccattcaacgccgagctggtggcagcgatgcaggagatgatccagccgaggtgtacaagtacatgttagtggacgtcacctgccaaagatacacagtttctactggaaggagggaatgatggtgttaagttcggacaatacatctacacatctatgaaatgtacaaccacgatgtagagcatagagtttctaaagttgggtaagctgtttggctgttttatagaaatttgtatcaacatcaacatagatttttagtcccaaacaaattggggtaggctagatttgaaacccaacaagaagtcaccaaaaagagaaagagagataaaggggaggggaaaagcttttgagagaactaaaagagaaaatgcctaatcacggttcgggcacgtggatagcttctttccaagcatttctatccaaacacaactcctttgggtgtgtggggtgatattagaagcttcatgttaggtgtttgatactttcttgaatataggatttttgtgtgtgtggtgtagtataaataatgtccatagttgaataccaaaatgtggatattgtacagtgggagttatggctgccttcttcattgcttgatcttagttgttggttgcaatcttctaacttagagtatgatgcttgaagagatttggatgatgttggagatgtgctttggtgtagttcatctctcccgaatcaagagtctggtttatggggctaaggtagaggctgccatcgccattggattcaatgacttcattacatatgctctgagaggcattgggttctaccagaaggataacatggagatcaagaaggccaatggcaatggcacactgatccctgagcagatctttgaaaagactaggagaagttctagatgaattgatgcttggctgaagagggatgtcagatttgtacaatgctcacccacaaagaataatacatttctccaatgtccactgttttgaaaaatacctccattccaatgtttaacattctaacgatgtctgaatttattgtaaagagacacatgattgttcattgttgtaacttatgtacaatatatgcgtgtgtgaaataaagatcatcttggagcaccggcatcaatgttatcaatcttctcaaatttcaaattatcctggtctcttcgtgaaaccataaaagtttattaagtcacttatctgagtggtctaaaagtctagcatatttttgttcctttgcctgtcgagacggatcagctggcatgaataatatccggtgaatactgcaagagctattcatgatcccccgtgaactagctggtatgatataacttagtttgtgaagtgctaatgccacaaacaggaaataggatgatacttcatgtatatttttttctttcttgaaaatgaactataggatactgtttacaatccataccaagcttctgcagttatcaacatttttctatgttcaaccttgttaacatattaagacgagtttttctttcatttttcaaaaaaataaatcaa

SEQ ID NO: 75737 - DNA, 3386 bp, Zea Mays
gcgtctccctccccacgaaacccccttccccaaactacctctgctgctctccttgatccccaattctctcttctgcctacttgcctccatctcggcctccacctccactcctcgcccccgaacatccggcgctgtccgcaccccgactcctctcgtcctttcgcggtcgcgatggtggcgtccatggcgtcgccgtaggggcgatcgatctaggagaaagtgctggagaatgtggcgtcgtaccaccagcaacaacggaggcagaagctacgcaagagcctcacctacaccggcggcgagctctcgttcactgtctgggcccgtggggatgaccccacctccacgtccgtcgaggcacagaaggaggacatgcctcttgagcacgtcttcaaaatcatcagatctgatggcaaaagtgtgtgtttatggttcctgagtcagatgatctttcttcagttttaggtacttttctgctttaatatagctcatgcaatatgatttattttaacacatatttgaaatagaactggattgtgcatattttgtaaagtgtttgttctacattttgtaattcgtattattcatttttcctttagtttttctctttctacaactcctatctctttacaatcaaatttcagatgtgatagatattggtataaaagataaaaactagaatgctatgtctgtcaaaggagctttcttcagttcaggtactgctctgctttattagccatccagccgatggatattttctatatgtgtaccgcccctgcactttcaaacacttatgttcaatgtttacaatcacattttttcttctcatagatttactatgtggttgtggtcttagtttggcttgtaggttaatttgtatactcatgtcattttagtttttctatgttgattcagtatgtcttaatttagttaatttcaattcttgatgctaataatatggatagattgtgacactactttctggcttgagcagaaatgggtttgttgcatatagcagaatatagttgtcgtaactggcaacaatgacccctctatggatgatctgaaaactattccgtggtcatgtagttaaatatagctgaatatacattactatgttttattaatcttatttggtttttctctcaaaagaacacacctctccatctttcagtgcttggtggatcaccgtctaaacgatccaccaccagaaccgccctaccccaagatagctatgtgcaggttcaactactcatttagatattggtacagcctgtaatagactttggtacaataggatttggttttgctattcacttagtttttagttccaaacaaccaacaaattgcatgtcctttaggaaaaatatcacatgaatatcagtaatataacactgataataaaaaatgcttcgattctatatatttttcatgttataaggttgaaaacattctgtctcacggatcagaatgtgtacaaggcgacatactgtgtttacaaatatatttaaccataataaaaacatatttggaaactgaatatcatttaagtccaaaaatgtttttgctgactgttcattaagctagagtaaagagtaaacttagcatttcttttctatatctctctttcgtgctcatgccgccgcagtctcctccatcccacctttcctacgcaggcagctccatctcagtcgttgtacccattcaacgccgagctggtggcagcgatgcaggagatgatccagccgaggtgtacaagtacatgttagtggacgtcacctgccaaagatacacagtttctactggtacacattttatttttttcatggtgataattaattcgtagcttgcgcaaaaccaaaggttgtgtgatttttcaaggcagaaatcagtatcatgatagtttttcagttggagaaaatatttaagacaacattttcatcgtttgttctccatatggggcttgtttcacgccacttgaaggaaggagggaatgatggtgttaagttcggacaatacatctacacatctatgaaatgtacaaccacgatgtagagcatagagtttctaaagttgggtaagctgtttggctgttttatagaaatttgtatcaacatcaacatagatttttagtcccaaacaaattggggtaggctagatttgaaacccaacaagaagtcaccaaaaagagaaagagagataaaggggaggggaaaagcttttgagagaactaaaagagaaaatgcctaatcacggttcgggcacgtggatagcttctttccaagcatttctatccaaacacaactcctttgggtgtgtggggtgatattagaagcttcatgttaggtgtttgatactttcttgaatataggatttttgtgtgtgtggtgtagtataaataatgtccatagttgaataccaaaatgtggatattgtacagtgggagttatggctgccttcttcattgcttgatcttagttgttggttgcaatcttctaacttagagtatgatgcttgaagagatttggatgatgttggagatgtgctttggtgtagttcatctctcccgaatcaagagtctggtttatggggctaaggtagaggctgccatcgccattggattcaatgacttcattacatatgctctgagaggcattgggttctaccagaaggataacatggagatcaagaaggccaatggcaatggcacactgatccctgagcagatctttgaaaagactaggagaagttctagatgaattgatgcttggctgaagagggatgtcagatttgtacaatgctcacccacaaagaataatacatttctccaatgtccactgttttgaaaaatacctccattccaatgtttaacattctaacgatgtctgaatttattgtaaagagacacatgattgttcattgttgtaacttatgtacaatatatgcgtgtgtgaaataaagatcatcttggagcaccggcatcaatgttatcaatcttctcaaatttcaaattatcctggtctcttcgtgaaaccataaaagtttattaagtcacttatctgagtggtctaaaagtctagcatatttttgttcctttgcctgtcgagacggatcagctggcatgaataatatccggtgaatactgcaagagctattcatgatcccccgtgaactagctggtatgatataacttagtttgtgaagtgctaatgccacaaacaggaaataggatgatacttcatgtatatttttttctttcttgaaaatgaactataggatactgtttacaatccataccaagcttctgcagttatcaacatttttctatgttcaaccttgttaacatattaagacgagtttttctttcatttttcaaaaaaataaatcaa

SEQ ID NO: 75738 - DNA, 2292 bp, Zea Mays
gcgtctccctccccacgaaacccccttccccaaactacctctgctgctctccttgatccccaattctctcttctgcctacttgcctccatctcggcctccacctccactcctcgcccccgaacatccggcgctgtccgcaccccgactcctctcgtcctttcgcggtcgcgatggtggcgtccatggcgtcgccgtaggggcgatcgatctaggagaaagtgctggagaatgtggcgtcgtaccaccagcaacaacggaggcagaagctacgcaagagcctcacctacaccggcggcgagctctcgttcactgtctgggcccgtggggatgaccccacctccacgtccgtcgaggcacagaaggaggacatgcctcttgagcacgtcttcaaaatcatcagatctgatggcaaaagtgtgtgtttatggttcctgagtcagatgatctttcttcagttttaggtacttttctgctttaatatagctcatgcaatatgatttattttaacacatatttgaaatagaactggattgtgcatattttgtaaagtgtttgttctacattttgtaattcgtattattcatttttcctttagtttttctctttctacaactcctatctctttacaatcaaatttcagatgtgatagatattggtataaaagataaaaactagaatgctatgtctgtcaaaggagctttcttcagttcagtttttcagttggagaaaatatttaagacaacattttcatcgtttgttctccatatggggcttgtttcacgccacttgaaggaaggagggaatgatggtgttaagttcggacaatacatctacacatctatgaaatgtacaaccacgatgtagagcatagagtttctaaagttgggtaagctgtttggctgttttatagaaatttgtatcaacatcaacatagatttttagtcccaaacaaattggggtaggctagatttgaaacccaacaagaagtcaccaaaaagagaaagagagataaaggggaggggaaaagcttttgagagaactaaaagagaaaatgcctaatcacggttcgggcacgtggatagcttctttccaagcatttctatccaaacacaactcctttgggtgtgtggggtgatattagaagcttcatgttaggtgtttgatactttcttgaatataggatttttgtgtgtgtggtgtagtataaataatgtccatagttgaataccaaaatgtggatattgtacagtgggagttatggctgccttcttcattgcttgatcttagttgttggttgcaatcttctaacttagagtatgatgcttgaagagatttggatgatgttggagatgtgctttggtgtagttcatctctcccgaatcaaggttcataccccactattttggtttcctaaactgataggcacaactagaaattatcgagtgatgtctaactttcctacctgtcttgcaatgcagagtctggtttatggggctaaggtagaggctgccatcgccattggattcaatgacttcattacatatgctctgagaggcattgggttctaccagaaggataacatggagatcaagaaggccaatggcaatggcacactgatccctgagcagatctttgaaaagactaggagaagttctagatgaattgatgcttggctgaagagggatgtcagatttgtacaatgctcacccacaaagaataatacatttctccaatgtccactgttttgaaaaatacctccattccaatgtttaacattctaacgatgtctgaatttattgtaaagagacacatgattgttcattgttgtaacttatgtacaatatatgcgtgtgtgaaataaagatcatcttggagcaccggcatcaatgttatcaatcttctcaaatttcaaattatcctggtctcttcgtgaaaccataaaagtttattaagtcacttatctgagtggtctaaaagtctagcatatttttgttcctttgcctgtcgagacggatcagctggcatgaataatatccggtgaatactgcaagagctattcatgatcccccgtgaactagctggtatgatataacttagtttgtgaagtgctaatgccacaaacaggaaataggatgatacttcatgtatatttttttctttcttgaaaatgaactataggatactgtttacaatccataccaagcttctgcagttatcaacatttttctatgttcaaccttgttaacatattaagacgagtttttctttcatttttcaaaaaaataaatcaa

SEQ ID NO: 75739 - DNA, 2854 bp, Zea Mays
gcgtctccctccccacgaaacccccttccccaaactacctctgctgctctccttgatccccaattctctcttctgcctacttgcctccatctcggcctccacctccactcctcgcccccgaacatccggcgctgtccgcaccccgactcctctcgtcctttcgcggtcgcgatggtggcgtccatggcgtcgccgtaggggcgatcgatctaggagaaagtgctggagaatgtggcgtcgtaccaccagcaacaacggaggcagaagctacgcaagagcctcacctacaccggcggcgagctctcgttcactgtctgggcccgtggggatgaccccacctccacgtccgtcgaggcacagaaggaggacatgcctcttgagcacgtcttcaaaatcatcagatctgatggcaaaagtgtgtgtttatggttcctgagtcagatgatctttcttcagttttaggtacttttctgctttaatatagctcatgcaatatgatttattttaacacatatttgaaatagaactggattgtgcatattttgtaaagtgtttgttctacattttgtaattcgtattattcatttttcctttagtttttctctttctacaactcctatctctttacaatcaaatttcagatgtgatagatattggtataaaagataaaaactagaatgctatgtctgtcaaaggagctttcttcagttcaggtactgctctgctttattagccatccagccgatggatattttctatatgtgtaccgcccctgcactttcaaacacttatgttcaatgtttacaatcacattttttcttctcatagatttactatgtggttgtggtcttagtttggcttgtaggttaatttgtatactcatgtcattttagtttttctatgttgattcagtatgtcttaatttagttaatttcaattcttgatgctaataatatggatagattgtgacactactttctggcttgagcagaaatgggtttgttgcatatagcagaatatagttgtcgtaactggcaacaatgacccctctatggatgatctgaaaactattccgtggtcatgtagttaaatatagctgaatatacattactatgttttattaatcttatttggtttttctctcaaaagaacacacctctccatctttcagtgcttggtggatcaccgtctaaacgatccaccaccagaaccgccctaccccaagatagctatgtgcaggcagctccatctcagtcgttgtacccattcaacgccgagctggtggcagcgatgcaggagatgatccagccgaggtgtacaagtacatgttagtggacgtcacctgccaaagatacacagtttctactgtttttcagttggagaaaatatttaagacaacattttcatcgtttgttctccatatggggcttgtttcacgccacttgaaggaaggagggaatgatggtgttaagttcggacaatacatctacacatctatgaaatgtacaaccacgatgtagagcatagagtttctaaagttgggtaagctgtttggctgttttatagaaatttgtatcaacatcaacatagatttttagtcccaaacaaattggggtaggctagatttgaaacccaacaagaagtcaccaaaaagagaaagagagataaaggggaggggaaaagcttttgagagaactaaaagagaaaatgcctaatcacggttcgggcacgtggatagcttctttccaagcatttctatccaaacacaactcctttgggtgtgtggggtgatattagaagcttcatgttaggtgtttgatactttcttgaatataggatttttgtgtgtgtggtgtagtataaataatgtccatagttgaataccaaaatgtggatattgtacagtgggagttatggctgccttcttcattgcttgatcttagttgttggttgcaatcttctaacttagagtatgatgcttgaagagatttggatgatgttggagatgtgctttggtgtagttcatctctcccgaatcaagagtctggtttatggggctaaggtagaggctgccatcgccattggattcaatgacttcattacatatgctctgagaggcattgggttctaccagaaggataacatggagatcaagaaggccaatggcaatggcacactgatccctgagcagatctttgaaaagactaggagaagttctagatgaattgatgcttggctgaagagggatgtcagatttgtacaatgctcacccacaaagaataatacatttctccaatgtccactgttttgaaaaatacctccattccaatgtttaacattctaacgatgtctgaatttattgtaaagagacacatgattgttcattgttgtaacttatgtacaatatatgcgtgtgtgaaataaagatcatcttggagcaccggcatcaatgttatcaatcttctcaaatttcaaattatcctggtctcttcgtgaaaccataaaagtttattaagtcacttatctgagtggtctaaaagtctagcatatttttgttcctttgcctgtcgagacggatcagctggcatgaataatatccggtgaatactgcaagagctattcatgatcccccgtgaactagctggtatgatataacttagtttgtgaagtgctaatgccacaaacaggaaataggatgatacttcatgtatatttttttctttcttgaaaatgaactataggatactgtttacaatccataccaagcttctgcagttatcaacatttttctatgttcaaccttgttaacatattaagacgagtttttctttcatttttcaaaaaaataaatcaa

SEQ ID NO: 75740 - DNA, 2699 bp, Zea Mays
gcgtctccctccccacgaaacccccttccccaaactacctctgctgctctccttgatccccaattctctcttctgcctacttgcctccatctcggcctccacctccactcctcgcccccgaacatccggcgctgtccgcaccccgactcctctcgtcctttcgcggtcgcgatggtggcgtccatggcgtcgccgtaggggcgatcgatctaggagaaagtgctggagaatgtggcgtcgtaccaccagcaacaacggaggcagaagctacgcaagagcctcacctacaccggcggcgagctctcgttcactgtctgggcccgtggggatgaccccacctccacgtccgtcgaggcacagaaggaggacatgcctcttgagcacgtcttcaaaatcatcagatctgatggcaaaagtgtgtgtttatggttcctgagtcagatgatctttcttcagttttagatgtgatagatattggtataaaagataaaaactagaatgctatgtctgtcaaaggagctttcttcagttcaggtactgctctgctttattagccatccagccgatggatattttctatatgtgtaccgcccctgcactttcaaacacttatgttcaatgtttacaatcacattttttcttctcatagatttactatgtggttgtggtcttagtttggcttgtaggttaatttgtatactcatgtcattttagtttttctatgttgattcagtatgtcttaatttagttaatttcaattcttgatgctaataatatggatagattgtgacactactttctggcttgagcagaaatgggtttgttgcatatagcagaatatagttgtcgtaactggcaacaatgacccctctatggatgatctgaaaactattccgtggtcatgtagttaaatatagctgaatatacattactatgttttattaatcttatttggtttttctctcaaaagaacacacctctccatctttcagtgcttggtggatcaccgtctaaacgatccaccaccagaaccgccctaccccaagatagctatgtgcaggttcaactactcatttagatattggcagctccatctcagtcgttgtacccattcaacgccgagctggtggcagcgatgcaggagatgatccagccgaggtgtacaagtacatgttagtggacgtcacctgccaaagatacacagtttctactgtttttcagttggagaaaatatttaagacaacattttcatcgtttgttctccatatggggcttgtttcacgccacttgaaggaaggagggaatgatggtgttaagttcggacaatacatctacacatctatgaaatgtacaaccacgatgtagagcatagagtttctaaagttgggtaagctgtttggctgttttatagaaatttgtatcaacatcaacatagatttttagtcccaaacaaattggggtaggctagatttgaaacccaacaagaagtcaccaaaaagagaaagagagataaaggggaggggaaaagcttttgagagaactaaaagagaaaatgcctaatcacggttcgggcacgtggatagcttctttccaagcatttctatccaaacacaactcctttgggtgtgtggggtgatattagaagcttcatgttaggtgtttgatactttcttgaatataggatttttgtgtgtgtggtgtagtataaataatgtccatagttgaataccaaaatgtggatattgtacagtgggagttatggctgccttcttcattgcttgatcttagttgttggttgcaatcttctaacttagagtatgatgcttgaagagatttggatgatgttggagatgtgctttggtgtagttcatctctcccgaatcaagagtctggtttatggggctaaggtagaggctgccatcgccattggattcaatgacttcattacatatgctctgagaggcattgggttctaccagaaggataacatggagatcaagaaggccaatggcaatggcacactgatccctgagcagatctttgaaaagactaggagaagttctagatgaattgatgcttggctgaagagggatgtcagatttgtacaatgctcacccacaaagaataatacatttctccaatgtccactgttttgaaaaatacctccattccaatgtttaacattctaacgatgtctgaatttattgtaaagagacacatgattgttcattgttgtaacttatgtacaatatatgcgtgtgtgaaataaagatcatcttggagcaccggcatcaatgttatcaatcttctcaaatttcaaattatcctggtctcttcgtgaaaccataaaagtttattaagtcacttatctgagtggtctaaaagtctagcatatttttgttcctttgcctgtcgagacggatcagctggcatgaataatatccggtgaatactgcaagagctattcatgatcccccgtgaactagctggtatgatataacttagtttgtgaagtgctaatgccacaaacaggaaataggatgatacttcatgtatatttttttctttcttgaaaatgaactataggatactgtttacaatccataccaagcttctgcagttatcaacatttttctatgttcaaccttgttaacatattaagacgagtttttctttcatttttcaaaaaaataaatcaa

SEQ ID NO: 75741 - DNA, 2108 bp, Zea Mays
gcgtctccctccccacgaaacccccttccccaaactacctctgctgctctccttgatccccaattctctcttctgcctacttgcctccatctcggcctccacctccactcctcgcccccgaacatccggcgctgtccgcaccccgactcctctcgtcctttcgcggtcgcgatggtggcgtccatggcgtcgccgtaggggcgatcgatctaggagaaagtgctggagaatgtggcgtcgtaccaccagcaacaacggaggcagaagctacgcaagagcctcacctacaccggcggcgagctctcgttcactgtctgggcccgtggggatgaccccacctccacgtccgtcgaggcacagaaggaggacatgcctcttgagcacgtcttcaaaatcatcagatctgatggcaaaagtgtgtgtttatggttcctgagtcagatgatctttcttcagttttagatgtgatagatattggtataaaagataaaaactagaatgctatgtctgtcaaaggagctttcttcagttcaggcagctccatctcagtcgttgtacccattcaacgccgagctggtggcagcgatgcaggagatgatccagccgaggtgtacaagtacattttttcagttggagaaaatatttaagacaacattttcatcgtttgttctccatatggggcttgtttcacgccacttgaaggaaggagggaatgatggtgttaagttcggacaatacatctacacatctatgaaatgtacaaccacgatgtagagcatagagtttctaaagttgggtaagctgtttggctgttttatagaaatttgtatcaacatcaacatagatttttagtcccaaacaaattggggtaggctagatttgaaacccaacaagaagtcaccaaaaagagaaagagagataaaggggaggggaaaagcttttgagagaactaaaagagaaaatgcctaatcacggttcgggcacgtggatagcttctttccaagcatttctatccaaacacaactcctttgggtgtgtggggtgatattagaagcttcatgttaggtgtttgatactttcttgaatataggatttttgtgtgtgtggtgtagtataaataatgtccatagttgaataccaaaatgtggatattgtacagtgggagttatggctgccttcttcattgcttgatcttagttgttggttgcaatcttctaacttagagtatgatgcttgaagagatttggatgatgttggagatgtgctttggtgtagttcatctctcccgaatcaagagtctggtttatggggctaaggtagaggctgccatcgccattggattcaatgacttcattacatatgctctgagaggcattgggttctaccagaaggataacatggagatcaagaaggccaatggcaatggcacactgatccctgagcagatctttgaaaagactaggagaagttctagatgaattgatgcttggctgaagagggatgtcagatttgtacaatgctcacccacaaagaataatacatttctccaatgtccactgttttgaaaaatacctccattccaatgtttaacattctaacgatgtctgaatttattgtaaagagacacatgattgttcattgttgtaacttatgtacaatatatgcgtgtgtgaaataaagatcatcttggagcaccggcatcaatgttatcaatcttctcaaatttcaaattatcctggtctcttcgtgaaaccataaaagtttattaagtcacttatctgagtggtctaaaagtctagcatatttttgttcctttgcctgtcgagacggatcagctggcatgaataatatccggtgaatactgcaagagctattcatgatcccccgtgaactagctggtatgatataacttagtttgtgaagtgctaatgccacaaacaggaaataggatgatacttcatgtatatttttttctttcttgaaaatgaactataggatactgtttacaatccataccaagcttctgcagttatcaacatttttctatgttcaaccttgttaacatattaagacgagtttttctttcatttttcaaaaaaataaatcaa

SEQ ID NO: 75742 - DNA, 2144 bp, Zea Mays
caaagcgtctccctccccacgaaacccccttccccaaactacctctgctgctctccttgatccccaattctctcttctgcctacttgcctccatctcggcctccacctccactcctcgcccccgaacatccggcgctgtccgcaccccgactcctctcgtcctttcgcggtcgcgatggtggcgtccatggcgtcgccgtaggggcgatcgatctaggagaaagtgctggagaatgtggcgtcgtaccaccagcaacaacggaggcagaagctacgcaagagcctcacctacaccggcggcgagctctcgttcactgtctgggcccgtggggatgaccccacctccacgtccgtcgaggcacagaaggaggacatgcctcttgagcacgtcttcaaaatcatcagatctgatggcaaaagtgtgtgtttatggttcctgagtcagatgatctttcttcagttttagatattggtataaaagataaaaactagaatgctatgtctgtcaaaggagctttcttcagttcaggcagctccatctcagtcgttgtacccattcaacgccgagctggtggcagcgatgcaggagatgatccagccgaggtgtacaagtacatgttagtggacgtcacctgccaaagatacacagtttctactgtttttcagttggagaaaatatttaagacaacattttcatcgtttgttctccatatggggcttgtttcacgccacttgaaggaaggagggaatgatggtgttaagttcggacaatacatctacacatctatgaaatgtacaaccacgatgtagagcatagagtttctaaagttgggtaagctgtttggctgttttatagaaatttgtatcaacatcaacatagatttttagtcccaaacaaattggggtaggctagatttgaaacccaacaagaagtcaccaaaaagagaaagagagataaaggggaggggaaaagcttttgagagaactaaaagagaaaatgcctaatcacggttcgggcacgtggatagcttctttccaagcatttctatccaaacacaactcctttgggtgtgtggggtgatattagaagcttcatgttaggtgtttgatactttcttgaatataggatttttgtgtgtgtggtgtagtataaataatgtccatagttgaataccaaaatgtggatattgtacagtgggagttatggctgccttcttcattgcttgatcttagttgttggttgcaatcttctaacttagagtatgatgcttgaagagatttggatgatgttggagatgtgctttggtgtagttcatctctcccgaatcaagagtctggtttatggggctaaggtagaggctgccatcgccattggattcaatgacttcattacatatgctctgagaggcattgggttctaccagaaggataacatggagatcaagaaggccaatggcaatggcacactgatccctgagcagatctttgaaaagactaggagaagttctagatgaattgatgcttggctgaagagggatgtcagatttgtacaatgctcacccacaaagaataatacatttctccaatgtccactgttttgaaaaatacctccattccaatgtttaacattctaacgatgtctgaatttattgtaaagagacacatgattgttcattgttgtaacttatgtacaatatatgcgtgtgtgaaataaagatcatcttggagcaccggcatcaatgttatcaatcttctcaaatttcaaattatcctggtctcttcgtgaaaccataaaagtttattaagtcacttatctgagtggtctaaaagtctagcatatttttgttcctttgcctgtcgagacggatcagctggcatgaataatatccggtgaatactgcaagagctattcatgatcccccgtgaactagctggtatgatataacttagtttgtgaagtgctaatgccacaaacaggaaataggatgatacttcatgtatatttttttctttcttgaaaatgaactataggatactgtttacaatccataccaagcttctgcagttatcaacatttttctatgttcaaccttgttaacatattaagacgagtttttctttcatttttcaaaaaaataaatcaa

SEQ ID NO: 75743 - DNA, 2665 bp, Zea Mays
caaagcgtctccctccccacgaaacccccttccccaaactacctctgctgctctccttgatccccaattctctcttctgcctacttgcctccatctcggcctccacctccactcctcgcccccgaacatccggcgctgtccgcaccccgactcctctcgtcctttcgcggtcgcgatggtggcgtccatggcgtcgccgtaggggcgatcgatctaggagaaagtgctggagaatgtggcgtcgtaccaccagcaacaacggaggcagaagctacgcaagagcctcacctacaccggcggcgagctctcgttcactgtctgggcccgtggggatgaccccacctccacgtccgtcgaggcacagaaggaggacatgcctcttgagcacgtcttcaaaatcatcagatctgatggcaaaagtgtgtgtttatggttcctgagtcagatgatctttcttcagttttagatgtgatagatattggtataaaagataaaaactagaatgctatgtctgtcaaaggagctttcttcagttcaggtactgctctgctttattagccatccagccgatggatattttctatatgtgtaccgcccctgcactttcaaacacttatgttcaatgtttacaatcacattttttcttctcatagatttactatgtggttgtggtcttagtttggcttgtaggttaatttgtatactcatgtcattttagtttttctatgttgattcagtatgtcttaatttagttaatttcaattcttgatgctaataatatggatagattgtgacactactttctggcttgagcagaaatgggtttgttgcatatagcagaatatagttgtcgtaactggcaacaatgacccctctatggatgatctgaaaactattccgtggtcatgtagttaaatatagctgaatatacattactatgttttattaatcttatttggtttttctctcaaaagaacacacctctccatctttcagtgcttggtggatcaccgtctaaacgatccaccaccagaaccgccctaccccaagatagctatgtgcaggttcaactactcatttagatattggtacagcctgtaatagactttggtacaataggatttggttttgctattcacttagtttttagttccaaacaaccaacaaattgcatgtcctttaggaaaaatatcacatgaatatcagtaatataacactgataataaaaaatgcttcgattctatatatttttcatgttataaggttgaaaacattctgtctcacggatcagaatgtgtacaaggcgacatactgtgtttacaaatatatttaaccataataaaaacatatttggaaactgaatatcatttaagtccaaaaatgtttttgctgactgttcattaagctagagtaaagagtaaacttagcatttcttttctatatctctctttcgtgctcatgccgccgcagtctcctccatcccacctttcctacgcaggcagctccatctcagtcgttgtacccattcaacgccgagctggtggcagcgatgcaggagatgatccagccgaggtgtacaagtacatgttagtggacgtcacctgccaaagatacacagtttctactgtttttcagttggagaaaatatttaagacaacattttcatcgtttgttctccatatggggcttgtttcacgccacttgaaggaaggagggaatgatggtgttaagttcggacaatacatctacacatctatgaaatgtacaaccacgatgtagagcatagagtttctaaaagatttggatgatgttggagatgtgctttggtgtagttcatctctcccgaatcaagagtctggtttatggggctaaggtagaggctgccatcgccattggattcaatgacttcattacatatgctctgagaggcattgggttctaccagaaggataacatggagatcaagaaggccaatggcaatggcacactgatccctgagcagatctttgaaaagactaggagaagttctagatgaattgatgcttggctgaagagggatgtcagatttgtacaatgctcacccacaaagaataatacatttctccaatgtccactgttttgaaaaatacctccattccaatgtttaacattctaacgatgtctgaatttattgtaaagagacacatgattgttcattgttgtaacttatgtacaatatatgcgtgtgtgaaataaagatcatcttggagcaccggcatcaatgttatcaatcttctcaaatttcaaattatcctggtctcttcgtgaaaccataaaagtttattaagtcacttatctgagtggtctaaaagtctagcatatttttgttcctttgcctgtcgagacggatcagctggcatgaataatatccggtgaatactgcaagagctattcatgatcccccgtgaactagctggtatgatataacttagtttgtgaagtgctaatgccacaaacaggaaataggatgatacttcatgtatatttttttctttcttgaaaatgaactataggatactgtttacaatccataccaagcttctgcagttatcaacatttttctatgttcaaccttgttaacatattaagacgagtttttctttcatttttcaaaaaaataaatcaa

SEQ ID NO: 75744 - DNA, 2867 bp, Zea Mays
atcaaagcgtctccctccccacgaaacccccttccccaaactacctctgctgctctccttgatccccaattctctcttctgcctacttgcctccatctcggcctccacctccactcctcgcccccgaacatccggcgctgtccgcaccccgactcctctcgtcctttcgcggtcgcgatggtggcgtccatggcgtcgccgtaggggcgatcgatctaggagaaagtgctggagaatgtggcgtcgtaccaccagcaacaacggaggcagaagctacgcaagagcctcacctacaccggcggcgagctctcgttcactgtctgggcccgtggggatgaccccacctccacgtccgtcgaggcacagaaggaggacatgcctcttgagcacgtcttcaaaatcatcagatctgatggcaaaagtgtgtgtttatggttcctgagtcagatgatctttcttcagttttaggtacttttctgctttaatatagctcatgcaatatgatttattttaacacatatttgaaatagaactggattgtgcatattttgtaaagtgtttgttctacattttgtaattcgtattattcatttttcctttagtttttctctttctacaactcctatctctttacaatcaaatttcagatgtgatagatattggtataaaagataaaaactagaatgctatgtctgtcaaaggagctttcttcagttcaggtactgctctgctttattagccatccagccgatggatattttctatatgtgtaccgcccctgcactttcaaacacttatgttcaatgtttacaatcacattttttcttctcatagatttactatgtggttgtggtcttagtttggcttgtaggttaatttgtatactcatgtcattttagtttttctatgttgattcagtatgtcttaatttagttaatttcaattcttgatgctaataatatggatagattgtgacactactttctggcttgagcagaaatgggtttgttgcatatagcagaatatagttgtcgtaactggcaacaatgacccctctatggatgatctgaaaactattccgtggtcatgtagttaaatatagctgaatatacattactatgttttattaatcttatttggtttttctctcaaaagaacacacctctccatctttcagtgcttggtggatcaccgtctaaacgatccaccaccagaaccgccctaccccaagatagctatgtgcaggttcaactactcatttagatattggtacagcctgtaatagactttggtacaataggatttggttttgctattcacttagtttttagttccaaacaaccaacaaattgcatgtcctttaggaaaaatatcacatgaatatcagtaatataacactgataataaaaaatgcttcgattctatatatttttcatgttataaggttgaaaacattctgtctcacggatcagaatgtgtacaaggcgacatactgtgtttacaaatatatttaaccataataaaaacatatttggaaactgaatatcatttaagtccaaaaatgtttttgctgactgttcattaagctagagtaaagagtaaacttagcatttcttttctatatctctctttcgtgctcatgccgccgcagtctcctccatcccacctttcctacgcaggcagctccatctcagtcgttgtacccattcaacgccgagctggtggcagcgatgcaggagatgatccagccgaggtgtacaagtacatgttagtggacgtcacctgccaaagatacacagtttctactgtttttcagttggagaaaatatttaagacaacattttcatcgtttgttctccatatggggcttgtttcacgccacttgaaggaaggagggaatgatggtgttaagttcggacaatacatctacacatctatgaaatgtacaaccacgatgtagagcatagagtttctaaagttggagtatgatgcttgaagagatttggatgatgttggagatgtgctttggtgtagttcatctctcccgaatcaagagtctggtttatggggctaaggtagaggctgccatcgccattggattcaatgacttcattacatatgctctgagaggcattgggttctaccagaaggataacatggagatcaagaaggccaatggcaatggcacactgatccctgagcagatctttgaaaagactaggagaagttctagatgaattgatgcttggctgaagagggatgtcagatttgtacaatgctcacccacaaagaataatacatttctccaatgtccactgttttgaaaaatacctccattccaatgtttaacattctaacgatgtctgaatttattgtaaagagacacatgattgttcattgttgtaacttatgtacaatatatgcgtgtgtgaaataaagatcatcttggagcaccggcatcaatgttatcaatcttctcaaatttcaaattatcctggtctcttcgtgaaaccataaaagtttattaagtcacttatctgagtggtctaaaagtctagcatatttttgttcctttgcctgtcgagacggatcagctggcatgaataatatccggtgaatactgcaagagctattcatgatcccccgtgaactagctggtatgatataacttagtttgtgaagtgctaatgccacaaacaggaaataggatgatacttcatgtatatttttttctttcttgaaaatgaactataggatactgtttacaatccataccaagcttctgcagttatcaacatttttctatgttcaaccttgttaacatattaagacgagtttttctttcatttttcaaaaaaataaatcaa

SEQ ID NO: 75745 - DNA, 2187 bp, Zea Mays
aatcatcaaagcgtctccctccccacgaaacccccttccccaaactacctctgctgctctccttgatccccaattctctcttctgcctacttgcctccatctcggcctccacctccactcctcgcccccgaacatccggcgctgtccgcaccccgactcctctcgtcctttcgcggtcgcgatggtggcgtccatggcgtcgccgtaggggcgatcgatctaggagaaagtgctggagaatgtggcgtcgtaccaccagcaacaacggaggcagaagctacgcaagagcctcacctacaccggcggcgagctctcgttcactgtctgggcccgtggggatgaccccacctccacgtccgtcgaggcacagaaggaggacatgcctcttgagcacgtcttcaaaatcatcagatctgatggcaaaagtgtgtgtttatggttcctgagtcagatgatctttcttcagttttagatgtgatagatattggtataaaagataaaaactagaatgctatgtctgtcaaaggagctttcttcagttcagtctcctccatcccacctttcctacgcaggcagctccatctcagtcgttgtacccattcaacgccgagctggtggcagcgatgcaggagatgatccagccgaggtgtacaagtacatgttagtggacgtcacctgccaaagatacacagtttctactgtttttcagttggagaaaatatttaagacaacattttcatcgtttgttctccatatggggcttgtttcacgccacttgaaggaaggagggaatgatggtgttaagttcggacaatacatctacacatctatgaaatgtacaaccacgatgtagagcatagagtttctaaagttgggtaagctgtttggctgttttatagaaatttgtatcaacatcaacatagatttttagtcccaaacaaattggggtaggctagatttgaaacccaacaagaagtcaccaaaaagagaaagagagataaaggggaggggaaaagcttttgagagaactaaaagagaaaatgcctaatcacggttcgggcacgtggatagcttctttccaagcatttctatccaaacacaactcctttgggtgtgtggggtgatattagaagcttcatgttaggtgtttgatactttcttgaatataggatttttgtgtgtgtggtgtagtataaataatgtccatagttgaataccaaaatgtggatattgtacagtgggagttatggctgccttcttcattgcttgatcttagttgttggttgcaatcttctaacttagagtatgatgcttgaagagatttggatgatgttggagatgtgctttggtgtagttcatctctcccgaatcaagagtctggtttatggggctaaggtagaggctgccatcgccattggattcaatgacttcattacatatgctctgagaggcattgggttctaccagaaggataacatggagatcaagaaggccaatggcaatggcacactgatccctgagcagatctttgaaaagactaggagaagttctagatgaattgatgcttggctgaagagggatgtcagatttgtacaatgctcacccacaaagaataatacatttctccaatgtccactgttttgaaaaatacctccattccaatgtttaacattctaacgatgtctgaatttattgtaaagagacacatgattgttcattgttgtaacttatgtacaatatatgcgtgtgtgaaataaagatcatcttggagcaccggcatcaatgttatcaatcttctcaaatttcaaattatcctggtctcttcgtgaaaccataaaagtttattaagtcacttatctgagtggtctaaaagtctagcatatttttgttcctttgcctgtcgagacggatcagctggcatgaataatatccggtgaatactgcaagagctattcatgatcccccgtgaactagctggtatgatataacttagtttgtgaagtgctaatgccacaaacaggaaataggatgatacttcatgtatatttttttctttcttgaaaatgaactataggatactgtttacaatccataccaagcttctgcagttatcaacatttttctatgttcaaccttgttaacatattaagacgagtttttctttcatttttcaaaaaaataaatcaa

SEQ ID NO: 75746 - DNA, 3120 bp, Zea Mays
caatcatcaaagcgtctccctccccacgaaacccccttccccaaactacctctgctgctctccttgatccccaattctctcttctgcctacttgcctccatctcggcctccacctccactcctcgcccccgaacatccggcgctgtccgcaccccgactcctctcgtcctttcgcggtcgcgatggtggcgtccatggcgtcgccgtaggggcgatcgatctaggagaaagtgctggagaatgtggcgtcgtaccaccagcaacaacggaggcagaagctacgcaagagcctcacctacaccggcggcgagctctcgttcactgtctgggcccgtggggatgaccccacctccacgtccgtcgaggcacagaaggaggacatgcctcttgagcacgtcttcaaaatcatcagatctgatggcaaaagtgtgtgtttatggttcctgagtcagatgatctttcttcagttttagatgtgatagatattggtataaaagataaaaactagaatgctatgtctgtcaaaggagctttcttcagttcaggtactgctctgctttattagccatccagccgatggatattttctatatgtgtaccgcccctgcactttcaaacacttatgttcaatgtttacaatcacattttttcttctcatagatttactatgtggttgtggtcttagtttggcttgtaggttaatttgtatactcatgtcattttagtttttctatgttgattcagtatgtcttaatttagttaatttcaattcttgatgctaataatatggatagattgtgacactactttctggcttgagcagaaatgggtttgttgcatatagcagaatatagttgtcgtaactggcaacaatgacccctctatggatgatctgaaaactattccgtggtcatgtagttaaatatagctgaatatacattactatgttttattaatcttatttggtttttctctcaaaagaacacacctctccatctttcagtgcttggtggatcaccgtctaaacgatccaccaccagaaccgccctaccccaagatagctatgtgcaggttcaactactcatttagatattggtacagcctgtaatagactttggtacaataggatttggttttgctattcacttagtttttagttccaaacaaccaacaaattgcatgtcctttaggaaaaatatcacatgaatatcagtaatataacactgataataaaaaatgcttcgattctatatatttttcatgttataaggttgaaaacattctgtctcacggatcagaatgtgtacaaggcgacatactgtgtttacaaatatatttaaccataataaaaacatatttggaaactgaatatcatttaagtccaaaaatgtttttgctgactgttcattaagctagagtaaagagtaaacttagcatttcttttctatatctctctttcgtgctcatgccgccgcagtctcctccatcccacctttcctacgcaggcagctccatctcagtcgttgtacccattcaacgccgagctggtggcagcgatgcaggagatgatccagccgaggtgtacaagtacatgttagtggacgtcacctgccaaagatacacagtttctactgtttttcagttggagaaaatatttaagacaacattttcatcgtttgttctccatatggggcttgtttcacgccacttgaaggaaggagggaatgatggtgttaagttcggacaatacatctacacatctatgaaatgtacaaccacgatgtagagcatagagtttctaaagttgggtaagctgtttggctgttttatagaaatttgtatcaacatcaacatagatttttagtcccaaacaaattggggtaggctagatttgaaacccaacaagaagtcaccaaaaagagaaagagagataaaggggaggggaaaagcttttgagagaactaaaagagaaaatgcctaatcacggttcgggcacgtggatagcttctttccaagcatttctatccaaacacaactcctttgggtgtgtggggtgatattagaagcttcatgttaggtgtttgatactttcttgaatataggatttttgtgtgtgtggtgtagtataaataatgtccatagttgaataccaaaatgtggatattgtacagtgggagttatggctgccttcttcattgcttgatcttagttgttggttgcaatcttctaacttagagtatgatgcttgaagagatttggatgatgttggagatgtgctttggtgtagttcatctctcccgaatcaagagtctggtttatggggctaaggtagaggctgccatcgccattggattcaatgacttcattacatatgctctgagaggcattgggttctaccagaaggataacatggagatcaagaaggccaatggcaatggcacactgatccctgagcagatctttgaaaagactaggagaagttctagatgaattgatgcttggctgaagagggatgtcagatttgtacaatgctcacccacaaagaataatacatttctccaatgtccactgttttgaaaaatacctccattccaatgtttaacattctaacgatgtctgaatttattgtaaagagacacatgattgttcattgttgtaacttatgtacaatatatgcgtgtgtgaaataaagatcatcttggagcaccggcatcaatgttatcaatcttctcaaatttcaaattatcctggtctcttcgtgaaaccataaaagtttattaagtcacttatctgagtggtctaaaagtctagcatatttttgttcctttgcctgtcgagacggatcagctggcatgaataatatccggtgaatactgcaagagctattcatgatcccccgtgaactagctggtatgatataacttagtttgtgaagtgctaatgccacaaacaggaaataggatgatacttcatgtatatttttttctttcttgaaaatgaactataggatactgtttacaatccataccaagcttctgcagttatcaacatttttctatgttcaaccttgttaacatattaagacgagtttttctttcatttttcaaaaaaataaatcaa

SEQ ID NO: 75747 - DNA, 3114 bp, Zea Mays
catcaatcatcaaagcgtctccctccccacgaaacccccttccccaaactacctctgctgctctccttgatccccaattctctcttctgcctacttgcctccatctcggcctccacctccactcctcgcccccgaacatccggcgctgtccgcaccccgactcctctcgtcctttcgcggtcgcgatggtggcgtccatggcgtcgccgtaggggcgatcgatctaggagaaagtgctggagaatgtggcgtcgtaccaccagcaacaacggaggcagaagctacgcaagagcctcacctacaccggcggcgagctctcgttcactgtctgggcccgtggggatgaccccacctccacgtccgtcgaggcacagaaggaggacatgcctcttgagcacgtcttcaaaatcatcagatctgatggcaaaagtgtgtgtttatggttcctgagtcagatgatctttcttcagttttagatattggtataaaagataaaaactagaatgctatgtctgtcaaaggagctttcttcagttcaggtactgctctgctttattagccatccagccgatggatattttctatatgtgtaccgcccctgcactttcaaacacttatgttcaatgtttacaatcacattttttcttctcatagatttactatgtggttgtggtcttagtttggcttgtaggttaatttgtatactcatgtcattttagtttttctatgttgattcagtatgtcttaatttagttaatttcaattcttgatgctaataatatggatagattgtgacactactttctggcttgagcagaaatgggtttgttgcatatagcagaatatagttgtcgtaactggcaacaatgacccctctatggatgatctgaaaactattccgtggtcatgtagttaaatatagctgaatatacattactatgttttattaatcttatttggtttttctctcaaaagaacacacctctccatctttcagtgcttggtggatcaccgtctaaacgatccaccaccagaaccgccctaccccaagatagctatgtgcaggttcaactactcatttagatattggtacagcctgtaatagactttggtacaataggatttggttttgctattcacttagtttttagttccaaacaaccaacaaattgcatgtcctttaggaaaaatatcacatgaatatcagtaatataacactgataataaaaaatgcttcgattctatatatttttcatgttataaggttgaaaacattctgtctcacggatcagaatgtgtacaaggcgacatactgtgtttacaaatatatttaaccataataaaaacatatttggaaactgaatatcatttaagtccaaaaatgtttttgctgactgttcattaagctagagtaaagagtaaacttagcatttcttttctatatctctctttcgtgctcatgccgccgcagtctcctccatcccacctttcctacgcaggcagctccatctcagtcgttgtacccattcaacgccgagctggtggcagcgatgcaggagatgatccagccgaggtgtacaagtacatgttagtggacgtcacctgccaaagatacacagtttctactgtttttcagttggagaaaatatttaagacaacattttcatcgtttgttctccatatggggcttgtttcacgccacttgaaggaaggagggaatgatggtgttaagttcggacaatacatctacacatctatgaaatgtacaaccacgatgtagagcatagagtttctaaagttgggtaagctgtttggctgttttatagaaatttgtatcaacatcaacatagatttttagtcccaaacaaattggggtaggctagatttgaaacccaacaagaagtcaccaaaaagagaaagagagataaaggggaggggaaaagcttttgagagaactaaaagagaaaatgcctaatcacggttcgggcacgtggatagcttctttccaagcatttctatccaaacacaactcctttgggtgtgtggggtgatattagaagcttcatgttaggtgtttgatactttcttgaatataggatttttgtgtgtgtggtgtagtataaataatgtccatagttgaataccaaaatgtggatattgtacagtgggagttatggctgccttcttcattgcttgatcttagttgttggttgcaatcttctaacttagagtatgatgcttgaagagatttggatgatgttggagatgtgctttggtgtagttcatctctcccgaatcaagagtctggtttatggggctaaggtagaggctgccatcgccattggattcaatgacttcattacatatgctctgagaggcattgggttctaccagaaggataacatggagatcaagaaggccaatggcaatggcacactgatccctgagcagatctttgaaaagactaggagaagttctagatgaattgatgcttggctgaagagggatgtcagatttgtacaatgctcacccacaaagaataatacatttctccaatgtccactgttttgaaaaatacctccattccaatgtttaacattctaacgatgtctgaatttattgtaaagagacacatgattgttcattgttgtaacttatgtacaatatatgcgtgtgtgaaataaagatcatcttggagcaccggcatcaatgttatcaatcttctcaaatttcaaattatcctggtctcttcgtgaaaccataaaagtttattaagtcacttatctgagtggtctaaaagtctagcatatttttgttcctttgcctgtcgagacggatcagctggcatgaataatatccggtgaatactgcaagagctattcatgatcccccgtgaactagctggtatgatataacttagtttgtgaagtgctaatgccacaaacaggaaataggatgatacttcatgtatatttttttctttcttgaaaatgaactataggatactgtttacaatccataccaagcttctgcagttatcaacatttttctatgttcaaccttgttaacatattaagacgagtttttctttcatttttcaaaaaaataaatcaa

SEQ ID NO: 75748 - DNA, 2601 bp, Zea Mays
ctcaaactcatcaatcatcaaagcgtctccctccccacgaaacccccttccccaaactacctctgctgctctccttgatccccaattctctcttctgcctacttgcctccatctcggcctccacctccactcctcgcccccgaacatccggcgctgtccgcaccccgactcctctcgtcctttcgcggtcgcgatggtggcgtccatggcgtcgccgtaggggcgatcgatctaggagaaagtgctggagaatgtggcgtcgtaccaccagcaacaacggaggcagaagctacgcaagagcctcacctacaccggcggcgagctctcgttcactgtctgggcccgtggggatgaccccacctccacgtccgtcgaggcacagaaggaggacatgcctcttgagcacgtcttcaaaatcatcagatctgatggcaaaagtgtgtgtttatggttcctgagtcagatgatctttcttcagttttagtgcttggtggatcaccgtctaaacgatccaccaccagaaccgccctaccccaagatagctatgtgcaggttcaactactcatttagatattggtacagcctgtaatagactttggtacaataggatttggttttgctattcacttagtttttagttccaaacaaccaacaaattgcatgtcctttaggaaaaatatcacatgaatatcagtaatataacactgataataaaaaatgcttcgattctatatatttttcatgttataaggttgaaaacattctgtctcacggatcagaatgtgtacaaggcgacatactgtgtttacaaatatatttaaccataataaaaacatatttggaaactgaatatcatttaagtccaaaaatgtttttgctgactgttcattaagctagagtaaagagtaaacttagcatttcttttctatatctctctttcgtgctcatgccgccgcagtctcctccatcccacctttcctacgcaggcagctccatctcagtcgttgtacccattcaacgccgagctggtggcagcgatgcaggagatgatccagccgaggtgtacaagtacatgttagtggacgtcacctgccaaagatacacagtttctactgtttttcagttggagaaaatatttaagacaacattttcatcgtttgttctccatatggggcttgtttcacgccacttgaaggaaggagggaatgatggtgttaagttcggacaatacatctacacatctatgaaatgtacaaccacgatgtagagcatagagtttctaaagttgggtaagctgtttggctgttttatagaaatttgtatcaacatcaacatagatttttagtcccaaacaaattggggtaggctagatttgaaacccaacaagaagtcaccaaaaagagaaagagagataaaggggaggggaaaagcttttgagagaactaaaagagaaaatgcctaatcacggttcgggcacgtggatagcttctttccaagcatttctatccaaacacaactcctttgggtgtgtggggtgatattagaagcttcatgttaggtgtttgatactttcttgaatataggatttttgtgtgtgtggtgtagtataaataatgtccatagttgaataccaaaatgtggatattgtacagtgggagttatggctgccttcttcattgcttgatcttagttgttggttgcaatcttctaacttagagtatgatgcttgaagagatttggatgatgttggagatgtgctttggtgtagttcatctctcccgaatcaagagtctggtttatggggctaaggtagaggctgccatcgccattggattcaatgacttcattacatatgctctgagaggcattgggttctaccagaaggataacatggagatcaagaaggccaatggcaatggcacactgatccctgagcagatctttgaaaagactaggagaagttctagatgaattgatgcttggctgaagagggatgtcagatttgtacaatgctcacccacaaagaataatacatttctccaatgtccactgttttgaaaaatacctccattccaatgtttaacattctaacgatgtctgaatttattgtaaagagacacatgattgttcattgttgtaacttatgtacaatatatgcgtgtgtgaaataaagatcatcttggagcaccggcatcaatgttatcaatcttctcaaatttcaaattatcctggtctcttcgtgaaaccataaaagtttattaagtcacttatctgagtggtctaaaagtctagcatatttttgttcctttgcctgtcgagacggatcagctggcatgaataatatccggtgaatactgcaagagctattcatgatcccccgtgaactagctggtatgatataacttagtttgtgaagtgctaatgccacaaacaggaaataggatgatacttcatgtatatttttttctttcttgaaaatgaactataggatactgtttacaatccataccaagcttctgcagttatcaacatttttctatgttcaaccttgttaacatattaagacgagtttttctttcatttttcaaaaaaataaatcaa

SEQ ID NO: 75749 - DNA, 2175 bp, Zea Mays
cttactcaaactcatcaatcatcaaagcgtctccctccccacgaaacccccttccccaaactacctctgctgctctccttgatccccaattctctcttctgcctacttgcctccatctcggcctccacctccactcctcgcccccgaacatccggcgctgtccgcaccccgactcctctcgtcctttcgcggtcgcgatggtggcgtccatggcgtcgccgtaggggcgatcgatctaggagaaagtgctggagaatgtggcgtcgtaccaccagcaacaacggaggcagaagctacgcaagagcctcacctacaccggcggcgagctctcgttcactgtctgggcccgtggggatgaccccacctccacgtccgtcgaggcacagaaggaggacatgcctcttgagcacgtcttcaaaatcatcagatctgatggcaaaagtgtgtgtttatggttcctgagtcagatgatctttcttcagttttagatgtgatagatattggtataaaagataaaaactagaatgctatgtctgtcaaaggagctttcttcagttcaggcagctccatctcagtcgttgtacccattcaacgccgagctggtggcagcgatgcaggagatgatccagccgaggtgtacaagtacatgttagtggacgtcacctgccaaagatacacagtttctactgtttttcagttggagaaaatatttaagacaacattttcatcgtttgttctccatatggggcttgtttcacgccacttgaaggaaggagggaatgatggtgttaagttcggacaatacatctacacatctatgaaatgtacaaccacgatgtagagcatagagtttctaaagttgggtaagctgtttggctgttttatagaaatttgtatcaacatcaacatagatttttagtcccaaacaaattggggtaggctagatttgaaacccaacaagaagtcaccaaaaagagaaagagagataaaggggaggggaaaagcttttgagagaactaaaagagaaaatgcctaatcacggttcgggcacgtggatagcttctttccaagcatttctatccaaacacaactcctttgggtgtgtggggtgatattagaagcttcatgttaggtgtttgatactttcttgaatataggatttttgtgtgtgtggtgtagtataaataatgtccatagttgaataccaaaatgtggatattgtacagtgggagttatggctgccttcttcattgcttgatcttagttgttggttgcaatcttctaacttagagtatgatgcttgaagagatttggatgatgttggagatgtgctttggtgtagttcatctctcccgaatcaagagtctggtttatggggctaaggtagaggctgccatcgccattggattcaatgacttcattacatatgctctgagaggcattgggttctaccagaaggataacatggagatcaagaaggccaatggcaatggcacactgatccctgagcagatctttgaaaagactaggagaagttctagatgaattgatgcttggctgaagagggatgtcagatttgtacaatgctcacccacaaagaataatacatttctccaatgtccactgttttgaaaaatacctccattccaatgtttaacattctaacgatgtctgaatttattgtaaagagacacatgattgttcattgttgtaacttatgtacaatatatgcgtgtgtgaaataaagatcatcttggagcaccggcatcaatgttatcaatcttctcaaatttcaaattatcctggtctcttcgtgaaaccataaaagtttattaagtcacttatctgagtggtctaaaagtctagcatatttttgttcctttgcctgtcgagacggatcagctggcatgaataatatccggtgaatactgcaagagctattcatgatcccccgtgaactagctggtatgatataacttagtttgtgaagtgctaatgccacaaacaggaaataggatgatacttcatgtatatttttttctttcttgaaaatgaactataggatactgtttacaatccataccaagcttctgcagttatcaacatttttctatgttcaaccttgttaacatattaagacgagtttttctttcatttttcaaaaaaataaatcaa

SEQ ID NO: 75750 - DNA, 1251 bp, Zea Mays
ggatgtttgctttagcagaattttatcctacaactctacaagagagggaatggatacatcaaccaaggaaggaggaggacaaatgataggttgaggcgtgcagacagagaggacagcgttaggcgaactgtttatgtctctgaacttgatcatactgtgacagaggagagacttgctgatatctttgctacctgtgggcatgttgttgattgcagaatttgtggtgatccccactcagttcttaggtttgcatttattgagttctctgatgaagagggtgcaagaactgcacttaacctcggaggcacaatttttggtttctaccctgttagagttttgccttcaaagacagctatcttacccgttaatccaaagtttcttcccaggacggacgatgagaaggaaatggtcatgcgaactgtctattgtacaaacatagataagatggttactcaattagatgtaaagaaattctttgaagaactttgcggtgaggtctctcggttgagacttctaggagacaatgtacattccacaaggattgcttttgttgagtttgttcatgctgagggtgccatcatggctctgaattgcagcgggatgattttgggaactctgcctgtcagggtgagtccttctaagactccggtgaagccacgtgtaaatcgaatgggatctaactgactctgcctaagctcaaccggaaggcatggccataagctgaaggcttccgcggtcctgtgcatcatgatgcatctgcttacattcttacaaacactctgtttgtacccttttgcaaacctgttggaagggaactggttaggtcaggcccttttgccttgcatttcagacatgatggaaccattgagaatgactattcggcaatcaaccatcaagtaacttctgtcaatgctcctactgttaacgccttagatgtttggctgccggtttggattcagctgcagctgcaaatctgtactgttgctacagcatttgctttcttatgtaaccagccggcagcagcagctgcttctgcacaagcaagaatccaaacatgattgcaacgccgagttccctgtcctcgtctacgaaggaaaaatcccaaatgacaatttatgtggaaattctcaattggctaccaccacttgtctgacattgtagtcgttaaagtctgtaattttgctatgcatttatacgtctttaggggtctgattctattattctaaaatcagtatttcacgtttacgattc

SEQ ID NO: 75751 - DNA, 1887 bp, Zea Mays
gagcccaacaacccgccggcccttctcctcctctccggtttccgttttgattcctcccgattctctctcgcgtagtcgcgtaaatttcccagcccgaaaatggccatagccttgaggcactagtaggcacagtagcacccaaccgcggcccgctccagcagccccaccccatcgacgccgtcggcgagggcacccaggtccgcgtcgcaccacgtcagccacacacccaccaggccaccaccgccctcagctccggtgtgcagagacgctggatggcctcgcaccagtagaatccgtccggcactttctgccctaccccaccccaatccacccatccggccgcgggtggatttgaccgatatcggcaggcggccgccggcgtctgcctcgattgatccgcctcgtctcagtcctaggtatggcggcggtggcggagggatcggcgtctgctgcggcgaaggaggtggagtaccaggcgggcgtgcagaagcttgtggacctgctctccaatcttaacccggccgccaaggagttcgttccttcctcggctccggccgcggctgcgtcgccgcccaagaaagcgttgtcggcggatgcgccggtcttcgattaccgctccaccgcaggcggcaacggggccaccgacgatcccttttacgttgggtttgggaaccagcagcgcaagagagggaatggatacatcaaccaaggaaggaggaggacaaatgataggttgaggcgtgcagacagagaggacagcgttaggcgaactgtttatgtctctgaacttgatcatactaggagagacttgctgatatctttgctacctgtgggcatgttgttgattgcagaatttgtggtgatccccactcagttcttaggtttgcatttattgagttctctgatgaagagggtgcaagaactgcacttaacctcggaggcacaatttttggtttctaccctgttagagttttgccttcaaagacagctatcttacccgttaatccaaagtttcttcccaggacggacgatgagaaggaaatggtcatgcgaactgtctattgtacaaacatagataagatggttactcaattagatgtaaagaaattctttgaagaactttgcggtgaggtctctcggttgagacttctaggagacaatgtacattccacaaggattgcttttgttgagtttgttcatgctgagggtgccatcatggctctgaattgcagcgggatgattttgggaactctgcctgtcagggtgagtccttctaagactccggtgaagccacgtgtaaatcgaatgggatctaactgactctgcctaagctcaaccggaaggcatggccataagctgaaggcttccgcggtcctgtgcatcatgatgcatctgcttacattcttacaaacactctgtttgtacccttttgcaaacctgttggaagggaactggttaggtcaggcccttttgccttgcatttcagacatgatggaaccattgagaatgactattcggcaatcaaccatcaagtaacttctgtcaatgctcctactgttaacgccttagatgtttggctgccggtttggattcagctgcagctgcaaatctgtactgttgctacagcatttgctttcttatgtaaccagccggcagcagcagctgcttctgcacaagcaagaatccaaacatgattgcaacgccgagttccctgtcctcgtctacgaaggaaaaatcccaaatgacaatttatgtggaaattctcaattggctaccaccacttgtctgacattgtagtcgttaaagtctgtaattttgctatgcatttatacgtctttaggggtctgattctattattctaaaatcagtatttcacgtttacgattc

SEQ ID NO: 75752 - DNA, 1814 bp, Zea Mays
tagagaccatgcccacgcggaacccgagcggccgagagcccaacaacccgccggcccttctcctcctctccggtttccgttttgattcctcccgattctctctcgcgtagtcgcgtaaatttcccagcccgaaaatggccatagccttgaggcactagtaggcacagtagcacccaaccgcggcccgctccagcagccccaccccatcgacgccgtcggcgagggcacccaggtccgcgtcgcaccacgtcagccacacacccaccaggccaccaccgccctcagctccggtgtgcagagacgctggatggcctcgcaccagtagaatcctcctaggtatggcggcggtggcggagggatcggcgtctgctgcggcgaaggaggtggagtaccaggcgggcgtgcagaagcttgtggacctgctctccaatcttaacccggccgccaaggagttcgttccttcctcggctccggccgcggctgcgtcgccgcccaagaaagcgttgtcggcggatgcgccggtcttcgattaccgctccaccgcaggcggcaacggggccaccgacgatcccttttacgttgggtttgggaaccagcagcgcaagagagggaatggatacatcaaccaaggaaggaggaggacaaatgataggttgaggcgtgcagacagagaggacagcgttaggcgaactgtttatgtctctgaacttgatcatactgtgacagaggagagacttgctgatatctttgctacctgtgggcatgttgttgattgcagaatttgtggtgatccccactcagttcttaggtttgcatttattgagttctctgatgaagagggtgcaagaactgcacttaacctcggaggcacaatttttggtttctaccctgttagagttttgccttcaaagacagctatcttacccgttaatccaaagtttcttcccaggacggacgatgagaaggaaatggtcatgcgaactgtctattgtacaaacatagataagatggttactcaattagatgtaaagaaattctttgaagaactttgcggtgaggtctctcggttgagacttctaggagacaatgtacattccacaaggattgcttttgttgagtttgttcatgctgagggtgccatcatggctctgaattgcagcgggatgattttgggaactctgcctgtcagggtgagtccttctaagactccggtgaagccacgtgtaaatcgaatgggatctaactgactctgcctaagctcaaccggaaggcatggccataagctgaaggcttccgcggtcctgtgcatcatgatgcatctgcttacattcttacaaacactctgtttgtacccttttgcaaacctgttggaagggaactggttaggtcaggcccttttgccttgcatttcagacatgatggaaccattgagaatgactattcggcaatcaaccatcaagtaacttctgtcaatgctcctactgttaacgccttagatgtttggctgccggtttggattcagctgcagctgcaaatctgtactgttgctacagcatttgctttcttatgtaaccagccggcagcagcagctgcttctgcacaagcaagaatccaaacatgattgcaacgccgagttccctgtcctcgtctacgaaggaaaaatcccaaatgacaatttatgtggaaattctcaattggctaccaccacttgtctgacattgtagtcgttaaagtctgtaattttgctatgcatttatacgtctttaggggtctgattctattattctaaaatcagtatttcacgtttacgattc

SEQ ID NO: 75753 - DNA, 1046 bp, Zea Mays
cggggcagaacggtgccggcgctcggcgttgcagggaccttctggacgagtacacggtggcggtgcggcggatggcgtgcgcggtgctggagctgatggcggaggggctgggcatcgccggcggcgccggggacgcggtgctggcgcggctggtggcgcgcgcggacagcgactgcatgctgcgggtgaaccactacccgccgcggccggcgctcaaccccagcctcacggggttcggcgagcacaccgacccgcagatcatctcggtgctccgcgccaacggcacctccggcctggagatcgcgctgcgggacggcgcctgggcctccgtcccgcccgacggggacgccttcttcgtcaacgtcggcgacaccctgcaggtgttgacgaacgggaggttcaggagcgtgaggcacagggtggtggtgaacagcgagaagtcccgggtgtccatggtcttcttcggcggccccgccgcccggcgagaggctgggcccgctgccgcagctcctgggcgacggcggccggagccggtaccgggacttcacctggagcgagttcaagaccagcgggtgcaggaccaggctcgcggaagaccgcctgtcccgcttcgagaagaagtagctagaggctacgtcatttgcatgaccggcggtaggatcgattaccatgtatgcttctctgtatatgtcagttgcattgccacagctctagctactggcgcccgtacgtgtatattagtggccatgctcgtattgtacgtgcacgtgtatgcacgcatatacatggtggcaccacacagggtatcatgcatccaatgttatctattatccatggagtaccaaccatgcatgcatggtcctgttattagcttttacaattacaattatcccccggtgcttccagacagtccaggcgtcgtacgtgtgcgggtgtcggtaaaccaatcagcggtgcaacaacgtaggcatgatgacgtattacgcacagccaccaatgatgctggcacaggcagagatccaagtaggactatctatcaggactag

SEQ ID NO: 75754 - DNA, 2074 bp, Zea Mays
aaaggctgtcgcgctcggcactcttgctgtcgcgctctgtgcacagacgaccttcttcccatcccttccctctgctagtctgcttcgttcctcggccatggtggtcctcgccaagggtgagctcgagcagatcgccctcccggctgcagagccgcccccggccgacgtgcggtcggtggacctgtccgccccggcgggccccgcgcgcgaggccgcggcgcgcgcgctggtggcggcgtgcgaggagcacgggttcttccgggtgacgggccacggcgtgccggccagactcgtgcgcgccgcggaggccgcggcggccgggttcttcgcgcggccgcagggcgagaaggaggaggagggccccacgctcgggtacggaagcaagcgcatcggcggcaacggcgacctcggctgggtcgagtacctcctgctcggtggcacacccgccgccgcgccttcctcggcattattgccctgcgccgccgccccgtcgccgtccgcgccggccgggccgttacggtgagtcgtcgacgccactcgcagcggggcagaacggtgccggcgctcggcgttgcaggttgcaccggcatctcgcttcgcttgcctcctgagtcctgactcctgttggtttccctttgatacgtgactgcttgcctgccctgcatacaaacatgcacacagcacacacatagcagatagcacccatttgcattgcctttccttggctccatgctctctgctcgtgcttgcaatctgtcacgtggagcaatacaacaccaagcatacgcacgtgctcgtaacacaaggaagaacatttgtacggtggaagatgagactgcccgtcgtggcagcgggcccaccggccgtggcccgtccccgtctatatcaatctgcgtcttggctagatcgagcctcgaggcatcattttcttgaaggaaaaaagagaggaagaaacccagacggaaaagaaagagttccttgtgatcttttttctttccgcctgcttccatgcatgtttgcctgacaacatttctgtacggtgtcacgcgcacgctgacgcagggaccttctggacgagtacacggtggcggtgcggcggatggcgtgcgcggtgctggagctgatggcggaggggctgggcatcgccggcggcgccggggacgcggtgctggcgcggctggtggcgcgcgcggacagcgactgcatgctgcgggtgaaccactacccgccgcggccggcgctcaaccccagcctcacggggttcggcgagcacaccgacccgcagatcatctcggtgctccgcgccaacggcacctccggcctggagatcgcgctgcgggacggcgcctgggcctccgtcccgcccgacggggacgccttcttcgtcaacgtcggcgacaccctgcaggtgttgacgaacgggaggttcaggagcgtgaggcacagggtggtggtgaacagcgagaagtcccgggtgtccatggtcttcttcggcggccccgccgcccggcgagaggctgggcccgctgccgcagctcctgggcgacggcggccggagccggtaccgggacttcacctggagcgagttcaagaccagcgggtgcaggaccaggctcgcggaagaccgcctgtcccgcttcgagaagaagtagctagaggctacgtcatttgcatgaccggcggtaggatcgattaccatgtatgcttctctgtatatgtcagttgcattgccacagctctagctactggcgcccgtacgtgtatattagtggccatgctcgtattgtacgtgcacgtgtatgcacgcatatacatggtggcaccacacagggtatcatgcatccaatgttatctattatccatggagtaccaaccatgcatgcatggtcctgttattagcttttacaattacaattatcccccggtgcttccagacagtccaggcgtcgtacgtgtgcgggtgtcggtaaaccaatcagcggtgcaacaacgtaggcatgatgacgtattacgcacagccaccaatgatgctggcacaggcagagatccaagtaggactatctatcaggactag

SEQ ID NO: 75755 - DNA, 2041 bp, Zea Mays
aaaggctgtcgcgctcggcactcttgctgtcgcgctctgtgcacagacgaccttcttcccatcccttccctctgctagtctgcttcgttcctcggccatggtggtcctcgccaagggtgagctcgagcagatcgccctcccggctgcagagccgcccccggccgacgtgcggtcggtggacctgtccgccccggcgggccccgcgcgcgaggccgcggcgcgcgcgctggtggcggcgtgcgaggagcacgggttcttccgggtgacgggccacggcgtgccggccagactcgtgcgcgccgcggaggccgcggcggccgggttcttcgcgcggccgcagggcgagaaggaggaggagggccccacgctcgggtacggaagcaagcgcatcggcggcaacggcgacctcggctgggtcgagtacctcctgctcggtggcacacccgccgccgcgccttcctcggcattattgccctgcgccgccgccccgtcgccgtccgcgccggccgggccgttacgggaccttctggacgagtacacggtggcggtgcggcggatggcgtgcgcggtgctggagctgatggcggaggggctgggcatcgccggcggcgccggggacgcggtgctggcgcggctggtggcgcgcgcggacagcgactgcatgctgcgggtgaaccactacccgccgcggccggcgctcaaccccagcctcacggggttcggcgagcacaccgacccgcagatcatctcggtgctccgcgccaacggcacctccggcctggagatcgcgctgcgggacggcgcctgggcctccgtcccgcccgacggggacgccttcttcgtcaacgtcggcgacaccctgcaggtatatataccgcctctgcttactgttacacacagtattaattattcttttcttttaccgtacgtgccatcgtcagccaggcatctcgatcgatatatgatgagtaatcagccaccagccgtacttgagatctttcgatcgatcagtcaacaacaaaccgcatccgtcaaacacgatggagctcacgatcgacacgtacgtgattagcacgtacgaacggagtacacatgcatgcacgtacgatcatatgcttaggtagtaggccccaagtgtgatgcccgtgaaacgctagctgctagtctgctacgtacctggccgtccacgtactacagcattcgtacgttgttcagagacgggccggccagccaaatgtttaaagcggcgtacgctgctgcgtctgcatgcacatgctagcttaataattctttgttcccgcgacacgtacgtactgatgctgcagcgctgtgcctgtgcctgtgcgcgcgatcgacctgaacgtgcatgatgcaggtgttgacgaacgggaggttcaggagcgtgaggcacagggtggtggtgaacagcgagaagtcccgggtgtccatggtcttcttcggcggccccgccgcccggcgagaggctgggcccgctgccgcagctcctgggcgacggcggccggagccggtaccgggacttcacctggagcgagttcaagaccagcgggtgcaggaccaggctcgcggaagaccgcctgtcccgcttcgagaagaagtagctagaggctacgtcatttgcatgaccggcggtaggatcgattaccatgtatgcttctctgtatatgtcagttgcattgccacagctctagctactggcgcccgtacgtgtatattagtggccatgctcgtattgtacgtgcacgtgtatgcacgcatatacatggtggcaccacacagggtatcatgcatccaatgttatctattatccatggagtaccaaccatgcatgcatggtcctgttattagcttttacaattacaattatcccccggtgcttccagacagtccaggcgtcgtacgtgtgcgggtgtcggtaaaccaatcagcggtgcaacaacgtaggcatgatgacgtattacgcacagccaccaatgatgctggcacaggcagagatccaagtaggactatctatcaggactag

SEQ ID NO: 75756 - DNA, 1696 bp, Zea Mays
atggacgtcctcaacaggacgggcatggccgacgcactccggatggctcggtccgtgctccaccgtgttgcgtcggcggcgccgccagatcccctcgctgtggccaacacgatgtggtccgtgctcgtgtttgtcccggtagcgggaggtggagttcaatcctgcattgggccccagccccgtccccctccctcggcgcccagatcccacaccctaccttggcattccgcgttgggagtgctggagggtgcgcactacctcacaactggcaagttggaggtgctttcggagcaggagttcgtcaactgcgaccacgagatcttagtgccaacgtcttctgtgaaaggaggcagcatatcaattggaggttctcttcagcttcttggtttctgcacctttgaggcttgtgttggcatattggccgtcaatcatgaagatgagatctcagtacattcctgaggaagcgagaagcacaatcatgaacttcttccgcataccactcaacttatttgtttgtgtggtgctttacatcaaaccactggattatagggagaaaactgttattgcttgcctccttacgggatgactcatggtacaacgtcatttgaatacatatggtcgacaatgaagtttagtattgatttctgaatcatcaaaggctcgtgcagttgcccagccttggtgctcaacgtcagaaagaactcacttctcggtagcgcacttgccgatttttgacggccataatggcaaagatgctgctcaatatgtctgtgataacttgccatgggtcatcatggaagatgatgatttatctcttgagcttaaaaagggtactccatgtgtggaagagttcaccccaaaaaattgtgaaatgttatgcaacaatacgaagcttgatcttgctactgtcgagaccgatgttgatgagaaagtcgaagataaggtatgttcttatgtggatcaacttcttgcagctatgcgagccaaagattctaccatgcacgtatgtcgccgccgcgagggtcatgtgctagcagatataaatctatacaaaaggtaatgctatatgtggatatgaaagtcaatggtgtacatttgaagggatacaaaaataatttcatgtgtacttttggagtcttccaagttgtgctgggaactaggcatacaggaaaaggaaggagcctgatgtagagaagcaaaaggaaccaattctagagcatgtcacagtgttacttgccagtcattatcacctaaaatttacaactcgcgatgtgtttcttccctttgatttatttgtaagcaggaagcatctttgttgaatacaacaaatcaagcttgtgggctttataatgaagctgaggtttaggaaaagatacaatttcttatttgatgaagactttcctgctgaaaaataaagactccaaaaaatgattaagaaatctaaggacctagatgccattggagaaatgaagagtcgtgtcacatggattgataagcagttgaagtctcatcctccaaagaacgttgaatcggaaatcttgcgtgagcatatcaagaaagagagggaggcagcaaaggctggaaaacgaccatactatctgaagaaacctgaacttcgcgaaaggaagctgatgaacaagtacaatgagctcaaggaggcaggaaagcttgatgcattcatggaaaagcggcggag

SEQ ID NO: 75757 - DNA, 2258 bp, Zea Mays
taaatacctaaaaaatctaggtacctattgtcatctctactcaccaggtccagccctatctgacccgcccatctttcgccctccccatcccgtcgtggttgcgcgtcgacgccatcgaccgacgctgcctgcccacttcccccgctcccgtcgcggcttgttagtctcacctggtccatcggcggcccctctcaccgggacgcgaactcctccgcgcttccttccgccgaagcgaagcgctctacccaccttcgtccttctgcactcttctgtacgggcgtggaacgtagatctgtctatgctggcactggtttctgcttcccttgatattcttcacctagtgggtctgctcattgatggaagacaaccagattttggttcagtcagagcataaccttataccaggttcgcggacccttgtcattggtcaagagtttgcagatgttgacacatgtcggagggctgtcaaggacatggccattgctttgcactatgaactccgtgtagtgaaatctgatcgtagccgtttcattgcaaaatgctcaaaagaaggttgcccttggcgtgtgcacatcgccaagtgccccggcgttccaactttcactgtccggactttgcacggagagcacaaatgtgagggtgttcttaacctgcatcatcagcaggctactgttggttgggttgctaggtctgtcgaggcaagactcagggataacccgcagattaagccaaaggagatactgcaggatattcgagagcagcatggggtcgctgtttcttatatgcaggcatggcgtggaaaggagagaagcatggctgcagttaatggtactcttgaggatggataccgacttcttcctgcatattgtgagcagattgttaagacgaatcctggtagtgttgcaacctatagaggtattggaccagggaatgccttccagcggctgtttgtctcgtttcgtgcatccatttatggtttcttaaatgggtgcaggccccttctagaaattgacaaggctgacttgaagggaaagtatcttgggacattgctgtgtgcttcagctattgatgctgatcacatgatgttccctctagcattcggtgttgttgattgcgagagcgatgataactggaattggtttatatcggaattgaggaagatgctcggagttaacacagataagatgccggtgttgactatagtttctgagagaaaacggcaagtggttgcagcggtcggatctaatttccccactgcttttcatgggttttgcttgagacacgttcaggatgttatgccatggttacagcgttttccgccaaacctgtgggcattttcttacttccagggtatcagatatggccattttagtcttgggataaccgagatattgtataacttgtcccttgactgccatgaacttcccatcgtgcaaaccatcgagcacatcaggcaccaactggcttgctggtttgctgaacgccagaacctggcacagtcatacaactcggttcttgttccgtcagctgagaaagttatcctcgaagccatccatgactcacaatgctatcaagtccttcgagcaaacaaggtggagtttgagattgtgtcatcggagcgaaccaacattgtggacacccaagctaggttctgctcgtgccgccgatggcaaatttacggcatcccatgcgcacatgccgccgccgcactgctctcatgcggtgaagacccccgcctctatgctgatgactgcttcagtgtgatgaagtaccgagaaacctactcccagccaatatatcctatcccggacaggagccactggaacgattcgtctccctggtcacaaggtgcggtcagcaaggccgatgtggtgcttggcccgcccaatatccggaggcctcctggccgacccaagatgaagattctaaagatcgagagcatgaagcggccgaagcggatcgtccagtgtggccgatgccatcttcttgggcattctcaaaagaagtgctctttgcgaagctgacacgtccgttggtgtacatgaactctgttttattgacagcttagggatctcatgctttttttcgcgtcaggtgcaggtagtccttctgtacaagtacttcggtagttctgtgtagctctctgcttctggggaagcgtgtcgactttgggcaccgtctgtccatagcactcaaaagtgtcttctacgccgtttcagagcaatgataatctgccactgttttttatgatttttgcg

SEQ ID NO: 75758 - DNA, 644 bp, Zea Mays
atgtttttggtctaaaaatggggacaagatagctcactctttaaggccttagtctagctcctgcgcaagctccacattcttggaacggttccaaagataccctatacgctatatatttgcagttatattgcatactgttcgggattcgatgagtacatgaacttggtcctcgaagacgctgaggaaatcaacgtcaagaaaaacactaggaaatcacttggccggatactcctcaaaggtgacaatataactttgatgatgaacagtggcaagtgaagattcttatggcaggaacgatgtttggtgctcgcttcgattatctgtgacacaatgtactccatccatccgtccagacttaaatgatgtatcatgtcattgtggtttagtgagagttgtataactacctgaggaaactcacgtgttactatatgctaagatgctgtgacggtgagctattcagtgctcacttgtgttccaaagattagcccgacttgtgtgtgccatgctgacatcttttctggtttcatactcagctttacgtaaagctttgctctgctcacgcttgccttttggaagctgggattgaaaatcatcgtacccactagatactacactacagtttgcaaattgtatcagaccatcac

SEQ ID NO: 75759 - DNA, 524 bp, Zea Mays
tgtttggagatagtgacaaaaggattcgatgagtacatgaacttggtcctcgaagacgctgaggaaatcaacgtcaagaaaaacactaggaaatcacttggccggatactcctcaaaggtgacaatataactttgatgatgaacagtggcaagtgaagattcttatggcaggaacgatgtttggtgctcgcttcgattatctgtgacacaatgtactccatccatccgtccagacttaaatgatgtatcatgtcattgtggtttagtgagagttgtataactacctgaggaaactcacgtgttactatatgctaagatgctgtgacggtgagctattcagtgctcacttgtgttccaaagattagcccgacttgtgtgtgccatgctgacatcttttctggtttcatactcagctttacgtaaagctttgctctgctcacgcttgccttttggaagctgggattgaaaatcatcgtacccactagatactacactacagtttgcaaattgtatcagaccatcac

SEQ ID NO: 75760 - DNA, 534 bp, Zea Mays
atgggagttcagtctgctcaacccttactgtactgtgccggccgagatgtgctagggtcgctggtggttgagatttcagatcaggagctctggagtctagactctggactgcagcgagccaaagaattcaaatcagtcacccggtttgtttcccagatcgcggacagcggcaacctgcaaccgcttgctttcgtctttgaattgccagcgtcattgccatcatcgcaaagtagtgtagaaaggttttgtggcttcaggcggtctctagtagcagcatttctatcccacttcatatttcactgctagttttaaactctactatataaatagtatatttacaatgtaaaacaatattatgtacgtttatatgcacactcttactagagatggcctcatagagaaagaactccaaacttatacaacccctgatttgaaaaagtggggcttagcaggttcttaaggaatcaagtgacgaggaaagggagcaagctgaagagatgatgaagtggagaaaaaagcctagggatcatgaag

SEQ ID NO: 75761 - DNA, 5033 bp, Zea Mays
catgctcttcctgctactaattctagaagcctctagcgagtgctaacattcagtttaacccggcctccactcctctcctctggcccgtggcctgggtcagtgtccatccctccctgtccctgcccaccacttcgtctgctctccatccctcatccgtccccatgccgcgcccgccgccgcctacttcttctccacttttttgactgtttttcctgccatcctagctatgggctccgccgaggcggatggaagcgcattgccggacgcggagcagcagtagcagcggcggccaagcaagcgggggatctggatccgaggttctaccatcgggctcctcacggcggcggcggcggagaaggaggcggagcgcagcaagacgcagatgagcagcggcggcaacaccaccggctgctgcagctccaccaacaagtgcagcaggaccaagacccaccaccggcccccctcttccagctccagcacctgcaggccgcggcggcggcggccgtgaggcagcggggcggcttgttgtccgccgggtatgcccttctcgcccccatgggcgacgctagccagtcccactcccactcccactcccaacaccacggcttccagccgcagctcctatccttcgggggagccggccagcaccacgcgcaccagttcacggcgcaggcggcgtcccacttgcggccacgaggacggggagcggtgggcgcgggcggcgaggccgtggccacgacgtccgcgtcgcgctcgcgcgtgaggggcggcggcggggaggccgtggcggtgcagggaggccacattgcgcgctccacggggcgcaaggacagccacagcaaggtgtgcacggcgcgcgggacgcgggaccggcgcgtgcggctggcggcgcacaccgccatccagttctacgacgtgcaggaccggctgggctacgaccgccccagcaaggccgtcgactggctcatcaagaacgccaaggacgccatcgacaggctcgagacgacgctgcccgcggccaatgccgcgccgccgtcctcctcctggacgcacccagactccgccgagaactccgacgaccaggcgcaggccatcaccgtcgcgcacacggccttcgacttccccggcgccgacggtttcctagttccggcgtcgctcgactcggacacgatcaagtcgttctttcccgtggctggcacgggaggcggcgaggccgaggcgtcttcgtccgcgacggcggcgcagtcgtcggccatggggtaccaaagctacacgcctgacctgctgtcccgcaccggcggacacagccaggagctgcggctgtcgctgcagtctctcccagaccccatgttccaccaccggtcgcacggccacggccacggcggcgatggctccgcgcagcaggcgctcttccccggcgccgccagctactcgttcggcggcggcgctgcgtgggccgagcacgcgcagagccagcgcgtggcgccgtggaacgcgcccgacccaggcggcgggagcactggcggctacctgctcaacgtgtcgcagtcgcagcaggcggcgcttggtggccagagccagttcttcttccagaggggaccccttcagtccagtaaccagccctccgactccgagcgaggatggccggagaccgtcgaagccgacaacccgatgcagcatggtgggccgaccatcgggttcgcgcccggtaccagcttctccgggatccgcatccccaccaggatacagggcggcgaggagcacaacggcggcagcggcaatggcgacaagccgccgccgcctccgtctgtttcctcggcttctcgccagtgacagcagcagtggagcacagattactccatccaaccagcatgaccattgatcagtgcagcgtgtatcactaaaatctcacacgccagctcctcaacgtgcacccttgttgtgatgtgagaatctctttcgtgattcttcttcgttgtagcactgtattttcccaccgcaggattgccgtttcttgtactactgagtttctggtgcagttctgttgtccccattccaggagagaagagaaacgacaaaggttgcatatgttcattgcatggccttatgctggacactgcaggtgcaggaggacgcagcgacagcagcagcagctttcctgtgccatctatgatctccatccgtccatgactgggcagcgggcactgcgagaacgacacaagaaaaaggttttgtgtctccttgctgtcatcagtacgtacaggatctggcgcctctgctgcgtgtcattagcgcactttaaggaacggaaaagctaatgtacgcgcctgcgtttctttggctgtttttctcgccttgtgcatcgtccgattgttcagattcactgtttgattttgggattctcgcgcctctttagtgtctcgtttccatcgctctgctgctccgcctcttcactttctcgcgctgtcgtcgtctcccagtgtggctgccacgctcgccccagcctcctgccgcgcgccgcgctgagcctcctgccgcgcgagcctccagtgcggctgccgcgtgcgccctccagtgttgttgccgcgcacgccatgagttgtcgtgggcgaggtggatccgacgagatccatggcggaggccgaggaggccccgactagatctatggcgggggacgaggtagctccgacgaggtacatagcgcgggtggaggcagctgcgattccgacgaggtccacgtcggagggcgaggaggccgcgactggatctatggcggggggcgagttggctgcagcaggatccatgttggaggaggggaaggtccgacgggatccatggccgggggtggtggagctggctgcgacggtatatacggcagagggtgagggtgtcccgacgggatccattttcgctgtccggcggcagcaacctggggtgaagcaggcgggtctggagttccactgcgcgaagggcatcatttcctctcctatggttaagttgattgaaacttttgctgttttttgcaagtctcagagagctgcttatagggagaaggtgttaattgaagcagagaaacaatttccgcatgatttcacttttttcaaggaaaagttattagctgattttggccaaatagtggatgtcgaatgcattgatagtacttgccaagttctgtatgacaaggtcaggggttgttgttcaatttgcaagtcaaggtgtactgaagctatcgtcgattctctaaaaattttggctgaagcaatgactattaagcatcagaagtttttgaattccaacaaccttctggcgaaagatatggatattaagtcagatgagaaagctaccaaaattgatactaatgtgcagccagttgatgttaagtcgaatgagaaaggggctggtgtgggcattgttgaggcttctcatggaaaagctcatgtggttattacaaatcccctgataacagtgcccatacagttggagacaccaattgttaataggctggatggaaataatggaacatctttgaatccaccagtggagtgtgctcatcctctcaacaagcgattccattactcaaaaactgataagttgggtctctttccacgtacaaagcttttctcacctgtgggtctttttgaccttcaaattacagatgatgaaagtgatcacaatggaaggggcagaaatactgcagctgctatatgtccacacgagccagctggtgttccaattgggctaggccaacttgctcctcctatagccacccatgttgtttatggtgcaacatcagcagcggcaacaggttgtgttaacaatgatgtttatagtggtgttgcttctgtgatgttgtctcagattccaaaggcacatgctgctggtgcatttttagcagggaatgataatatatatgagcctacactagcattgaattattcaaagttaaactcaactgaaagacatagaaactccggaggaataagtggcaaaaaggaagaagttattgtcattgctgatgatgtaggggctgatcaggaggtgcaaactgctgctgttaatatggttggcgctaatttacatggtagtagtagatccaaatcagcagctgcaattgatcagatatacaatgatatgagcatattcaacgtagagtcagaagctgggggattctttttggaaaatcaactagaagttggaaatgtagtcaggaatgatgttggtgaaaattggttacaagttcaaaatgctcacgcccgtgttccatgttctaatgtgctattgcgatattataatattctttgtggcatggggcggagccaatggaaagaccaatatgaagttgaagatctaaggaaatcgtttctagttgaagatctaaggaaatcgtttctaggggctaattctactttgaagttgcatcactctaacaagctgtattttccagtgtgccatgcgaaccattggtttttgttcattgttgatttgaagaataagcgttttgtttttatggattcatattttgatgaggaagatccttttcaatgctttgttagagacaagcttattcggatgtttaaagtcctatggttattatattctgattcaaacatagatgtatcatcattcaaaattttatatcccgcggtaccaaaacaggaaaatacgcatgactgcggtattttcacacttcaatacatggaatattgggatatatttgttgatatgatgctcaagatccgcactgaggacatccctcaaattcgaatcaccttggccaaggatctctattttagtgagaagaacactgaagacaagtctctagtttgcaacatgtttcttcagaatattgatcctcagattgtcaactagcatatttgaaccgttgggaagtagttgttcgtgttttctatggatgttggagcagcaatggcagagatttctgattcatcatcgtcaagttttgatccatagcttctttttccaataaaaaaaagacatgttatatctcatgttcattctatgttcattttccc

SEQ ID NO: 75762 - DNA, 591 bp, Zea Mays
atggggggggaacacggcgtggagaacggttggagcagaacaaagggcgcacagggagatggagtttgtgcgagctcaccatggggtcggcggtggttgaagacgaagctgagggagttcggccggcgagctggacgcgcgcgacctgggcgagcacgtcaagggaaggagatggggaaaaaggcaggggcgtcggcactgggaacaggaagcaggggcgcggcaaggctgagggcgagctcggcgagcaccaagggggaggtggaggcggcaccctccatggctgagggtgagctcactatgaaggtcgagcagagccagggcgctgggaggagcagaggtgagggtaccatgggagggatggggaagacgacatggcagccagcactagaggaagatggggaggggatggggaagatgaccttaggagcgcttgctcaggtgctggagtggaggtcggtaatggggagcaggcggcgccgtgagggaggcgagccgcagggaggagctcggctggtgctccacgaaatcaacagagaggaggggggttagggataaggctgagaggatcttgagcggtggctggataag

SEQ ID NO: 75763 - DNA, 2119 bp, Zea Mays
atcattattatttagttgtgcttatgtttggtgtgatgttaattttgcatataccatgtttgtttgtattgctactgtcgcagaacctgccaagttatgtatgtgcaccaaacaacttaataggatctgtccttgtctcaaagacctcagacggctatgtatttgcaccaaacaacttaacaggatctgtccgagtgccccgaggaccccggataaatgacttatcgcaaagatcacgtgattaaataaacacaaatcacacaccaccatttgcaggggaaattctttattacaaaatggttacaagttacaacatttcatgttataacaagattacaatatatatcatcggagttgattacaaaagaaattgattcaaaaagattacaatttgaatgtataaaacatttataagttttaaaatacatgctagcttaagtgacagtcctcaataaagaagctaaagatgggatatacttatataagaaagtcgagcccatctgcacttaacatcaatcacaatcaagcgacttgtaacctgcagcaacaatgggaataaaaccctgagtacgcaattactcagcaagacttacccgactaaagaaaagactttcaagggtatgctagtttgtcgggaatcaaggcaaagctcatcaaatttcaaagactcgttgtttgcagaagagcttactagtagtggatccttatgccaaattttttattaacaagtggagttctttcctgattctagatttgcctaatctagagcattcacttgtcctacactagcttcattttagcatctttagtttcacttgttatctacgctgaaggtcgaagatccagtcttcatatccgagaagttcgacgatccgaatcgattaatacccagctggggatctccaaccacatgacatatgtagcacttaacccttgtatatgtcaactcgccaccgggtttctcaagaccagaacgggttcacgcgacccgagagcacaacaccccaccatccagccacttgccaggtgggcagacgttactctcgccatctctccactcccagtgtgtgtgagctgttctgttattggttcgaccgaggcaaagcttacccatgatgaggcatgtggccagttaaaggatcctagatcatcaggccaacaatcggaacggtccttaatcgacacaaacggcgacctttcctgctcaacgtctggtctcattttatttaaaccatttcccaatctttggtacctgacaaaggtacttttacgaatgttgaatccatcatgaccatatggattcaccatcccaatttctttttcacaaaaatttactatatctcgtgtaacacatcatccttttttaaaaagaacaacttttaattatctaagcagggctaagcatctttagttctcttttgtaaacaggaatcaaggaatagtaatcaaattccaaggaatggtaatgcatcaactgtttattcacacaactcctatcgcctaatgcaacatataagtgataaaagcctttaaaatagaaggaggtggtaaatgcatcaggacttgcctgggataaacactacgttagtgttgttaaatgacgaccacttggtgagcatcttccatcctggtacttgatctgatcattcctatagggtgtggtccatcgatatcatcttgtggtccagtcaggcccatgcccttcatatcgcataatcacctagcgtatctatttgatatgcaagatgcacatgaatgattataaagatgaataatataaggctaaacaaggacgcacgataataaattaaactcctaatgtaatgacattaaaacattcacaactaaacactagatatcgatatatcactaaacacaacaaccacacttcaacttattcgggctaactcaaacattataaaacaataagaaacacacgttctatcatcttcctaaccaaagcgtaacatcaaatactaggactcaccattaccaaacataagttattaccaagaatcatagaattctaccataccatgatttaaaatctaaggacccaaacttagaacaatgaatagaagcatttcaacatgcttcaacatttgtacgccaggttatt

SEQ ID NO: 75764 - DNA, 3612 bp, Zea Mays
caattgggcaaatccaaacctaccccgctcgctcaacccttcatcattccttgcttcctccagtccctgccctcctccctccatcgccccgttccatcccctttcccttccctttcacgagatccccatccggccatccccacctctgaccgcacctcccatgccgcactagttcacccgcccactccccacccaacacacgccgcccagcgagatccagagccgaccggtcgccggccctcgccctccgccccctccgcaggtgctcggcggaatgtcccaccgccagccggcgccaatgccggacaccctctcggacgccttcgccgccgcggtgctcctctcctccaccgacaagccggacacgctgcccccggggaggctctcgccagtctccccgctcccgcactcctcctccaagcacgggcaccagcaccctcaccccaccccgagctcctcctcgggctcctctggctccgtctcccggtccctactcgcgcccgcctccagcctcgcctcgcgccggagccactccggcgagatcccgctcccctccgacgcgcccccacgcgggaccgcgcgcccgggtcaccgccgcaccggctccggccccctcatcttcacatccggcgcgtgctccagctccgccacctcgccgctcaccaacgcgctccccgcgggcaacatctgcccctccggccgcctcgccaagccgctcccctcctcctgctccgccgctactccgccacccccgccccgcgcctcccgccacgacgtgctcggctccgggaccgccaactacggccacgggagcatcgtccgctcccgcgccgccaccgacgatgacgcggtcctcaggcgcgccatgtcggccgccgaccccgaggagctcaagagggccgggaacgaccagtacagaaagggctgcttcgaggaggccctcaggctctacgaccgcgccctcgccctctgccccgacaatgccgcgtgccggggcaaccgcgccgccgctctcattggcctccaccgccttggcgaggccgtcaaggagtgcgaggaggcgctccggattgatccatcctacggccgcgcgcaccaccgcctcgcgtccctgcatataaggtgaatggattgcttgggccttgggctggccggtacagagatcgcttctcagatctcaggcaacttctcttgtacagaatgggcttgctttgctccgctcatctcatcctcagctaaagaaaaatactcaaccacaacgtatctcaagttcgaatctaatcattgctatttttagcagagctttgcgaaaacggtcacgcggtatgttgcttcaatattggttgctcatggatttaagactatgtcatgtcagcttggtagagctccatctgattctgattctctatggaagccgatttctgagaagagtgattctgtttgattctttagcataaactctcaaaatcacgaaggagaatcacttcccagaatcaggagaaagtgttttttttccagctcccagctcttagtttatttcagagaatcacttcgtagaatcagcatagaatcacttatatgtgaaaaaaactgtctggcagagctcctactcgtttcagcagagaatcagctctgagagctccgccaaagggggccttccacattaggctcaatgtttttgttagtacgaccatactttagagtgctactaggcttccatgtggaaccgggttcatttgtctatcgaacactgccttgtgtgttgctctccatttccttcatagctcaggattagtggcttttcttctttccagataactagtaattgcttgtttggtataaaaccacaaatagtaaacttatagacggacactttggtcctattttctagtccttcttacctttttcccctcatgttcagtatagtgttagatgtggattcgttggtgcattattgttgatcctttgtactggtttcatgtgttgggctagcagactaggtgattcttgaattattggctcgtaccagtttattttatctgaaatactgaactgcaggctaggacacattgaggatgctctgaagcacctgtcacttgcaatcccacagcctgacctcctagagttgcacaaattgcaaacagtggagaagcactttgggagatgtctggatgcgcgaaaggctggtgactggaagagtgtgctaagagaaagtgatgctgctattgcggctggggctgactcctctgctctgctcttggctgctagagcagaagcccttttccgtctcaatttacttgatgaggctgatgttgcaatctctagtgcctccaaattgaattatacatcttcatgctccccagacaccaaattttgcgggtttattgccaacgcctacctcttttatgtacatgcccaagttgacatggcattaggaaggtttgaccatgcggtgtcctccatagataaggctagaataatagatccaggaaacactgaagtgataaccatgcataacaaagtgaaatctgtggccagagcacgatctctagggaacgagctcttcaattctggaaaattttcagaagcttgcgttgcttatggtgaagggctgaaacaacaccctgtgaataaagtcctgtactgtaatagggcagcttgtaggttcaaacttgaacagtgggagaagtcaattgaggactgtaatgaagctctcaagattcaacctaattataccaaggctttgctcaggcgggcagcatcttatggcaagatggagcgatgggcagaatctgtgaaggattatgagattctcagaaaagaacttccaagtgacacggaggttgctgaggcctatttccacgcacagattgctctcaagtcatctcgtggtgaggaggtatccaacatgaagtttggaggagaggttgaagcaattattggaatggaacaattccagttggctacatctttgtcaggtgtttcggtcatccatttcatggcagcttcaaatcagcagtgctgcaagatttctccatttgttaacacgctctgtaccagatacccatccgttaacttcctcaaggtcgatgtgaacgagagccctgctgttgcacgcgccgaaaacgtgaggacagttccaacattcaaaatctacaaaaacggcattagagtcaaagagatgatctgccccagccaacagctgctggaatattcagtgaggcattacgggatttaggccacgaagccgatgacttgatgttaccttccgcctccagcttctctggagcgagcacaggctttagccggagcagaaccagtcaagttcatcttgatgaggggtaagcatgagaatggaaaagcgaagagcaactcttccccagcattttcaaccccacagcccacccccattctccatttgttgattacatacctactcgatttattcatttaatctatctcgtccgtacatcattgttgcaaaatttctgtagaacccccaaaaaacatctcctgattcatgtgaagaatgactgtaaatttttacttccatgtttaccagacaactgaggaaaaaaggtatagattgcattttttttgtactatctaaat

SEQ ID NO: 75765 - DNA, 4171 bp, Zea Mays
cgactatttaaactactgtaattataatttattaaaacaaaaacactatgaaaatagtagaaaactataggaattaaagtgtatcggtgggaggaaaagaaagacaggcaaaacgaaggcgagtgttttactggctgatttactgccgccgccgcagcgcacggccgtcggtctcgagctcaactcactcaacagtgtgcccgcgggtttgcacagcctgcatgctctcgcgcagggcaattgggcaaatccaaacctaccccgctcgctcaacccttcatcattccttgcttcctccagtccctgccctcctccctccatcgccccgttccatcccctttcccttccctttcacgagatccccatccggccatccccacctctgaccgcacctcccatgccgcactagttcacccgcccactccccacccaacacacgccgcccagcgagatccagagccgaccggtcgccggccctcgccctccgccccctccgcaggtgctcggcggaatgtcccaccgccagccggcgccaatgccggacaccctctcggacgccttcgccgccgcggtgctcctctcctccaccgacaagccggacacgctgcccccggggaggctctcgccagtctccccgctcccgcactcctcctccaagcacgggcaccagcaccctcaccccaccccgagctcctcctcgggctcctctggctccgtctcccggtccctactcgcgcccgcctccagcctcgcctcgcgccggagccactccggcgagatcccgctcccctccgacgcgcccccacgcgggaccgcgcgcccgggtcaccgccgcaccggctccggccccctcatcttcacatccggcgcgtgctccagctccgccacctcgccgctcaccaacgcgctccccgcgggcaacatctgcccctccggccgcctcgccaagccgctcccctcctcctgctccgccgctactccgccacccccgccccgcgcctcccgccacgacgtgctcggctccgggaccgccaactacggccacgggagcatcgtccgctcccgcgccgccaccgacgatgacgcggtcctcaggcgcgccatgtcggccgccgaccccgaggagctcaagagggccgggaacgaccagtacagaaagggctgcttcgaggaggccctcaggctctacgaccgcgccctcgccctctgccccgacaatgccgcgtgccggggcaaccgcgccgccgctctcattggcctccaccgccttggcgaggccgtcaaggagtgcgaggaggcgctccggattgatccatcctacggccgcgcgcaccaccgcctcgcgtccctgcatataaggctaggacacattgaggatgctctgaagcacctgtcacttgcaatcccacagcctgacctcctagagttgcacaaattgcaaacagtggagaagcactttgggagatgtctggatgcgcgaaaggctggtgactggaagagtgtgctaagagaaagtgatgctgctattgcggctggggctgactcctctgctctgctcttggctgctagagcagaagcccttttccgtctcaatttacttgatgaggctgatgttgcaatctctagtgcctccaaattgaattatacatcttcatgctccccagacaccaaattttgcgggtttattgccaacgcctacctcttttatgtacatgcccaagttgacatggcattaggaaggtttgaccatgcggtgtcctccatagataaggctagaataatagatccaggaaacactgaagtgataaccatgcataacaaagtgaaatctgtggccagagcacgatctctagggaacgagctcttcaattctggaaaattttcagaagcttgcgttgcttatggtgaagggctgaaacaacaccctgtgaataaagtcctgtactgtaatagggcagcttgtaggttcaaacttgaacagtgggagaagtcaattgaggactgtaatgaagctctcaagattcaacctaattataccaaggctttgctcaggcgggcagcatcttatggcaagatggagcgatgggcagaatctgtgaaggattatgagattctcagaaaagaacttccaagtgacacggaggttgctgaggcctatttccacgcacagattgctctcaagtcatctcgtggtgaggaggtatccaacatgaagtttggaggagaggttgaagcaattattggaatggaacaattccagttggctacatctttgtcaggttagtcttatagcctgtgatattccgttgttcgccgcacaacagctccgtggtcctgccagtacctggtggggaaactttatggctattcaacctgacaaccatcaagtcacctggaacgagtttaaagcagctttccgtgaacactacatccctgaaggagtgctgcacatgaaacaagaggagtttatgaaacattatttcataatattgattcatgtcttgttttttgttgatactgcaggcaagattcatagaaatcttatgtttcctgtagtggcccaaactgttgaaagatcatttttaattacgtgcatagatacatttttcctaaaacactatcaatttctttagttctggtagcaaagaaggaaaccaactaatgaagtagtatcagcaagaatcgatacagagaatggtgtttgcattaggtgctcaagttctgaactgctcacccaaccaaatgttaccagaatctaaccgagctgacctggaagcctgttagttttggctaatctctggacgatgcaaaagttggggtcctttagctagtcgtgaattcatgataggtagtgcaactgttccacacaagcacccactctattttgtccctggttttttagatttaccttgatgcaaataacataatcatgtctgaccagtgaccacacaagcaccctcctctgttttcttcttttttttctttagattttgtcgatgcacataacataatactacctccgttcttgaatatttgtcacccgctagttcatttttaaactaaaatgcgacaaataaaaaagaacggagggagtaatatcttcatcactcaaggataggcattaggcagtcccatataactgttttagttaacatggatttccaaatgttctgcttcctctgctgcttgttccttgcacatgcagccgctgatgttgacttgcagatgagtaataattgaacagagcaatagtacgtcaatcttgaccttttctgatataggcatgaggttgtaccaccgggttggcagcacttgttactgttttctgacgtgcaaagcaatcttcacatgacttgtgttttcctatcattgtactattaatgccggttggaacttggaagtacataatttggttactcttttgccttttactatctggtcacttgctccctgtcagttttgtgcccttgctgtaacagtagttcttagttttttttattttacatttgatatgtcttattggtttatatgaaacaggtgtttcggtcatccatttcatggcagcttcaaatcagcagtgctgcaagatttctccatttgttaacacgctctgtaccagatacccatccgttaacttcctcaaggtcgatgtgaacgagagccctgctgttgcacgcgccgaaaacgtgaggacagttccaacattcaaaatctacaaaaacggcattagagtcaaagagatgatctgccccagccaacagctgctggaatattcagtgaggcattacgggatttaggccacgaagccgatgacttgatgttaccttccgcctccagcttctctggagcgagcacaggctttagccggagcagaaccagtcaagttcatcttgatgaggggtaagcatgagaatggaaaagcgaagagcaactcttccccagcattttcaaccccacagcccacccccattctccatttgttgattacatacctactcgatttattcatttaatctatctcgtccgtacatcattgttgcaaaatttctgtagaacccccaaaaaacatctcctgattcatgtgaagaatgactgtaaatttttacttccatgtttaccagacaactgaggaaaaaaggtatagattgcattttttttgtactatctaaat

SEQ ID NO: 75766 - DNA, 2975 bp, Zea Mays
ctgccgaaccgccgcctggttccctcctccgctgcctgcttgccgctggcctggttccctcctcagcagcggcgggagccattgctcccacgcgagccttgcactgcaaaacacgggaggaaaagaaatccagaacctaccaaacagcaaagtgggtagaggcaaggcaagaaaaggatgcggttatctactcccgctcgcacatgcttcccatccaccttgccgccttcgcaactaccgcctctgctgctgctgccgtctcggccaccccaccgtctcgcgtccgccctctctccccgctcggcgccgcggcgccgcgggctcccttcccctcctccgcccgtggtctccgccatgcgccagcgcggtcgccgcagggccgcgctccctccggccgctgccggcggcggcggcggcggggagctcgctgcccccgattcccaggagaagagaggtggtacagacctcaagacactagctacaaggttttggaaagtcgctgccccctactggtggtcagaggataaaactcaagcaaggctgaggcttgctgctgtgtttgctctcacattaggaaccacagggattagtgttggatttaacttcctcggccgtgacttctacaatgctcttgctgataaggatcaagagaagtttaccacacaactgctctactatctgggtgcctttgctggaggaattccgttctttgtcttgagagactatgcaagagaaactctttctttgcgatggcgatcttggatgacaagttattatatgaagcgttactttaaaaacagaactttttacaagattcaatctcaatcaataattgacaatccagaccaaaggataaatgatgatctcagcgcattcactggaacggcacttgcattctctctcacacttttcaatgctgctgtggacttggtatcattcagcaacatcctctatggaatctatccaccattgtttattgttcttgttgtgtactctcttgggggtactgctattagtgtcttccttgaatttggtcaacttgaatttcatgcaagagaagaaagaagctgattttcgttacggacttgtccgtgttagagaaaatgcggaatcgattgctttttatggtggtgaggaaaatgagttacaacttttattggatcggttcaggagggcttttgagaacctaagtgaattgctgatagcttctcggaatctggagtttttcaccaatggttatcgatatttaattcagattctgccagctgcagttgttgctccaatgtacttctcagggaaaattgagtttggagtaataaaccaatcggtgtctgctttcaatcatattcttagtgatttctctctcattgttttccaatttcagtcaattagtgcattctcagcagtcatcgatcgtctaggtgagtttgatgatctattggatggaaacgagtcctctcaatcatctcaacgtgatagcattgatgggatcaacattgttttcaaaagcagtggtccttgtgttcctagttctaatggatcgctaacacagtctgatccatgcatggttctggaaattcgtaacttgacattgttaacaccaagaagtggaaatgttcttattactggcctcactatggaactaaaagacaaggaccacctactggtgatgggacctagtggaagcgggaagacgtcactgttacgtgctttggctggcctctggactagtggcactggggagatcatataccacgtgagaggttctacgcagcttcaaaaaccaaatccaagttctgataaaccatccagcatgaatttaaagggcgaagaagaatcgttgcaaagttccaagcaaagaagagataatggcatattcttcgtcccacaaaggccgtatatggttctgggaacacttcgtcaacagttgctctatcctacgtggactgaagaggttcaacactcaccagataatgatgataaaaactcagatcctcttccttttctgtccgaagtctccacatcagatctggtcggtgccaaatccgaggtgccctcgacagctgaactgatcgaagtccttgaggacgtcaagctgggttacatattgcctcgtttcaacggcttggactctacccatgactgggccagtgttctttcgctgggggagcagcagcgtctcgcgttcgcccggctgttacttgctacacccactttggtcctgctggacgagtcgacaagcgcactcgatgaagcaaacgaggctcatctatacagtcagattgaagctgccggcattacctacgtaagcatcggccaccggaaaacacttcacaagttccacaacaaggcgctgtacatttccatgtctgattcgacggacaccaatccacgcaactgggagctaaagcccgcggacaagcttccagctgaggagccatcgcagttcccttcatgataatctcagcatttgtacccctggttgctgcttcctcatttttcgtccgttatttggcccccaatcagaagtatggctcaactgtaatgtaccgccatagtgctgcaagctgaagttggactgtttcaggatgatcgtcaaggttgctgccatgcatgctacgacgacccgggccgccggacatgatagctctcatgtgcactcagaccttagagaacagaacagtatagaatgtacataactcggatgcaagtacttatggtcttggtgttggtaatcgttgatctgtactacgctcttaatgctctgattcttttgttggatgatgaagtgctaggaatttcagttctgactataggagtgtgctaacttgggtcccccccttttttttttgttgcgttcgcgtggaatgttcgatttaatggcccgtagcaggccgttgggcggggtctcgagtgcaactacggcccgcattcttctcgttctctctcaaagaagaaagaaagaaagaaagaaa

SEQ ID NO: 75767 - DNA, 2999 bp, Zea Mays
ctgccgaaccgccgcctggttccctcctccgctgcctgcttgccgctggcctggttccctcctcagcagcggcgggagccattgctcccacgcgagccttgcactgcaaaacacgggaggaaaagaaatccagaacctaccaaacagcaaagtgggtagaggcaaggcaagaaaaggatgcggttatctactcccgctcgcacatgcttcccatccaccttgccgccttcgcaactaccgcctctgctgctgctgccgtctcggccaccccaccgtctcgcgtccgccctctctccccgctcggcgccgcggcgccgcgggctcccttcccctcctccgcccgtggtctccgccatgcgccagcgcggtcgccgcagggccgcgctccctccggccgctgccggcggcggcggcggcggggagctcgctgcccccgattcccaggagaagagaggtggtacagacctcaagacactagctacaaggttttggaaagtcgctgccccctactggtggtcagaggataaaactcaagcaaggctgaggcttgctgctgtgtttgctctcacattaggaaccacagggattagtgttggatttaacttcctcggccgtgacttctacaatgctcttgctggatcaagagaagtttaccacacaactgctctactatctgggtgcctttgctggaggaattccggtgagcatattgctgctcttttgtagttctttgtcttgagagactatgcaagagaaactctttctttgcgatggcgatcttggatgacaagttattatatgaagcgttactttaaaaacagaactttttacaagattcaatctcaatcaataattgacaatccagaccaaaggataaatgatgatctcagcgcattcactggaacggcacttgcattctctctcacacttttcaatgctgctgtggacttggtatcattcagcaacatcctctatggaatctatccaccattgtttattgttcttgttgtgtactctcttgggggtactgctattagtgtcttccttgaatttggtcaacttgaatttcatgcaagagaagaaagaagctgattttcgttacggacttgtccgtgttagagaaaatgcggaatcgattgctttttatggtggtgaggaaaatgagttacaacttttattggatcggttcaggagggcttttgagaacctaagtgaattgctgatagcttctcggaatctggagtttttcaccaatggttatcgatatttaattcagattctgccagctgcagttgttgctccaatgtacttctcagggaaaattgagtttggagtaataaaccaatcggtgtctgctttcaatcatattcttagtgatttctctctcattgttttccaatttcagtcaattagtgcattctcagcagtcatcgatcgtctaggtgagtttgatgatctattggatggaaacgagtcctctcaatcatctcaacgtgatagcattgatgggatcaacattgttttcaaaagcagtggtccttgtgttcctagttctaatggatcgctaacacagtctgatccatgcatggttctggaaattcgtaacttgacattgttaacaccaagaagtggaaatgttcttattactggcctcactatggaactaaaagacaaggaccacctactggtgatgggacctagtggaagcgggaagacgtcactgttacgtgctttggctggcctctggactagtggcactggggagatcatataccacgtgagaggttctacgcagcttcaaaaaccaaatccaagttctgataaaccatccagcatgaatttaaagggcgaagaagaatcgttgcaaagttccaagcaaagaagagataatggcatattcttcgtcccacaaaggccgtatatggttctgggaacacttcgtcaacagttgctctatcctacgtggactgaagaggttcaacactcaccagataatgatgataaaaactcagcagatcctcttccttttctgtccgaagtctccacatcagatctggtcggtgccaaatccgaggtgccctcgacagctgaactgatcgaagtccttgaggacgtcaagctgggttacatattgcctcgtttcaacggcttggactctacccatgactgggccagtgttctttcgctgggggagcagcagcgtctcgcgttcgcccggctgttacttgctacacccactttggtcctgctggacgagtcgacaagcgcactcgatgaagcaaacgaggctcatctatacagtcagattgaagctgccggcattacctacgtaagcatcggccaccggaaaacacttcacaagttccacaacaaggcgctgtacatttccatgtctgattcgacggacaccaatccacgcaactgggagctaaagcccgcggacaagcttccagctgaggagccatcgcagttcccttcatgataatctcagcatttgtacccctggttgctgcttcctcatttttcgtccgttatttggcccccaatcagaagtatggctcaactgtaatgtaccgccatagtgctgcaagctgaagttggactgtttcaggatgatcgtcaaggttgctgccatgcatgctacgacgacccgggccgccggacatgatagctctcatgtgcactcagaccttagagaacagaacagtatagaatgtacataactcggatgcaagtacttatggtcttggtgttggtaatcgttgatctgtactacgctcttaatgctctgattcttttgttggatgatgaagtgctaggaatttcagttctgactataggagtgtgctaacttgggtcccccccttttttttttgttgcgttcgcgtggaatgttcgatttaatggcccgtagcaggccgttgggcggggtctcgagtgcaactacggcccgcattcttctcgttctctctcaaagaagaaagaaagaaagaaagaaa

SEQ ID NO: 75768 - DNA, 2980 bp, Zea Mays
ctgccgaaccgccgcctggttccctcctccgctgcctgcttgccgctggcctggttccctcctcagcagcggcgggagccattgctcccacgcgagccttgcactgcaaaacacgggaggaaaagaaatccagaacctaccaaacagcaaagtgggtagaggcaaggcaagaaaaggatgcggttatctactcccgctcgcacatgcttcccatccaccttgccgccttcgcaactaccgcctctgctgctgctgccgtctcggccaccccaccgtctcgcgtccgccctctctccccgctcggcgccgcggcgccgcgggctcccttcccctcctccgcccgtggtctccgccatgcgccagcgcggtcgccgcagggccgcgctccctccggccgctgccggcggcggcggcggcggggagctcgctgcccccgattcccaggagaagagaggtggtacagacctcaagacactagctacaaggttttggaaagtcgctgccccctactggtggtcagaggataaaactcaagcaaggctgaggcttgctgctgtgtttgctctcacattaggaaccacagggattagtgttggatttaacttcctcggccgtgacttctacaatgctcttgctgataaggatcaagagaagtttaccacacaactgctctactatctgggtgcctttgctggaggaattccgttctttgtcttgagagactatgcaagagaaactctttctttgcgatggcgatcttggatgacaagttattatatgaagcgttactttaaaaacagaactttttacaagattcaatctcaatcaataattgacaatccagaccaaaggataaatgatgatctcagcgcattcactggaacggcacttgcattctctctcacacttttcaatgctgctgtggacttggtatcattcagcaacatcctctatggaatctatccaccattgtttattgttcttgttgtgtactctcttgggggtactgctattagtgtcttccttggtaagaatttggtcaacttgaatttcatgcaagagaagaaagaagctgattttcgttacggacttgtccgtgttagagaaaatgcggaatcgattgctttttatggtggtgaggaaaatgagttacaacttttattggatcggttcaggagggcttttgagaacctaagtgaattgctgatagcttctcggaatctggagtttttcaccaatggttatcgatatttaattcagattctgccagctgcagttgttgctccaatgtacttctcagggaaaattgagtttggagtaataaaccaatcggtgtctgctttcaatcatattcttagtgatttctctctcattgttttccaatttcagtcaattagtgcattctcagcagtcatcgatcgtctaggtgagtttgatgatctattggatggaaacgagtcctctcaatcatctcaacgtgatagcattgatgggatcaacattgttttcaaaagcagtggtccttgtgttcctagttctaatggatcgctaacacagtctgatccatgcatggttctggaaattcgtaacttgacattgttaacaccaagaagtggaaatgttcttattactggcctcactatggaactaaaagacaaggaccacctactggtgatgggacctagtggaagcgggaagacgtcactgttacgtgctttggctggcctctggactagtggcactggggagatcatataccacgtgagaggttctacgcagcttcaaaaaccaaatccaagttctgataaaccatccagcatgaatttaaagggcgaagaagaatcgttgcaaagttccaagcaaagaagagataatggcatattcttcgtcccacaaaggccgtatatggttctgggaacacttcgtcaacagttgctctatcctacgtggactgaagaggttcaacactcaccagataatgatgataaaaactcagatcctcttccttttctgtccgaagtctccacatcagatctggtcggtgccaaatccgaggtgccctcgacagctgaactgatcgaagtccttgaggacgtcaagctgggttacatattgcctcgtttcaacggcttggactctacccatgactgggccagtgttctttcgctgggggagcagcagcgtctcgcgttcgcccggctgttacttgctacacccactttggtcctgctggacgagtcgacaagcgcactcgatgaagcaaacgaggctcatctatacagtcagattgaagctgccggcattacctacgtaagcatcggccaccggaaaacacttcacaagttccacaacaaggcgctgtacatttccatgtctgattcgacggacaccaatccacgcaactgggagctaaagcccgcggacaagcttccagctgaggagccatcgcagttcccttcatgataatctcagcatttgtacccctggttgctgcttcctcatttttcgtccgttatttggcccccaatcagaagtatggctcaactgtaatgtaccgccatagtgctgcaagctgaagttggactgtttcaggatgatcgtcaaggttgctgccatgcatgctacgacgacccgggccgccggacatgatagctctcatgtgcactcagaccttagagaacagaacagtatagaatgtacataactcggatgcaagtacttatggtcttggtgttggtaatcgttgatctgtactacgctcttaatgctctgattcttttgttggatgatgaagtgctaggaatttcagttctgactataggagtgtgctaacttgggtcccccccttttttttttgttgcgttcgcgtggaatgttcgatttaatggcccgtagcaggccgttgggcggggtctcgagtgcaactacggcccgcattcttctcgttctctctcaaagaagaaagaaagaaagaaagaaa

SEQ ID NO: 75769 - DNA, 3006 bp, Zea Mays
ctgccgaaccgccgcctggttccctcctccgctgcctgcttgccgctggcctggttccctcctcagcagcggcgggagccattgctcccacgcgagccttgcactgcaaaacacgggaggaaaagaaatccagaacctaccaaacagcaaagtgggtagaggcaaggcaagaaaaggatgcggttatctactcccgctcgcacatgcttcccatccaccttgccgccttcgcaactaccgcctctgctgctgctgccgtctcggccaccccaccgtctcgcgtccgccctctctccccgctcggcgccgcggcgccgcgggctcccttcccctcctccgcccgtggtctccgccatgcgccagcgcggtcgccgcagggccgcgctccctccggccgctgccggcggcggcggcggcggggagctcgctgcccccgattcccaggagaagagaggtggtacagacctcaagacactagctacaaggttttggaaagtcgctgccccctactggtggtcagaggataaaactcaagcaaggctgaggcttgctgctgtgtttgctctcacattaggaaccacagggattagtgttggatttaacttcctcggccgtgacttctacaatgctcttgctgataaggatcaagagaagtttaccacacaactgctctactatctgggtgcctttgctggaggaattccggtgagcatattgctgctcttttgtagttctttgtcttgagagactatgcaagagaaactctttctttgcgatggcgatcttggatgacaagttattatatgaagcgttactttaaaaacagaactttttacaagattcaatctcaatcaataattgacaatccagaccaaaggataaatgatgatctcagcgcattcactggaacggcacttgcattctctctcacacttttcaatgctgctgtggacttggtatcattcagcaacatcctctatggaatctatccaccattgtttattgttcttgttgtgtactctcttgggggtactgctattagtgtcttccttggtaagaatttggtcaacttgaatttcatgcaagagaagaaagaagctgattttcgttacggacttgtccgtgttagagaaaatgcggaatcgattgctttttatggtggtgaggaaaatgagttacaacttttattggatcggttcaggagggcttttgagaacctaagtgaattgctgatagcttctcggaatctggagtttttcaccaatggttatcgatatttaattcagattctgccagctgcagttgttgctccaatgtacttctcagggaaaattgagtttggagtaataaaccaatcggtgtctgctttcaatcatattcttagtgatttctctctcattgttttccaatttcagtcaattagtgcattctcagcagtcatcgatcgtctaggtgagtttgatgatctattggatggaaacgagtcctctcaatcatctcaacgtgatagcattgatgggatcaacattgttttcaaaagcagtggtccttgtgttcctagttctaatggatcgctaacacagtctgatccatgcatggttctggaaattcgtaacttgacattgttaacaccaagaagtggaaatgttcttattactggcctcactatggaactaaaagacaaggaccacctactggtgatgggacctagtggaagcgggaagacgtcactgttacgtgctttggctggcctctggactagtggcactggggagatcatataccacgtgagaggttctacgcagcttcaaaaaccaaatccaagttctgataaaccatccagcatgaatttaaagggcgaagaagaatcgttgcaaagttccaagcaaagaagagataatggcatattcttcgtcccacaaaggccgtatatggttctgggaacacttcgtcaacagttgctctatcctacgtggactgaagaggttcaacactcaccagataatgatgataaaaactcagatcctcttccttttctgtccgaagtctccacatcagatctggtcggtgccaaatccgaggtgccctcgacagctgaactgatcgaagtccttgaggacgtcaagctgggttacatattgcctcgtttcaacggcttggactctacccatgactgggccagtgttctttcgctgggggagcagcagcgtctcgcgttcgcccggctgttacttgctacacccactttggtcctgctggacgagtcgacaagcgcactcgatgaagcaaacgaggctcatctatacagtcagattgaagctgccggcattacctacgtaagcatcggccaccggaaaacacttcacaagttccacaacaaggcgctgtacatttccatgtctgattcgacggacaccaatccacgcaactgggagctaaagcccgcggacaagcttccagctgaggagccatcgcagttcccttcatgataatctcagcatttgtacccctggttgctgcttcctcatttttcgtccgttatttggcccccaatcagaagtatggctcaactgtaatgtaccgccatagtgctgcaagctgaagttggactgtttcaggatgatcgtcaaggttgctgccatgcatgctacgacgacccgggccgccggacatgatagctctcatgtgcactcagaccttagagaacagaacagtatagaatgtacataactcggatgcaagtacttatggtcttggtgttggtaatcgttgatctgtactacgctcttaatgctctgattcttttgttggatgatgaagtgctaggaatttcagttctgactataggagtgtgctaacttgggtcccccccttttttttttgttgcgttcgcgtggaatgttcgatttaatggcccgtagcaggccgttgggcggggtctcgagtgcaactacggcccgcattcttctcgttctctctcaaagaagaaagaaagaaagaaagaaa

SEQ ID NO: 75770 - DNA, 3115 bp, Zea Mays
ctgccgaaccgccgcctggttccctcctccgctgcctgcttgccgctggcctggttccctcctcagcagcggcgggagccattgctcccacgcgagccttgcactgcaaaacacgggaggaaaagaaatccagaacctaccaaacagcaaagtgggtagaggcaaggcaagaaaaggatgcggttatctactcccgctcgcacatgcttcccatccaccttgccgccttcgcaactaccgcctctgctgctgctgccgtctcggccaccccaccgtctcgcgtccgccctctctccccgctcggcgccgcggcgccgcgggctcccttcccctcctccgcccgtggtctccgccatgcgccagcgcggtcgccgcagggccgcgctccctccggccgctgccggcggcggcggcggcggggagctcgctgcccccgattcccaggagaagagaggtggtacagacctcaagacactagctacaaggttttggaaagtcgctgccccctactggtggtcagaggataaaactcaagcaaggctgaggcttgctgctgtgtttgctctcacattaggaaccacagggattagtgttggatttaacttcctcggccgtgacttctacaatgctcttgctgaggcgagaataatgacatttggaccatacaaacaagtctccctatagctaaaggttcatttgtgctatttaaattggttgtacaatagccacttcggttgtttgtttatacatgttttgtgttttcttttgcaagataaggatcaagagaagtttaccacacaactgctctactatctgggtgcctttgctggaggaattccgttctttgtcttgagagactatgcaagagaaactctttctttgcgatggcgatcttggatgacaagttattatatgaagcgttactttaaaaacagaactttttacaagattcaatctcaatcaataattgacaatccagaccaaaggataaatgatgatctcagcgcattcactggaacggcacttgcattctctctcacacttttcaatgctgctgtggacttggtatcattcagcaacatcctctatggaatctatccaccattgtttattgttcttgttgtgtactctcttgggggtactgctattagtgtcttccttggtaagaatttggtcaacttgaatttcatgcaagagaagaaagaagctgattttcgttacggacttgtccgtgttagagaaaatgcggaatcgattgctttttatggtggtgaggaaaatgagttacaacttttattggatcggttcaggagggcttttgagaacctaagtgaattgctgatagcttctcggaatctggagtttttcaccaatggttatcgatatttaattcagattctgccagctgcagttgttgctccaatgtacttctcagggaaaattgagtttggagtaataaaccaatcggtgtctgctttcaatcatattcttagtgatttctctctcattgttttccaatttcagtcaattagtgcattctcagcagtcatcgatcgtctaggtgagtttgatgatctattggatggaaacgagtcctctcaatcatctcaacgtgatagcattgatgggatcaacattgttttcaaaagcagtggtccttgtgttcctagttctaatggatcgctaacacagtctgatccatgcatggttctggaaattcgtaacttgacattgttaacaccaagaagtggaaatgttcttattactggcctcactatggaactaaaagacaaggaccacctactggtgatgggacctagtggaagcgggaagacgtcactgttacgtgctttggctggcctctggactagtggcactggggagatcatataccacgtgagaggttctacgcagcttcaaaaaccaaatccaagttctgataaaccatccagcatgaatttaaagggcgaagaagaatcgttgcaaagttccaagcaaagaagagataatggcatattcttcgtcccacaaaggccgtatatggttctgggaacacttcgtcaacagttgctctatcctacgtggactgaagaggttcaacactcaccagataatgatgataaaaactcagatcctcttccttttctgtccgaagtctccacatcagatctggtcggtgccaaatccgaggtgccctcgacagctgaactgatcgaagtccttgaggacgtcaagctgggttacatattgcctcgtttcaacggcttggactctacccatgactgggccagtgttctttcgctgggggagcagcagcgtctcgcgttcgcccggctgttacttgctacacccactttggtcctgctggacgagtcgacaagcgcactcgatgaagcaaacgaggctcatctatacagtcagattgaagctgccggcattacctacgtaagcatcggccaccggaaaacacttcacaagttccacaacaaggcgctgtacatttccatgtctgattcgacggacaccaatccacgcaactgggagctaaagcccgcggacaagcttccagctgaggagccatcgcagttcccttcatgataatctcagcatttgtacccctggttgctgcttcctcatttttcgtccgttatttggcccccaatcagaagtatggctcaactgtaatgtaccgccatagtgctgcaagctgaagttggactgtttcaggatgatcgtcaaggttgctgccatgcatgctacgacgacccgggccgccggacatgatagctctcatgtgcactcagaccttagagaacagaacagtatagaatgtacataactcggatgcaagtacttatggtcttggtgttggtaatcgttgatctgtactacgctcttaatgctctgattcttttgttggatgatgaagtgctaggaatttcagttctgactataggagtgtgctaacttgggtcccccccttttttttttgttgcgttcgcgtggaatgttcgatttaatggcccgtagcaggccgttgggcggggtctcgagtgcaactacggcccgcattcttctcgttctctctcaaagaagaaagaaagaaagaaagaaa

SEQ ID NO: 75771 - DNA, 2978 bp, Zea Mays
ctgccgaaccgccgcctggttccctcctccgctgcctgcttgccgctggcctggttccctcctcagcagcggcgggagccattgctcccacgcgagccttgcactgcaaaacacgggaggaaaagaaatccagaacctaccaaacagcaaagtgggtagaggcaaggcaagaaaaggatgcggttatctactcccgctcgcacatgcttcccatccaccttgccgccttcgcaactaccgcctctgctgctgctgccgtctcggccaccccaccgtctcgcgtccgccctctctccccgctcggcgccgcggcgccgcgggctcccttcccctcctccgcccgtggtctccgccatgcgccagcgcggtcgccgcagggccgcgctccctccggccgctgccggcggcggcggcggcggggagctcgctgcccccgattcccaggagaagagaggtggtacagacctcaagacactagctacaaggttttggaaagtcgctgccccctactggtggtcagaggataaaactcaagcaaggctgaggcttgctgctgtgtttgctctcacattaggaaccacagggattagtgttggatttaacttcctcggccgtgacttctacaatgctcttgctggatcaagagaagtttaccacacaactgctctactatctgggtgcctttgctggaggaattccgttctttgtcttgagagactatgcaagagaaactctttctttgcgatggcgatcttggatgacaagttattatatgaagcgttactttaaaaacagaactttttacaagattcaatctcaatcaataattgacaatccagaccaaaggataaatgatgatctcagcgcattcactggaacggcacttgcattctctctcacacttttcaatgctgctgtggacttggtatcattcagcaacatcctctatggaatctatccaccattgtttattgttcttgttgtgtactctcttgggggtactgctattagtgtcttccttggtaagaatttggtcaacttgaatttcatgcaagagaagaaagaagctgattttcgttacggacttgtccgtgttagagaaaatgcggaatcgattgctttttatggtggtgaggaaaatgagttacaacttttattggatcggttcaggagggcttttgagaacctaagtgaattgctgatagcttctcggaatctggagtttttcaccaatggttatcgatatttaattcagattctgccagctgcagttgttgctccaatgtacttctcagggaaaattgagtttggagtaataaaccaatcggtgtctgctttcaatcatattcttagtgatttctctctcattgttttccaatttcagtcaattagtgcattctcagcagtcatcgatcgtctaggtgagtttgatgatctattggatggaaacgagtcctctcaatcatctcaacgtgatagcattgatgggatcaacattgttttcaaaagcagtggtccttgtgttcctagttctaatggatcgctaacacagtctgatccatgcatggttctggaaattcgtaacttgacattgttaacaccaagaagtggaaatgttcttattactggcctcactatggaactaaaagacaaggaccacctactggtgatgggacctagtggaagcgggaagacgtcactgttacgtgctttggctggcctctggactagtggcactggggagatcatataccacgtgagaggttctacgcagcttcaaaaaccaaatccaagttctgataaaccatccagcatgaatttaaagggcgaagaagaatcgttgcaaagttccaagcaaagaagagataatggcatattcttcgtcccacaaaggccgtatatggttctgggaacacttcgtcaacagttgctctatcctacgtggactgaagaggttcaacactcaccagataatgatgataaaaactcagcagatcctcttccttttctgtccgaagtctccacatcagatctggtcggtgccaaatccgaggtgccctcgacagctgaactgatcgaagtccttgaggacgtcaagctgggttacatattgcctcgtttcaacggcttggactctacccatgactgggccagtgttctttcgctgggggagcagcagcgtctcgcgttcgcccggctgttacttgctacacccactttggtcctgctggacgagtcgacaagcgcactcgatgaagcaaacgaggctcatctatacagtcagattgaagctgccggcattacctacgtaagcatcggccaccggaaaacacttcacaagttccacaacaaggcgctgtacatttccatgtctgattcgacggacaccaatccacgcaactgggagctaaagcccgcggacaagcttccagctgaggagccatcgcagttcccttcatgataatctcagcatttgtacccctggttgctgcttcctcatttttcgtccgttatttggcccccaatcagaagtatggctcaactgtaatgtaccgccatagtgctgcaagctgaagttggactgtttcaggatgatcgtcaaggttgctgccatgcatgctacgacgacccgggccgccggacatgatagctctcatgtgcactcagaccttagagaacagaacagtatagaatgtacataactcggatgcaagtacttatggtcttggtgttggtaatcgttgatctgtactacgctcttaatgctctgattcttttgttggatgatgaagtgctaggaatttcagttctgactataggagtgtgctaacttgggtcccccccttttttttttgttgcgttcgcgtggaatgttcgatttaatggcccgtagcaggccgttgggcggggtctcgagtgcaactacggcccgcattcttctcgttctctctcaaagaagaaagaaagaaagaaagaaa

SEQ ID NO: 75772 - DNA, 3068 bp, Zea Mays
ctgccgaaccgccgcctggttccctcctccgctgcctgcttgccgctggcctggttccctcctcagcagcggcgggagccattgctcccacgcgagccttgcactgcaaaacacgggaggaaaagaaatccagaacctaccaaacagcaaagtgggtagaggcaaggcaagaaaaggatgcggttatctactcccgctcgcacatgcttcccatccaccttgccgccttcgcaactaccgcctctgctgctgctgccgtctcggccaccccaccgtctcgcgtccgccctctctccccgctcggcgccgcggcgccgcgggctcccttcccctcctccgcccgtggtctccgccatgcgccagcgcggtcgccgcagggccgcgctccctccggccgctgccggcggcggcggcggcggggagctcgctgcccccgattcccaggagaagagaggtggtacagacctcaagacactagctacaaggttttggaaagtcgctgccccctactggtggtcagaggataaaactcaagcaaggctgaggcttgctgctgtgtttgctctcacattaggaaccacagggattagtgttggatttaacttcctcggccgtgacttctacaatgctcttgctgaggcgagaataatgacatttggaccatacaaacaagtctccctatagctaaaggttcatttgtgctatttaaattggttgtacaatagccacttcggttgtttgtttatacatgttttgtgttttcttttgcaagataaggatcaagagaagtttaccacacaactgctctactatctgggtgcctttgctggaggaattccggtgagcatattgctgctcttttgtagttctttgtcttgagagactatgcaagagaaactctttctttgcgatggcgatcttggatgacaagttattatatgaagcgttactttaaaaacagaactttttacaagattcaatctcaatcaataattgacaatccagaccaaaggataaatgatgatctcagcgcattcactggaacggcacttgcattctctctcacacttttcaatgctgctgtggacttggtatcattcagcaacatcctctatggaatctatccaccattgtttattgttcttgttgtgtactctcttgggggtactgctattagtgtcttccttgagaaaatgcggaatcgattgctttttatggtggtgaggaaaatgagttacaacttttattggatcggttcaggagggcttttgagaacctaagtgaattgctgatagcttctcggaatctggagtttttcaccaatggttatcgatatttaattcagattctgccagctgcagttgttgctccaatgtacttctcagggaaaattgagtttggagtaataaaccaatcggtgtctgctttcaatcatattcttagtgatttctctctcattgttttccaatttcagtcaattagtgcattctcagcagtcatcgatcgtctaggtgagtttgatgatctattggatggaaacgagtcctctcaatcatctcaacgtgatagcattgatgggatcaacattgttttcaaaagcagtggtccttgtgttcctagttctaatggatcgctaacacagtctgatccatgcatggttctggaaattcgtaacttgacattgttaacaccaagaagtggaaatgttcttattactggcctcactatggaactaaaagacaaggaccacctactggtgatgggacctagtggaagcgggaagacgtcactgttacgtgctttggctggcctctggactagtggcactggggagatcatataccacgtgagaggttctacgcagcttcaaaaaccaaatccaagttctgataaaccatccagcatgaatttaaagggcgaagaagaatcgttgcaaagttccaagcaaagaagagataatggcatattcttcgtcccacaaaggccgtatatggttctgggaacacttcgtcaacagttgctctatcctacgtggactgaagaggttcaacactcaccagataatgatgataaaaactcagcagatcctcttccttttctgtccgaagtctccacatcagatctggtcggtgccaaatccgaggtgccctcgacagctgaactgatcgaagtccttgaggacgtcaagctgggttacatattgcctcgtttcaacggcttggactctacccatgactgggccagtgttctttcgctgggggagcagcagcgtctcgcgttcgcccggctgttacttgctacacccactttggtcctgctggacgagtcgacaagcgcactcgatgaagcaaacgaggctcatctatacagtcagattgaagctgccggcattacctacgtaagcatcggccaccggaaaacacttcacaagttccacaacaaggcgctgtacatttccatgtctgattcgacggacaccaatccacgcaactgggagctaaagcccgcggacaagcttccagctgaggagccatcgcagttcccttcatgataatctcagcatttgtacccctggttgctgcttcctcatttttcgtccgttatttggcccccaatcagaagtatggctcaactgtaatgtaccgccatagtgctgcaagctgaagttggactgtttcaggatgatcgtcaaggttgctgccatgcatgctacgacgacccgggccgccggacatgatagctctcatgtgcactcagaccttagagaacagaacagtatagaatgtacataactcggatgcaagtacttatggtcttggtgttggtaatcgttgatctgtactacgctcttaatgctctgattcttttgttggatgatgaagtgctaggaatttcagttctgactataggagtgtgctaacttgggtcccccccttttttttttgttgcgttcgcgtggaatgttcgatttaatggcccgtagcaggccgttgggcggggtctcgagtgcaactacggcccgcattcttctcgttctctctcaaagaagaaagaaagaaagaaagaaa

SEQ ID NO: 75773 - DNA, 3057 bp, Zea Mays
ctgccgaaccgccgcctggttccctcctccgctgcctgcttgccgctggcctggttccctcctcagcagcggcgggagccattgctcccacgcgagccttgcactgcaaaacacgggaggaaaagaaatccagaacctaccaaacagcaaagtgggtagaggcaaggcaagaaaaggatgcggttatctactcccgctcgcacatgcttcccatccaccttgccgccttcgcaactaccgcctctgctgctgctgccgtctcggccaccccaccgtctcgcgtccgccctctctccccgctcggcgccgcggcgccgcgggctcccttcccctcctccgcccgtggtctccgccatgcgccagcgcggtcgccgcagggccgcgctccctccggccgctgccggcggcggcggcggcggggagctcgctgcccccgattcccaggagaagagaggtggtacagacctcaagacactagctacaaggttttggaaagtcgctgccccctactggtggtcagaggataaaactcaagcaaggctgaggcttgctgctgtgtttgctctcacattaggaaccacagggattagtgttggatttaacttcctcggccgtgacttctacaatgctcttgctgaggcgagaataatgacatttggaccatacaaacaagtctccctatagctaaaggatcaagagaagtttaccacacaactgctctactatctgggtgcctttgctggaggaattccggtgagcatattgctgctcttttgtagttctttgtcttgagagactatgcaagagaaactctttctttgcgatggcgatcttggatgacaagttattatatgaagcgttactttaaaaacagaactttttacaagattcaatctcaatcaataattgacaatccagaccaaaggataaatgatgatctcagcgcattcactggaacggcacttgcattctctctcacacttttcaatgctgctgtggacttggtatcattcagcaacatcctctatggaatctatccaccattgtttattgttcttgttgtgtactctcttgggggtactgctattagtgtcttccttggtaagaatttggtcaacttgaatttcatgcaagagaagaaagaagctgattttcgttacggacttgtccgtgttagagaaaatgcggaatcgattgctttttatggtggtgaggaaaatgagttacaacttttattggatcggttcaggagggcttttgagaacctaagtgaattgctgatagcttctcggaatctggagtttttcaccaatggttatcgatatttaattcagattctgccagctgcagttgttgctccaatgtacttctcagggaaaattgagtttggagtaataaaccaatcggtgtctgctttcaatcatattcttagtgatttctctctcattgttttccaatttcagtcaattagtgcattctcagcagtcatcgatcgtctaggtgagtttgatgatctattggatggaaacgagtcctctcaatcatctcaacgtgatagcattgatgggatcaacattgttttcaaaagcagtggtccttgtgttcctagttctaatggatcgctaacacagtctgatccatgcatggttctggaaattcgtaacttgacattgttaacaccaagaagtggaaatgttcttattactggcctcactatggaactaaaagacaaggaccacctactggtgatgggacctagtggaagcgggaagacgtcactgttacgtgctttggctggcctctggactagtggcactggggagatcatataccacgtgagaggttctacgcagcttcaaaaaccaaatccaagttctgataaaccatccagcatgaatttaaagggcgaagaagaatcgttgcaaagttccaagcaaagaagagataatggcatattcttcgtcccacaaaggccgtatatggttctgggaacacttcgtcaacagttgctctatcctacgtggactgaagaggttcaacactcaccagataatgatgataaaaactcagcagatcctcttccttttctgtccgaagtctccacatcagatctggtcggtgccaaatccgaggtgccctcgacagctgaactgatcgaagtccttgaggacgtcaagctgggttacatattgcctcgtttcaacggcttggactctacccatgactgggccagtgttctttcgctgggggagcagcagcgtctcgcgttcgcccggctgttacttgctacacccactttggtcctgctggacgagtcgacaagcgcactcgatgaagcaaacgaggctcatctatacagtcagattgaagctgccggcattacctacgtaagcatcggccaccggaaaacacttcacaagttccacaacaaggcgctgtacatttccatgtctgattcgacggacaccaatccacgcaactgggagctaaagcccgcggacaagcttccagctgaggagccatcgcagttcccttcatgataatctcagcatttgtacccctggttgctgcttcctcatttttcgtccgttatttggcccccaatcagaagtatggctcaactgtaatgtaccgccatagtgctgcaagctgaagttggactgtttcaggatgatcgtcaaggttgctgccatgcatgctacgacgacccgggccgccggacatgatagctctcatgtgcactcagaccttagagaacagaacagtatagaatgtacataactcggatgcaagtacttatggtcttggtgttggtaatcgttgatctgtactacgctcttaatgctctgattcttttgttggatgatgaagtgctaggaatttcagttctgactataggagtgtgctaacttgggtcccccccttttttttttgttgcgttcgcgtggaatgttcgatttaatggcccgtagcaggccgttgggcggggtctcgagtgcaactacggcccgcattcttctcgttctctctcaaagaagaaagaaagaaagaaagaaa

SEQ ID NO: 75774 - DNA, 3031 bp, Zea Mays
ctgccgaaccgccgcctggttccctcctccgctgcctgcttgccgctggcctggttccctcctcagcagcggcgggagccattgctcccacgcgagccttgcactgcaaaacacgggaggaaaagaaatccagaacctaccaaacagcaaagtgggtagaggcaaggcaagaaaaggatgcggttatctactcccgctcgcacatgcttcccatccaccttgccgccttcgcaactaccgcctctgctgctgctgccgtctcggccaccccaccgtctcgcgtccgccctctctccccgctcggcgccgcggcgccgcgggctcccttcccctcctccgcccgtggtctccgccatgcgccagcgcggtcgccgcagggccgcgctccctccggccgctgccggcggcggcggcggcggggagctcgctgcccccgattcccaggagaagagaggtggtacagacctcaagacactagctacaaggttttggaaagtcgctgccccctactggtggtcagaggataaaactcaagcaaggctgaggcttgctgctgtgtttgctctcacattaggaaccacagggattagtgttggatttaacttcctcggccgtgacttctacaatgctcttgctgaggcgagaataatgacatttggaccatacaaacaagtctccctatagctaaaggatcaagagaagtttaccacacaactgctctactatctgggtgcctttgctggaggaattccgttctttgtcttgagagactatgcaagagaaactctttctttgcgatggcgatcttggatgacaagttattatatgaagcgttactttaaaaacagaactttttacaagattcaatctcaatcaataattgacaatccagaccaaaggataaatgatgatctcagcgcattcactggaacggcacttgcattctctctcacacttttcaatgctgctgtggacttggtatcattcagcaacatcctctatggaatctatccaccattgtttattgttcttgttgtgtactctcttgggggtactgctattagtgtcttccttggtaagaatttggtcaacttgaatttcatgcaagagaagaaagaagctgattttcgttacggacttgtccgtgttagagaaaatgcggaatcgattgctttttatggtggtgaggaaaatgagttacaacttttattggatcggttcaggagggcttttgagaacctaagtgaattgctgatagcttctcggaatctggagtttttcaccaatggttatcgatatttaattcagattctgccagctgcagttgttgctccaatgtacttctcagggaaaattgagtttggagtaataaaccaatcggtgtctgctttcaatcatattcttagtgatttctctctcattgttttccaatttcagtcaattagtgcattctcagcagtcatcgatcgtctaggtgagtttgatgatctattggatggaaacgagtcctctcaatcatctcaacgtgatagcattgatgggatcaacattgttttcaaaagcagtggtccttgtgttcctagttctaatggatcgctaacacagtctgatccatgcatggttctggaaattcgtaacttgacattgttaacaccaagaagtggaaatgttcttattactggcctcactatggaactaaaagacaaggaccacctactggtgatgggacctagtggaagcgggaagacgtcactgttacgtgctttggctggcctctggactagtggcactggggagatcatataccacgtgagaggttctacgcagcttcaaaaaccaaatccaagttctgataaaccatccagcatgaatttaaagggcgaagaagaatcgttgcaaagttccaagcaaagaagagataatggcatattcttcgtcccacaaaggccgtatatggttctgggaacacttcgtcaacagttgctctatcctacgtggactgaagaggttcaacactcaccagataatgatgataaaaactcagcagatcctcttccttttctgtccgaagtctccacatcagatctggtcggtgccaaatccgaggtgccctcgacagctgaactgatcgaagtccttgaggacgtcaagctgggttacatattgcctcgtttcaacggcttggactctacccatgactgggccagtgttctttcgctgggggagcagcagcgtctcgcgttcgcccggctgttacttgctacacccactttggtcctgctggacgagtcgacaagcgcactcgatgaagcaaacgaggctcatctatacagtcagattgaagctgccggcattacctacgtaagcatcggccaccggaaaacacttcacaagttccacaacaaggcgctgtacatttccatgtctgattcgacggacaccaatccacgcaactgggagctaaagcccgcggacaagcttccagctgaggagccatcgcagttcccttcatgataatctcagcatttgtacccctggttgctgcttcctcatttttcgtccgttatttggcccccaatcagaagtatggctcaactgtaatgtaccgccatagtgctgcaagctgaagttggactgtttcaggatgatcgtcaaggttgctgccatgcatgctacgacgacccgggccgccggacatgatagctctcatgtgcactcagaccttagagaacagaacagtatagaatgtacataactcggatgcaagtacttatggtcttggtgttggtaatcgttgatctgtactacgctcttaatgctctgattcttttgttggatgatgaagtgctaggaatttcagttctgactataggagtgtgctaacttgggtcccccccttttttttttgttgcgttcgcgtggaatgttcgatttaatggcccgtagcaggccgttgggcggggtctcgagtgcaactacggcccgcattcttctcgttctctctcaaagaagaaagaaagaaagaaagaaa

SEQ ID NO: 75775 - DNA, 3001 bp, Zea Mays
ctgccgaaccgccgcctggttccctcctccgctgcctgcttgccgctggcctggttccctcctcagcagcggcgggagccattgctcccacgcgagccttgcactgcaaaacacgggaggaaaagaaatccagaacctaccaaacagcaaagtgggtagaggcaaggcaagaaaaggatgcggttatctactcccgctcgcacatgcttcccatccaccttgccgccttcgcaactaccgcctctgctgctgctgccgtctcggccaccccaccgtctcgcgtccgccctctctccccgctcggcgccgcggcgccgcgggctcccttcccctcctccgcccgtggtctccgccatgcgccagcgcggtcgccgcagggccgcgctccctccggccgctgccggcggcggcggcggcggggagctcgctgcccccgattcccaggagaagagaggtggtacagacctcaagacactagctacaaggttttggaaagtcgctgccccctactggtggtcagaggataaaactcaagcaaggctgaggcttgctgctgtgtttgctctcacattaggaaccacagggattagtgttggatttaacttcctcggccgtgacttctacaatgctcttgctggatcaagagaagtttaccacacaactgctctactatctgggtgcctttgctggaggaattccggtgagcatattgctgctcttttgtagttctttgtcttgagagactatgcaagagaaactctttctttgcgatggcgatcttggatgacaagttattatatgaagcgttactttaaaaacagaactttttacaagattcaatctcaatcaataattgacaatccagaccaaaggataaatgatgatctcagcgcattcactggaacggcacttgcattctctctcacacttttcaatgctgctgtggacttggtatcattcagcaacatcctctatggaatctatccaccattgtttattgttcttgttgtgtactctcttgggggtactgctattagtgtcttccttggtaagaatttggtcaacttgaatttcatgcaagagaagaaagaagctgattttcgttacggacttgtccgtgttagagaaaatgcggaatcgattgctttttatggtggtgaggaaaatgagttacaacttttattggatcggttcaggagggcttttgagaacctaagtgaattgctgatagcttctcggaatctggagtttttcaccaatggttatcgatatttaattcagattctgccagctgcagttgttgctccaatgtacttctcagggaaaattgagtttggagtaataaaccaatcggtgtctgctttcaatcatattcttagtgatttctctctcattgttttccaatttcagtcaattagtgcattctcagcagtcatcgatcgtctaggtgagtttgatgatctattggatggaaacgagtcctctcaatcatctcaacgtgatagcattgatgggatcaacattgttttcaaaagcagtggtccttgtgttcctagttctaatggatcgctaacacagtctgatccatgcatggttctggaaattcgtaacttgacattgttaacaccaagaagtggaaatgttcttattactggcctcactatggaactaaaagacaaggaccacctactggtgatgggacctagtggaagcgggaagacgtcactgttacgtgctttggctggcctctggactagtggcactggggagatcatataccacgtgagaggttctacgcagcttcaaaaaccaaatccaagttctgataaaccatccagcatgaatttaaagggcgaagaagaatcgttgcaaagttccaagcaaagaagagataatggcatattcttcgtcccacaaaggccgtatatggttctgggaacacttcgtcaacagttgctctatcctacgtggactgaagaggttcaacactcaccagataatgatgataaaaactcagatcctcttccttttctgtccgaagtctccacatcagatctggtcggtgccaaatccgaggtgccctcgacagctgaactgatcgaagtccttgaggacgtcaagctgggttacatattgcctcgtttcaacggcttggactctacccatgactgggccagtgttctttcgctgggggagcagcagcgtctcgcgttcgcccggctgttacttgctacacccactttggtcctgctggacgagtcgacaagcgcactcgatgaagcaaacgaggctcatctatacagtcagattgaagctgccggcattacctacgtaagcatcggccaccggaaaacacttcacaagttccacaacaaggcgctgtacatttccatgtctgattcgacggacaccaatccacgcaactgggagctaaagcccgcggacaagcttccagctgaggagccatcgcagttcccttcatgataatctcagcatttgtacccctggttgctgcttcctcatttttcgtccgttatttggcccccaatcagaagtatggctcaactgtaatgtaccgccatagtgctgcaagctgaagttggactgtttcaggatgatcgtcaaggttgctgccatgcatgctacgacgacccgggccgccggacatgatagctctcatgtgcactcagaccttagagaacagaacagtatagaatgtacataactcggatgcaagtacttatggtcttggtgttggtaatcgttgatctgtactacgctcttaatgctctgattcttttgttggatgatgaagtgctaggaatttcagttctgactataggagtgtgctaacttgggtcccccccttttttttttgttgcgttcgcgtggaatgttcgatttaatggcccgtagcaggccgttgggcggggtctcgagtgcaactacggcccgcattcttctcgttctctctcaaagaagaaagaaagaaagaaagaaa

SEQ ID NO: 75776 - DNA, 2975 bp, Zea Mays
ctgccgaaccgccgcctggttccctcctccgctgcctgcttgccgctggcctggttccctcctcagcagcggcgggagccattgctcccacgcgagccttgcactgcaaaacacgggaggaaaagaaatccagaacctaccaaacagcaaagtgggtagaggcaaggcaagaaaaggatgcggttatctactcccgctcgcacatgcttcccatccaccttgccgccttcgcaactaccgcctctgctgctgctgccgtctcggccaccccaccgtctcgcgtccgccctctctccccgctcggcgccgcggcgccgcgggctcccttcccctcctccgcccgtggtctccgccatgcgccagcgcggtcgccgcagggccgcgctccctccggccgctgccggcggcggcggcggcggggagctcgctgcccccgattcccaggagaagagaggtggtacagacctcaagacactagctacaaggttttggaaagtcgctgccccctactggtggtcagaggataaaactcaagcaaggctgaggcttgctgctgtgtttgctctcacattaggaaccacagggattagtgttggatttaacttcctcggccgtgacttctacaatgctcttgctggatcaagagaagtttaccacacaactgctctactatctgggtgcctttgctggaggaattccgttctttgtcttgagagactatgcaagagaaactctttctttgcgatggcgatcttggatgacaagttattatatgaagcgttactttaaaaacagaactttttacaagattcaatctcaatcaataattgacaatccagaccaaaggataaatgatgatctcagcgcattcactggaacggcacttgcattctctctcacacttttcaatgctgctgtggacttggtatcattcagcaacatcctctatggaatctatccaccattgtttattgttcttgttgtgtactctcttgggggtactgctattagtgtcttccttggtaagaatttggtcaacttgaatttcatgcaagagaagaaagaagctgattttcgttacggacttgtccgtgttagagaaaatgcggaatcgattgctttttatggtggtgaggaaaatgagttacaacttttattggatcggttcaggagggcttttgagaacctaagtgaattgctgatagcttctcggaatctggagtttttcaccaatggttatcgatatttaattcagattctgccagctgcagttgttgctccaatgtacttctcagggaaaattgagtttggagtaataaaccaatcggtgtctgctttcaatcatattcttagtgatttctctctcattgttttccaatttcagtcaattagtgcattctcagcagtcatcgatcgtctaggtgagtttgatgatctattggatggaaacgagtcctctcaatcatctcaacgtgatagcattgatgggatcaacattgttttcaaaagcagtggtccttgtgttcctagttctaatggatcgctaacacagtctgatccatgcatggttctggaaattcgtaacttgacattgttaacaccaagaagtggaaatgttcttattactggcctcactatggaactaaaagacaaggaccacctactggtgatgggacctagtggaagcgggaagacgtcactgttacgtgctttggctggcctctggactagtggcactggggagatcatataccacgtgagaggttctacgcagcttcaaaaaccaaatccaagttctgataaaccatccagcatgaatttaaagggcgaagaagaatcgttgcaaagttccaagcaaagaagagataatggcatattcttcgtcccacaaaggccgtatatggttctgggaacacttcgtcaacagttgctctatcctacgtggactgaagaggttcaacactcaccagataatgatgataaaaactcagatcctcttccttttctgtccgaagtctccacatcagatctggtcggtgccaaatccgaggtgccctcgacagctgaactgatcgaagtccttgaggacgtcaagctgggttacatattgcctcgtttcaacggcttggactctacccatgactgggccagtgttctttcgctgggggagcagcagcgtctcgcgttcgcccggctgttacttgctacacccactttggtcctgctggacgagtcgacaagcgcactcgatgaagcaaacgaggctcatctatacagtcagattgaagctgccggcattacctacgtaagcatcggccaccggaaaacacttcacaagttccacaacaaggcgctgtacatttccatgtctgattcgacggacaccaatccacgcaactgggagctaaagcccgcggacaagcttccagctgaggagccatcgcagttcccttcatgataatctcagcatttgtacccctggttgctgcttcctcatttttcgtccgttatttggcccccaatcagaagtatggctcaactgtaatgtaccgccatagtgctgcaagctgaagttggactgtttcaggatgatcgtcaaggttgctgccatgcatgctacgacgacccgggccgccggacatgatagctctcatgtgcactcagaccttagagaacagaacagtatagaatgtacataactcggatgcaagtacttatggtcttggtgttggtaatcgttgatctgtactacgctcttaatgctctgattcttttgttggatgatgaagtgctaggaatttcagttctgactataggagtgtgctaacttgggtcccccccttttttttttgttgcgttcgcgtggaatgttcgatttaatggcccgtagcaggccgttgggcggggtctcgagtgcaactacggcccgcattcttctcgttctctctcaaagaagaaagaaagaaagaaagaaa

SEQ ID NO: 75777 - DNA, 3476 bp, Zea Mays
atgcccgcgtcccgcatccctttcaagcgctgcaccgccgccgtcccgggcgtggggaagcccggccccgctgccagcatgccgcccgccaagcgccgccgcgaccgcgtcgtcccgtcgcggtccagggactcgatgccgccgcccgcgccgcacgtggaggaaggtgacaacaggcacggggaggtgtacaacgtagagttgctcatggccgagcccaaagtcgactcatttggtcccgtggagaccgcgttgtggacgcaagcgcggacggcgcccacggatgccgacctgtaccgagcgtgtcgtaacataaacaagaggggcagctgtgggggagctgccagcggtagtgtgctcacgtctgtgagcaatgccgcctcggacgcttgtgctggtggcaatggcaccattgtccgagtgagcaatgctgccttggaaggtggtgctggtagcaatggtggtctggaggggagacctgcggtggtggagtgcaagcccaagagggagggcagcgacaagaaagaggatttctactggccggaggattttgtgcttggggatgtcgtgtgggcgaggtccggcaagaaatccccaatgtggcctgcactggtgattgaccccctgcagcatgcgccggaagtcgtgctcaactcctgtgttcctggcgctctctgcgtcatgttcttcggttattccgctaatgggcatggcagggactatggatgggttaagcaaggaatgatctttccctttgtggactacctagacaggtttcaaggacagcctctgtataagctcagaccaaccaaattccgtgcagcaatcgaggaggctttcctagctgaacgtggtttttttgatctcgacatggatggggcatgctcaccgcgaaagtttgtagataagcagtctgatcctaatggctttcaggaagaggccgcttcaaataacgagcaggagtgccaatctgagtctcaggttgttggcaaatcggcactgtgttgtgatagctgtggtaatcgcctaccatccaaggtttcaaagaaaaggaagcaagggggtgagcaggtgctttgtaggcactgtgaaaagcattactctgcagttattgcagtcgaaacaatactgtggcatatgcaagaaaatttggcaccacacagatggtgggaactgggtttgttgtgatgagtgccagatttgggttcacgtagaatgtgacctgacatgcaacaacatggaggatttggaaaatgcagattatttttgtccggattgcaaatcaaaatgcaaaacagttccagcaactgaaaaaatgaatacttcccacagttcagaatgtgctagcacttcaaagggaaaatcaaccccaatgatagctgttttctgcaacggcgaggaggcattgtatgtacctgagaagcacatgatactatgtcaatgtaaggcttgcaaggaaaggatgatgagtctgaatgagtgggagaagcatactggctcaaggaaaaagaattggaagatgagtattagacagaagagcacaggggagccactcattaatttgctggatgatattccttgtgggacatcgaagtcttctaagccaggcattaagaaaggagagctgctacaattgcaagctaatgcttacagtcctgtctgtgctaaatggacaacggaacgctgtgctgtttgtcgatgggttgaggattgggactacaacaaaattataatttgcaacaggtgccaaatagctgttcaccaagagtgctatggagcacgagctgtacaagatcttacaatatggctttgtcgagcatgtgaattctcccaacagaaaagagaatgctgcctatgtcctgtcaaagggggtgctctcaagccaacagatgttgatggactgtgggttcatgttacatgtgcctggtttcagcctaaagtctcttttccggttgaggagaccatggagccagctatgggaataatgagcatccctgcagagtactttaagaagacttgcgtcatatgcaagcaaatgcatggtgcctgcacacaatgctacaagtgctctacgtattatcatgcaatgtgtgcatcaagagctggatatcgcatggagttgcaacactatgaacgaagtggcaggcacattacaaaaatggtttcctactgtgattttcacagtactcctgacccagacaatgtgttgatagtgaagacacctgaaggtgttttctctacgaaattttttgtccaaaatggtgagaaacagacagctgcaagactcgccaggaaggaaaattaccaggagaaagtgcttcctcctatagtttctgactgtctagtcgcaaagtgcctgacctatgaaatgttgaaatacaagaaagaaccaggagaggctattgcccaccggattatgggacctcgacaccactcccaggattttattgatggccttaacgcatacatgggtcataaggacgaccaatccttttcaacgtttaaagagcgacttgggtatttacagaaaactgaaaatttgagggtctcttgtggtcgatctggaattcatggatgggggctctttgctgcaaggaatattcaggaggggcaaatggttattgagtatcgtggtgaacaagttagacagcgtgttgctgatttgagggaagcacggtaccatagagaaaaaaaggattgctatttgttcaagataagtgaagatgttgtcatcgatgctaccggcaaaggaaacatagcgcgcctgattaatcactcgtgtatgccaagctgctatgctaggatcgtgaccgtcagtggtgacaggagccagatcattcttattgcgaagagagacgtctctgccggagaagagctgacgtataactacctgtttgaccctgacgagtccgaagactgcaagcttccagctgaggagccatcgcagttcccttcatgataatctcagcatttgtacccctggttgctgcttcctcatttttcgtccgttatttggcccccaatcagaagtatggctcaactgtaatgtaccgccatagtgctgcaagctgaagttggactgtttcaggatgatcgtcaaggttgctgccatgcatgctacgacgacccgggccgccggacatgatagctctcatgtgcactcagaccttagagaacagaacagtatagaatgtacataactcggatgcaagtacttatggtcttggtgttggtaatcgttgatctgtactacgctcttaatgctctgattcttttgttggatgatgaagtgctaggaatttcagttctgactataggagtgtgctaacttgggtcccccccttttttttttgttgcgttcgcgtggaatgttcgatttaatggcccgtagcaggccgttgggcggggtctcgagtgcaactacggcccgcattcttctcgttctctctcaaagaagaaagaaagaaagaaagaaa

SEQ ID NO: 75778 - DNA, 3659 bp, Zea Mays
gtcgtcttccccaccacacctcctccgcagtccgccccctgcctcctccgaccaccgcattgcgttcgaaatattgaaaacaccacaattccccgtattccgaaactcgggggagggtccccaaattttcagccccgcgtcggcgcgttgcctccgcctccgccttccacccgcagccccgcatatctccaaatccccaaccccctgctcgcggccccgaactcccccactgagcttgcttaaaatcccgacgcggcgctcgcggaggaggcggaaccctaaggcctggatccctccccgtccccgcgcccgaattgcacgcccgattccaggttctagtgtttcccatgccctagccaccagcgcccgtggtgccggtgccatgcccgcgtcccgcatccctttcaagcgctgcaccgccgccgtcccgggcgtggggaagcccggccccgctgccagcatgccgcccgccaagcgccgccgcgaccgcgtcgtcccgtcgcggtccagggactcgatgccgccgcccgcgccgcacgtggaggaaggtgacaacaggcacggggaggtgtacaacgtagagttgctcatggccgagcccaaagtcgactcatttggtcccgtggagaccgcgttgtggacgcaagcgcggacggcgcccacggatgccgacctgtaccgagcgtgtcgtaacataaacaagaggggcagctgtgggggagctgccagcggtagtgtgctcacgtctgtgagcaatgccgcctcggacgcttgtgctggtggcaatggcaccattgtccgagtgagcaatgctgccttggaaggtggtgctggtagcaatggtggtctggaggggagacctgcggtggtggagtgcaagcccaagagggagggcagcgacaagaaagaggatttctactggccggaggattttgtgcttggggatgtcgtgtgggcgaggtccggcaagaaatccccaatgtggcctgcactggtgattgaccccctgcagcatgcgccggaagtcgtgctcaactcctgtgttcctggcgctctctgcgtcatgttcttcggttattccgctaatgggcatggcagggactatggatgggttaagcaaggaatgatctttccctttgtggactacctagacaggtttcaaggacagcctctgtataagctcagaccaaccaaattccgtgcagcaatcgaggaggctttcctagctgaacgtggtttttttgatctcgacatggatggggcatgctcaccgcgaaagtttgtagataagcagtctgatcctaatggctttcaggaagaggccgcttcaaataacgagcaggagtgccaatctgagtctcaggttgttggcaaatcggcactgtgttgtgatagctgtggtaatcgcctaccatccaaggtttcaaagaaaaggaagcaagggggtgagcaggtgctttgtaggcactgtgaaaagcattactctgcagttattgcagtcgaaacaatactgtggcatatgcaagaaaatttggcaccacacagatggtgggaactgggtttgttgtgatgagtgccagatttgggttcacgtagaatgtgacctgacatgcaacaacatggaggatttggaaaatgcagattatttttgtccggattgcaaatcaaaatgcaaaacagttccagcaactgaaaaaatgaatacttcccacagttcagaatgtgctagcacttcaaagggaaaatcaaccccaatgatagctgttttctgcaacggcgaggaggcattgtatgtacctgagaagcacatgatactatgtcaatgtaaggcttgcaaggaaaggatgatgagtctgaatgagtgggagaagcatactggctcaaggaaaaagaattggaagatgagtattagacagaagagcacaggggagccactcattaatttgctggatgatattccttgtgggacatcgaagtcttctaagccaggcattaagaaaggagagctgctacaattgcaagctaatgcttacagtcctgtctgtgctaaatggacaacggaacgctgtgctgtttgtcgatgggttgaggattgggactacaacaaaattataatttgcaacaggtgccaaatagctgttcaccaagagtgctatggagcacgagctgtacaagatcttacaatatggctttgtcgagcatgtgaattctcccaacagaaaagagaatgctgcctatgtcctgtcaaagggggtgctctcaagccaacagatgttgatggactgtgggttcatgttacatgtgcctggtttcagcctaaagtctcttttccggttgaggagaccatggagccagctatgggaataatgagcatccctgcagagtactttaagaagacttgcgtcatatgcaagcaaatgcatggtgcctgcacacaatgctacaagtgctctacgtattatcatgcaatgtgtgcatcaagagctggatatcgcatggagttgcaacactatgaacgaagtggcaggcacattacaaaaatggtttcctactgtgattttcacagtactcctgacccagacaatgtgttgatagtgaagacacctgaaggtgttttctctacgaaattttttgtccaaaatggtgagaaacagacagctgcaagactcgccaggaaggaaaattaccaggagaaagtgcttcctcctatagtttctgactgtctagtcgcaaagtgcctgacctatgaaatgttgaaatacaagaaagaaccaggagaggctattgcccaccggattatgggacctcgacaccactcccaggattttattgatggccttaacgcatacatgggtcataaggacgaccaatccttttcaacgtttaaagagcgacttgggtatttacagaaaactgaaaatttgagggtctcttgtggtcgatctggaattcatggatgggggctctttgctgcaaggaatattcaggaggggcaaatggttattgagtatcgtggtgaacaagttagacagcgtgttgctgatttgagggaagcacggtaccatagagaaaaaaaggattgctatttgttcaagataagtgaagatgttgtcatcgatgctaccggcaaaggaaacatagcgcgcctgattaatcactcgtgtatgccaagctgctatgctaggatcgtgaccgtcagtggtgacaggagccagatcattcttattgcgaagagagacgtctctgccggagaagagctgacgtataactacctgtttgaccctgacgagtccgaagactgcaaggttccatgcctgtgcaaagctcctaactgccgtggatacatgaactagggtgctgctagaagagtaaaaaccaatctaacaaacaaggactgaggctaactccttacagaagccaaaagccggccatttttttttcctggaattctttcggtagtttctcgttttcttatattactcaccagaagcttacaattcgtgggctgcacaaggtttggaccattttgttcagaaattgcgatttagggcagccgtaggcagtcatccatttgtatattcttccattgctgtgataagatggtaagaatgctcaaatttttttttggttaaatgaaaataagaaaaactcagtttgat

SEQ ID NO: 75779 - DNA, 3644 bp, Zea Mays
cacactcgcaccccgtcgtcttccccaccacacctcctccgcagtccgccccctgcctcctccgaccaccgcattgcgttcgaaatattgaaaacaccacaattccccgtattccgaaactcgggggagggtccccaaattttcagccccgcgtcggcgcgttgcctccgcctccgccttccacccgcagccccgcatatctccaaatccccaaccccctgctcgcggccccgaactcccccactgagcttgcttaaaatcccgacgcggcgctcgcggaggaggcggaaccctaaggcctggatccctccccgtccccgcgcccgaattgcacgcccgattccaggttctagtgtttcccatgccctagccaccagcgcccgtggtgccggtgccatgcccgcgtcccgcatccctttcaagcgctgcaccgccgccgtcccgggcgtggggaagcccggccccgctgccagcatgccgcccgccaagcgccgccgcgaccgcgtcgtcccgtcgcggtccagggactcgatgccgccgcccgcgccgcacgtggaggaaggtgacaacaggcacggggaggtgtacaacgtagagttgctcatggccgagcccaaagtcgactcatttggtcccgtggagaccgcgttgtggacgcaagcgcggacggcgcccacggatgccgacctgtaccgagcgtgtcgtaacataaacaagaggggcagctgtgggggagctgccagcggtagtgtgctcacgtctgtgagcaatgccgcctcggacgcttgtgctggtggcaatggcaccattgtccgagtgagcaatgctgccttggaaggtggtgctggtagcaatggtggtctggaggggagacctgcggtggtggagtgcaagcccaagagggagggcagcgacaagaaagaggatttctactggccggaggattttgtgcttggggatgtcgtgtgggcgaggtccggcaagaaatccccaatgtggcctgcactggtgattgaccccctgcagcatgcgccggaagtcgtgctcaactcctgtgttcctggcgctctctgcgtcatgttcttcggttattccgctaatgggcatggcagggactatggatgggttaagcaaggaatgatctttccctttgtggactacctagacaggtttcaaggacagcctctgtataagctcagaccaaccaaattccgtgcagcaatcgaggaggctttcctagctgaacgtggtttttttgatctcgacatggatggggcatgctcaccgcgaaagtttgtagataagcagtctgatcctaatggctttcaggaagaggccgcttcaaataacgagcaggagtgccaatctgagtctcaggttgttggcaaatcggcactgtgttgtgatagctgtggtaatcgcctaccatccaaggtttcaaagaaaaggaagcaagggggtgagcaggtgctttgtaggcactgtgaaaagttattgcagtcgaaacaatactgtggcatatgcaagaaaatttggcaccacacagatggtgggaactgggtttgttgtgatgagtgccagatttgggttcacgtagaatgtgacctgacatgcaacaacatggagattatttttgtccggattgcaaatcaaaatgcaaaacagttccagcaactgaaaaaatgaatacttcccacagttcagaatgtgctagcacttcaaagggaaaatcaaccccaatgatagctgttttctgcaacggcgaggaggcattgtatgtacctgagaagcacatgatactatgtcaatgtaaggcttgcaaggaaaggatgatgagtctgaatgagtgggagaagcatactggctcaaggaaaaagaattggaagatgagtattagacagaagagcacaggggagccactcattaatttgctggatgatattccttgtgggacatcgaagtcttctaagccaggcattaagaaaggagagctgctacaattgcaagctaatgcttacagtcctgtctgtgctaaatggacaacggaacgctgtgctgtttgtcgatgggttgaggattgggactacaacaaaattataatttgcaacaggtgccaaatagctgttcaccaagagtgctatggagcacgagctgtacaagatcttacaatatggctttgtcgagcatgtgaattctcccaacagaaaagagaatgctgcctatgtcctgtcaaagggggtgctctcaagccaacagatgttgatggactgtgggttcatgttacatgtgcctggtttcagcctaaagtctcttttccggttgaggagaccatggagccagctatgggaataatgagcatccctgcagagtactttaagaagacttgcgtcatatgcaagcaaatgcatggtgcctgcacacaatgctacaagtgctctacgtattatcatgcaatgtgtgcatcaagagctggatatcgcatggagttgcaacactatgaacgaagtggcaggcacattacaaaaatggtttcctactgtgattttcacagtactcctgacccagacaatgtgttgatagtgaagacacctgaaggtgttttctctacgaaattttttgtccaaaatggtgagaaacagacagctgcaagactcgccaggaaggaaaattaccaggagaaagtgcttcctcctatagtttctgactgtctagtcgcaaagtgcctgacctatgaaatgttgaaatacaagaaagaaccaggagaggctattgcccaccggattatgggacctcgacaccactcccaggattttattgatggccttaacgcatacatgggtcataaggacgaccaatccttttcaacgtttaaagagcgacttgggtatttacagaaaactgaaaatttgagggtctcttgtggtcgatctggaattcatggatgggggctctttgctgcaaggaatattcaggaggggcaaatggttattgagtatcgtggtgaacaagttagacagcgtgttgctgatttgagggaagcacggtaccatagagaaaaaaaggattgctatttgttcaagataagtgaagatgttgtcatcgatgctaccggcaaaggaaacatagcgcgcctgattaatcactcgtgtatgccaagctgctatgctaggatcgtgaccgtcagtggtgacaggagccagatcattcttattgcgaagagagacgtctctgccggagaagagctgacgtataactacctgtttgaccctgacgagtccgaagactgcaaggttccatgcctgtgcaaagctcctaactgccgtggatacatgaactagggtgctgctagaagagtaaaaaccaatctaacaaacaaggactgaggctaactccttacagaagccaaaagccggccatttttttttcctggaattctttcggtagtttctcgttttcttatattactcaccagaagcttacaattcgtgggctgcacaaggtttggaccattttgttcagaaattgcgatttagggcagccgtaggcagtcatccatttgtatattcttccattgctgtgataagatggtaagaatgctcaaatttttttttggttaaatgaaaataagaaaaactcagtttgat

SEQ ID NO: 75780 - DNA, 3594 bp, Zea Mays
cacactcgcaccccgtcgtcttccccaccacacctcctccgcagtccgccccctgcctcctccgaccaccgcattgcgttcgaaatattgaaaacaccacaattccccgtattccgaaactcgggggagggtccccaaattttcagccccgcgtcggcgcgttgcctccgcctccgccttccacccgcagccccgcatatctccaaatccccaaccccctgctcgcggccccgaactcccccactgagcttgcttaaaatcccgacgcggcgctcgcggaggaggcggaaccctaaggcctggatccctccccgtccccgcgcccgaattgcacgcccgattccaggttctagtgtttcccatgccctagccaccagcgcccgtggtgccggtgccatgcccgcgtcccgcatccctttcaagcgctgcaccgccgccgtcccgggcgtggggaagcccggccccgctgccagcatgccgcccgccaagcgccgccgcgaccgcgtcgtcccgtcgcggtccagggactcgatgccgccgcccgcgccgcacgtggaggaaggtgacaacaggcacggggaggtgtacaacgtagagttgctcatggccgagcccaaagtcgactcatttggtcccgtggagaccgcgttgtggacgcaagcgcggacggcgcccacggatgccgacctgtaccgagcgtgtcgtaacataaacaagaggggcagctgtgggggagctgccagcggtagtgtgctcacgtctgtgagcaatgccgcctcggacgcttgtgctggtggcaatggcaccattgtccgagtgagcaatgctgccttggaaggtggtgctggtagcaatggtggtctggaggggagacctgcggtggtggagtgcaagcccaagagggagggcagcgacaagaaagaggatttctactggccggaggattttgtgcttggggatgtcgtgtgggcgaggtccggcaagaaatccccaatgtggcctgcactggtgattgaccccctgcagcatgcgccggaagtcgtgctcaactcctgtgttcctggcgctctctgcgtcatgttcttcggttattccgctaatgggcatggcagggactatggatgggttaagcaaggaatgatctttccctttgtggactacctagacaggtttcaaggacagcctctgtataagctcagaccaaccaaattccgtgcagcaatcgaggaggctttcctagctgaacgtggtttttttgatctcgacatggatggggcatgctcaccgcgaaagtttgtagataagcagtctgatcctaatggctttcaggaagaggccgcttcaaataacgagcaggagtgccaatctgagtctcaggttgttggcaaatcggcactgtgttgtgatagctgtggtaatcgcctaccatccaaggtttcaaagaaaaggaagcaagggggtgagcaggtgctttgtaggcactgtgaaaagttattgcagtcgaaacaatactgtggcatatgcaagaaaatttggcaccacacagatggtgggaactgggatttggaaaatgcagattatttttgtccggattgcaaatcaaaatgcaaaacagttccagcaactgaaaaaatgaatacttcccacagttcagaatgtgctagcacttcaaagggaaaatcaaccccaatgatagctgttttctgcaacggcgaggaggcattgtatgtacctgagaagcacatgatactatgtcaatgtaaggcttgcaaggaaaggatgatgagtctgaatgagtgggagaagcatactggctcaaggaaaaagaattggaagatgagtattagacagaagagcacaggggagccactcattaatttgctggatgatattccttgtgggacatcgaagtcttctaagccaggcattaagaaaggagagctgctacaattgcaagctaatgcttacagtcctgtctgtgctaaatggacaacggaacgctgtgctgtttgtcgatgggttgaggattgggactacaacaaaattataatttgcaacaggtgccaaatagctgttcaccaagagtgctatggagcacgagctgtacaagatcttacaatatggctttgtcgagcatgtgaattctcccaacagaaaagagaatgctgcctatgtcctgtcaaagggggtgctctcaagccaacagatgttgatggactgtgggttcatgttacatgtgcctggtttcagcctaaagtctcttttccggttgaggagaccatggagccagctatgggaataatgagcatccctgcagagtactttaagaagacttgcgtcatatgcaagcaaatgcatggtgcctgcacacaatgctacaagtgctctacgtattatcatgcaatgtgtgcatcaagagctggatatcgcatggagttgcaacactatgaacgaagtggcaggcacattacaaaaatggtttcctactgtgattttcacagtactcctgacccagacaatgtgttgatagtgaagacacctgaaggtgttttctctacgaaattttttgtccaaaatggtgagaaacagacagctgcaagactcgccaggaaggaaaattaccaggagaaagtgcttcctcctatagtttctgactgtctagtcgcaaagtgcctgacctatgaaatgttgaaatacaagaaagaaccaggagaggctattgcccaccggattatgggacctcgacaccactcccaggattttattgatggccttaacgcatacatgggtcataaggacgaccaatccttttcaacgtttaaagagcgacttgggtatttacagaaaactgaaaatttgagggtctcttgtggtcgatctggaattcatggatgggggctctttgctgcaaggaatattcaggaggggcaaatggttattgagtatcgtggtgaacaagttagacagcgtgttgctgatttgagggaagcacggtaccatagagaaaaaaaggattgctatttgttcaagataagtgaagatgttgtcatcgatgctaccggcaaaggaaacatagcgcgcctgattaatcactcgtgtatgccaagctgctatgctaggatcgtgaccgtcagtggtgacaggagccagatcattcttattgcgaagagagacgtctctgccggagaagagctgacgtataactacctgtttgaccctgacgagtccgaagactgcaaggttccatgcctgtgcaaagctcctaactgccgtggatacatgaactagggtgctgctagaagagtaaaaaccaatctaacaaacaaggactgaggctaactccttacagaagccaaaagccggccatttttttttcctggaattctttcggtagtttctcgttttcttatattactcaccagaagcttacaattcgtgggctgcacaaggtttggaccattttgttcagaaattgcgatttagggcagccgtaggcagtcatccatttgtatattcttccattgctgtgataagatggtaagaatgctcaaatttttttttggttaaatgaaaataagaaaaactcagtttgat

SEQ ID NO: 75781 - DNA, 3664 bp, Zea Mays
cacactcgcaccccgtcgtcttccccaccacacctcctccgcagtccgccccctgcctcctccgaccaccgcattgcgttcgaaatattgaaaacaccacaattccccgtattccgaaactcgggggagggtccccaaattttcagccccgcgtcggcgcgttgcctccgcctccgccttccacccgcagccccgcatatctccaaatccccaaccccctgctcgcggccccgaactcccccactgagcttgcttaaaatcccgacgcggcgctcgcggaggaggcggaaccctaaggcctggatccctccccgtccccgcgcccgaattgcacgcccgattccaggttctagtgtttcccatgccctagccaccagcgcccgtggtgccggtgccatgcccgcgtcccgcatccctttcaagcgctgcaccgccgccgtcccgggcgtggggaagcccggccccgctgccagcatgccgcccgccaagcgccgccgcgaccgcgtcgtcccgtcgcggtccagggactcgatgccgccgcccgcgccgcacgtggaggaaggtgacaacaggcacggggaggtgtacaacgtagagttgctcatggccgagcccaaagtcgactcatttggtcccgtggagaccgcgttgtggacgcaagcgcggacggcgcccacggatgccgacctgtaccgagcgtgtcgtaacataaacaagaggggcagctgtgggggagctgccagcggtagtgtgctcacgtctgtgagcaatgccgcctcggacgcttgtgctggtggcaatggcaccattgtccgagtgagcaatgctgccttggaaggtggtgctggtagcaatggtggtctggaggggagacctgcggtggtggagtgcaagcccaagagggagggcagcgacaagaaagaggatttctactggccggaggattttgtgcttggggatgtcgtgtgggcgaggtccggcaagaaatccccaatgtggcctgcactggtgattgaccccctgcagcatgcgccggaagtcgtgctcaactcctgtgttcctggcgctctctgcgtcatgttcttcggttattccgctaatgggcatggcagggactatggatgggttaagcaaggaatgatctttccctttgtggactacctagacaggtttcaaggacagcctctgtataagctcagaccaaccaaattccgtgcagcaatcgaggaggctttcctagctgaacgtggtttttttgatctcgacatggatggggcatgctcaccgcgaaagtttgtagataagcagtctgatcctaatggctttcaggaagaggccgcttcaaataacgagcaggagtgccaatctgagtctcaggttgttggcaaatcggcactgtgttgtgatagctgtggtaatcgcctaccatccaaggtttcaaagaaaaggaagcaagggggtgagcaggtgctttgtaggcactgtgaaaagttattgcagtcgaaacaatactgtggcatatgcaagaaaatttggcaccacacagatggtgggaactgggtttgttgtgatgagtgccagatttgggttcacgtagaatgtgacctgacatgcaacaacatggagattatttttgtccggattgcaaatcaaaatgcaaaacagttccagcaactgaaaaaatgaatacttcccacagttcagaatgtgctagcacttcaaagggaaaatcaaccccaatgatagctgttttctgcaacggcgaggaggcattgtatgtacctgagaagcacatgatactatgtcaatgtaaggcttgcaaggaaaggatgatgagtctgaatgagtgggagaagcatactggctcaaggaaaaagaattggaagatgagtattagacagaagagcacaggggagccactcattaatttgctggatgatattccttgtgggacatcgaagtcttctaagccaggcattaagaaaggagagctgctacaattgcaagctaatgcttacagtcctgtctgtgctaaatggacaacggaacgctgtgctgtttgtcgatgggttgaggattgggactacaacaaaattataatttgcaacaggtgccaaatagctgttcaccaagagtgctatggagcacgagctgtacaagatcttacaatatggctttgtcgagcatgtgaattctcccaacagaaaagagaatgctgcctatgtcctgtcaaagggggtgctctcaagccaacagatgttgatggactgtgggttcatgttacatgtgcctggtttcagcctaaagtctcttttccggttgaggagaccatggagccagctatgggaataatgagcatccctgcagagtactttaagaagacttgcgtcatatgcaagcaaatgcatggtgcctgcacacaatgctacaagtgctctacgtattatcatgcaatgtgtgcatcaagagctggatatcgcatggagttgcaacactatgaacgaagtggcaggcacattacaaaaatggtttcctactgtgattttcacagtactcctgacccagacaatgtgttgatagtgaagacacctgaaggtgttttctctacgaaattttttgtccaaaatggtgagaaacagacagctgcaagactcgccaggaaggaaaattaccaggagaaagtgcttcctcctatagtttctgactgtctagtcgcaaagtgcctgacctatgaaatgttgaaatacaagaaagaaccaggagaggctattgcccaccggattatgggacctcgacaccactcccaggattttattgatggccttaacgcatacatgggtcataaggacgaccaatccttttcaacgtttaaagagcgacttgggtatttacagaaaactgaaaatttgagggtctcttgtggtcgatctggaattcatggatgggggctctttgctgcaaggaatattcaggaggggcaaatggttattgagtatcgtggtgaacaagttagacagcgtgttgctgatttgagggaagcacggtaccatagagaaaaaaaggattgctatttgttcaagataagtgaagatgttgtcatcgatgctaccggcaaaggaaacatagcgcgcctgattaatcactcgtgtatgccaagctgctatgctaggatcgtgaccgtcagtggtgacaggagccagatcattcttattgcgaagagagacgtctctgccggagaagagctgacgtagttcctcagccctgccagtataactacctgtttgaccctgacgagtccgaagactgcaaggttccatgcctgtgcaaagctcctaactgccgtggatacatgaactagggtgctgctagaagagtaaaaaccaatctaacaaacaaggactgaggctaactccttacagaagccaaaagccggccatttttttttcctggaattctttcggtagtttctcgttttcttatattactcaccagaagcttacaattcgtgggctgcacaaggtttggaccattttgttcagaaattgcgatttagggcagccgtaggcagtcatccatttgtatattcttccattgctgtgataagatggtaagaatgctcaaatttttttttggttaaatgaaaataagaaaaactcagtttgat

SEQ ID NO: 75782 - DNA, 3694 bp, Zea Mays
gtcgcacactcgcaccccgtcgtcttccccaccacacctcctccgcagtccgccccctgcctcctccgaccaccgcattgcgttcgaaatattgaaaacaccacaattccccgtattccgaaactcgggggagggtccccaaattttcagccccgcgtcggcgcgttgcctccgcctccgccttccacccgcagccccgcatatctccaaatccccaaccccctgctcgcggccccgaactcccccactgagcttgcttaaaatcccgacgcggcgctcgcggaggaggcggaaccctaaggcctggatccctccccgtccccgcgcccgaattgcacgcccgattccaggttctagtgtttcccatgccctagccaccagcgcccgtggtgccggtgccatgcccgcgtcccgcatccctttcaagcgctgcaccgccgccgtcccgggcgtggggaagcccggccccgctgccagcatgccgcccgccaagcgccgccgcgaccgcgtcgtcccgtcgcggtccagggactcgatgccgccgcccgcgccgcacgtggaggaaggtgacaacaggcacggggaggtgtacaacgtagagttgctcatggccgagcccaaagtcgactcatttggtcccgtggagaccgcgttgtggacgcaagcgcggacggcgcccacggatgccgacctgtaccgagcgtgtcgtaacataaacaagaggggcagctgtgggggagctgccagcggtagtgtgctcacgtctgtgagcaatgccgcctcggacgcttgtgctggtggcaatggcaccattgtccgagtgagcaatgctgccttggaaggtggtgctggtagcaatggtggtctggaggggagacctgcggtggtggagtgcaagcccaagagggagggcagcgacaagaaagaggatttctactggccggaggattttgtgcttggggatgtcgtgtgggcgaggtccggcaagaaatccccaatgtggcctgcactggtgattgaccccctgcagcatgcgccggaagtcgtgctcaactcctgtgttcctggcgctctctgcgtcatgttcttcggttattccgctaatgggcatggcagggactatggatgggttaagcaaggaatgatctttccctttgtggactacctagacaggtttcaaggacagcctctgtataagctcagaccaaccaaattccgtgcagcaatcgaggaggctttcctagctgaacgtggtttttttgatctcgacatggatggggcatgctcaccgcgaaagtttgtagataagcagtctgatcctaatggctttcaggaagaggccgcttcaaataacgagcaggagtgccaatctgagtctcaggttgttggcaaatcggcactgtgttgtgatagctgtggtaatcgcctaccatccaaggtttcaaagaaaaggaagcaagggggtgagcaggtgctttgtaggcactgtgaaaagcattactctgcagttattgcagtcgaaacaatactgtggcatatgcaagaaaatttggcaccacacagatggtgggaactgggtaagggcttagaagaatacatgctttggttgtatattctcttgaatattctgggtactgatttgaaaggcactttgttccaggatttggaaaatgcagattatttttgtccggattgcaaatcaaaatgcaaaacagttccagcaactgaaaaaatgaatacttcccacagttcagaatgtgctagcacttcaaagggaaaatcaaccccaatgatagctgttttctgcaacggcgaggaggcattgtatgtacctgagaagcacatgatactatgtcaatgtaaggcttgcaaggaaaggatgatgagtctgaatgagtgggagaagcatactggctcaaggaaaaagaattggaagatgagtattagacagaagagcacaggggagccactcattaatttgctggatgatattccttgtgggacatcgaagtcttctaagccaggcattaagaaaggagagctgctacaattgcaagctaatgcttacagtcctgtctgtgctaaatggacaacggaacgctgtgctgtttgtcgatgggttgaggattgggactacaacaaaattataatttgcaacaggtgccaaatagctgttcaccaagagtgctatggagcacgagctgtacaagatcttacaatatggctttgtcgagcatgtgaattctcccaacagaaaagagaatgctgcctatgtcctgtcaaagggggtgctctcaagccaacagatgttgatggactgtgggttcatgttacatgtgcctggtttcagcctaaagtctcttttccggttgaggagaccatggagccagctatgggaataatgagcatccctgcagagtactttaagaagacttgcgtcatatgcaagcaaatgcatggtgcctgcacacaatgctacaagtgctctacgtattatcatgcaatgtgtgcatcaagagctggatatcgcatggagttgcaacactatgaacgaagtggcaggcacattacaaaaatggtttcctactgtgattttcacagtactcctgacccagacaatgtgttgatagtgaagacacctgaaggtgttttctctacgaaattttttgtccaaaatggtgagaaacagacagctgcaagactcgccaggaaggaaaattaccaggagaaagtgcttcctcctatagtttctgactgtctagtcgcaaagtgcctgacctatgaaatgttgaaatacaagaaagaaccaggagaggctattgcccaccggattatgggacctcgacaccactcccaggattttattgatggccttaacgcatacatgggtcataaggacgaccaatccttttcaacgtttaaagagcgacttgggtatttacagaaaactgaaaatttgagggtctcttgtggtcgatctggaattcatggatgggggctctttgctgcaaggaatattcaggaggggcaaatggttattgagtatcgtggtgaacaagttagacagcgtgttgctgatttgagggaagcacggtaccatagagaaaaaaaggattgctatttgttcaagataagtgaagatgttgtcatcgatgctaccggcaaaggaaacatagcgcgcctgattaatcactcgtgtatgccaagctgctatgctaggatcgtgaccgtcagtggtgacaggagccagatcattcttattgcgaagagagacgtctctgccggagaagagctgacgtataactacctgtttgaccctgacgagtccgaagactgcaaggttccatgcctgtgcaaagctcctaactgccgtggatacatgaactagggtgctgctagaagagtaaaaaccaatctaacaaacaaggactgaggctaactccttacagaagccaaaagccggccatttttttttcctggaattctttcggtagtttctcgttttcttatattactcaccagaagcttacaattcgtgggctgcacaaggtttggaccattttgttcagaaattgcgatttagggcagccgtaggcagtcatccatttgtatattcttccattgctgtgataagatggtaagaatgctcaaatttttttttggttaaatgaaaataagaaaaactcagtttgat

SEQ ID NO: 75783 - DNA, 3672 bp, Zea Mays
ctggccgcgtcgcacactcgcaccccgtcgtcttccccaccacacctcctccgcagtccgccccctgcctcctccgaccaccgcattgcgttcgaaatattgaaaacaccacaattccccgtattccgaaactcgggggagggtccccaaattttcagccccgcgtcggcgcgttgcctccgcctccgccttccacccgcagccccgcatatctccaaatccccaaccccctgctcgcggccccgaactcccccactgagcttgcttaaaatcccgacgcggcgctcgcggaggaggcggaaccctaaggcctggatccctccccgtccccgcgcccgaattgcacgcccgattccaggttctagtgtttcccatgccctagccaccagcgcccgtggtgccggtgccatgcccgcgtcccgcatccctttcaagcgctgcaccgccgccgtcccgggcgtggggaagcccggccccgctgccagcatgccgcccgccaagcgccgccgcgaccgcgtcgtcccgtcgcggtccagggactcgatgccgccgcccgcgccgcacgtggaggaaggtgacaacaggcacggggaggtgtacaacgtagagttgctcatggccgagcccaaagtcgactcatttggtcccgtggagaccgcgttgtggacgcaagcgcggacggcgcccacggatgccgacctgtaccgagcgtgtcgtaacataaacaagaggggcagctgtgggggagctgccagcggtagtgtgctcacgtctgtgagcaatgccgcctcggacgcttgtgctggtggcaatggcaccattgtccgagtgagcaatgctgccttggaaggtggtgctggtagcaatggtggtctggaggggagacctgcggtggtggagtgcaagcccaagagggagggcagcgacaagaaagaggatttctactggccggaggattttgtgcttggggatgtcgtgtgggcgaggtccggcaagaaatccccaatgtggcctgcactggtgattgaccccctgcagcatgcgccggaagtcgtgctcaactcctgtgttcctggcgctctctgcgtcatgttcttcggttattccgctaatgggcatggcagggactatggatgggttaagcaaggaatgatctttccctttgtggactacctagacaggtttcaaggacagcctctgtataagctcagaccaaccaaattccgtgcagcaatcgaggaggctttcctagctgaacgtggtttttttgatctcgacatggatggggcatgctcaccgcgaaagtttgtagataagcagtctgatcctaatggctttcaggaagaggccgcttcaaataacgagcaggagtgccaatctgagtctcaggttgttggcaaatcggcactgtgttgtgatagctgtggtaatcgcctaccatccaaggtttcaaagaaaaggaagcaagggggtgagcaggtgctttgtaggcactgtgaaaagttattgcagtcgaaacaatactgtggcatatgcaagaaaatttggcaccacacagatggtgggaactgggtttgttgtgatgagtgccagatttgggttcacgtagaatgtgacctgacatgcaacaacatggaggatttggaaaatgcagattatttttgtccggattgcaaatcaaaatgcaaaacagttccagcaactgaaaaaatgaatacttcccacagttcagaatgtgctagcacttcaaagggaaaatcaaccccaatgatagctgttttctgcaacggcgaggaggcattgtatgtacctgagaagcacatgatactatgtcaatgtaaggcttgcaaggaaaggatgatgagtctgaatgagtgggagaagcatactggctcaaggaaaaagaattggaagatgagtattagacagaagagcacaggggagccactcattaatttgctggatgatattccttgtgggacatcgaagtcttctaagccaggcattaagaaaggagagctgctacaattgcaagctaatgcttacagtcctgtctgtgctaaatggacaacggaacgctgtgctgtttgtcgatgggttgaggattgggactacaacaaaattataatttgcaacaggtgccaaatagctgttcaccaagagtgctatggagcacgagctgtacaagatcttacaatatggctttgtcgagcatgtgaattctcccaacagaaaagagaatgctgcctatgtcctgtcaaagggggtgctctcaagccaacagatgttgatggactgtgggttcatgttacatgtgcctggtttcagcctaaagtctcttttccggttgaggagaccatggagccagctatgggaataatgagcatccctgcagagtactttaagaagacttgcgtcatatgcaagcaaatgcatggtgcctgcacacaatgctacaagtgctctacgtattatcatgcaatgtgtgcatcaagagctggatatcgcatggagttgcaacactatgaacgaagtggcaggcacattacaaaaatggtttcctactgtgattttcacagtactcctgacccagacaatgtgttgatagtgaagacacctgaaggtgttttctctacgaaattttttgtccaaaatggtgagaaacagacagctgcaagactcgccaggaaggaaaattaccaggagaaagtgcttcctcctatagtttctgactgtctagtcgcaaagtgcctgacctatgaaatgttgaaatacaagaaagaaccaggagaggctattgcccaccggattatgggacctcgacaccactcccaggattttattgatggccttaacgcatacatgggtcataaggacgaccaatccttttcaacgtttaaagagcgacttgggtatttacagaaaactgaaaatttgagggtctcttgtggtcgatctggaattcatggatgggggctctttgctgcaaggaatattcaggaggggcaaatggttattgagtatcgtggtgaacaagttagacagcgtgttgctgatttgagggaagcacggtaccatagagaaaaaaaggattgctatttgttcaagataagtgaagatgttgtcatcgatgctaccggcaaaggaaacatagcgcgcctgattaatcactcgtgtatgccaagctgctatgctaggatcgtgaccgtcagtggtgacaggagccagatcattcttattgcgaagagagacgtctctgccggagaagagctgacgtataactacctgtttgaccctgacgagtccgaagactgcaaggttccatgcctgtgcaaagctcctaactgccgtggatacatgaactagggtgctgctagaagagtaaaaaccaatctaacaaacaaggactgaggctaactccttacagaagccaaaagccggccatttttttttcctggaattctttcggtagtttctcgttttcttatattactcaccagaagcttacaattcgtgggctgcacaaggtttggaccattttgttcagaaattgcgatttagggcagccgtaggcagtcatccatttgtatattcttccattgctgtgataagatggtaagaatgctcaaatttttttttggttaaatgaaaataagaaaaactcagtttgat

SEQ ID NO: 75784 - DNA, 1617 bp, Zea Mays
gcagcactacaagatcagaatatctgattcaaagatgcagtgtacatttacagataaatacactgacatacatttacaaaaaaaaagtacatattaactcgttttgtttacaaaataaagttaaacccaaaggaaatggacaaatgagaagaacccataggtttatcaggcttcagacacagaagaattttgttgttgttgttattgcgtgcagcagctcaaagttcagtgtcacagaacttcaccatcaggtcggaaaccatccttcgtgccaaaggaatgtagctcaaactatacctgaggtgcaaaaatcaaaatagggcgcagatctcacatatgacagcgatcagtgttagcagcttgtcatgaatctgcccagttgaaccaaatgcaaagatggttatgtgtcttgaatatatgcctgctcaatttagtggctagagaacaagtccatgggaacgttgttgtcagttgggcaaaccatttgtgctcattccatctaggctggtgtttaggttgtggtaattttatttcattttaaaaactattgtaattccgttgctcttgagtaatgatatttggtttgtccatggtgaaaaaaaaagagaataaggccatgagataaaaagaacaagaacagttcaaatatacgaacccaaagagcaaagattagagccaaaacaacacatccaacataaacagccgttgcatacagacgaactggatcaaacatcatccttagctgtttttgagggcccataacaaaggctgtgctgccaaacaaaggttgaaatcagcatatggtaagcattcaaaattcaagaaaaataattaacatgaatagagagcaagtgtattaatcttgtatttaattatatacacacttgaagtattaataatgtagaaatattgaaatggcagaaccatagaaagttacaagtgaagaaaccacattattacctcccaactgccaatatgtttccaaatgtaaacattactgcgaatttgataggtcttgcgaagacaataaaagactgtgcaagaaagtgaaatgtaagcacgtcattacacatgatagcaggactttaaagttattaccagaacctaacaaatatgtgacaacattctttccatggcttttattttaaatagtgtagaatatggcatggtttaaggattagcacaaagtcctaagttcatagtgatatgactcctagacaaatctggagtaagatgcacgtaaattaagaactacagtactagttctccagcacttgtagaccaaaagctaacaatgtatacaagctactctgatgaagaacagcctaacgtgaccaacaccaaatttcctgttcccaaactatcacccccacaaaacccattcagaagtttttaatattacatcaaacttaatcctcggagccacagtgtcaaatcacgtgtttcgaatcaaataaagcaagacagacagctgcaattgtcgttctcaaaggcatgacgtacaggtgcctggaatagcatatctacaaggctaattctccaactgcaggagaatgtagcaactgctcaaactctctaacacctatacgatacgggcgacggtttgcgagagcgtac

SEQ ID NO: 75785 - DNA, 2648 bp, Zea Mays
cttgcatgtagtggttcttatatttgcacccgtgattagttccccaatctgtgaactcatcgttttgcagcactacaagatcagaatatctgattcaaagatgcagtgtacatttacagataaatacactgacatacatttacaaaaaaaaagtacatattaactcgttttgtttacaaaataaagttaaacccaaaggaaatggacaaatgagaagaacccataggtttatcaggcttcagacacagaagaattttgttgttgttgttattgcgtgcagcagctcaaagttcagtgtcacagaacttcaccatcaggtcggaaaccatccttcgtgccaaaggaatgtagctcaaactatacctgaggtgcaaaaatatggagaatacagaagcataataaattggtttgttcagaaaattttgctcctactgtaaaatataccagtaatttgacgcaaacgagcagcacactgcttgctaagatcgagtttcagagtgccacagtaccaccatccagcaagactggcctagtggcctgtgcacattcattcaaaaaatgacaagaaggtatgacagtcacaagccataacctataaattcagttttacagtttggtactccctccattcaaaactgtagttcgtttagtgttgtcctaaatcaaacttgtctttgatcaaatcataggaggagagaccaacatctagcacatcaaagtagcttcattaaataaaatttgaaatgcattggtaatacatttatttcgttttgtaaatgttaacatatttgtttattaaattggttaaagttagagaagtttgacttgaaacaaaaattaaaccgacttacaaaacagagggagtaactggaagccacactgtttatgaacagacagtgagcagcctagcatatactccattactgggaagatagttcaaagaattttttatctttcatattatgcacagtcatttaatttatggtatcaaaactagaagtatcttatgtaaaatgcacattgtcacttaccactaaacagtaccatgtaaaataccctacagctaacagctgtatatgtacataaacaaattagcactattttgttcttctgaacatgccaaccccactgagtaataaagcacaaaagaacagtgttatatcagcatcagtagccagagtcccagatcatgagtggtacacaagtttgagatggttctctgtttagtactcatttgtttctttgacatggattgaacatgtaaaatgattgaggacatcatgcataacatagacgaaaactatgagtaacaactgcagtcgattcatggaaaatagcaggtgacaacaattttgtattgtcccgatagtaaggtaccagctaccagtctaattggcagctattttgactcataagatatttagaagggtaacattccatatgatgtctgatatgttatttatcagtcacattaaggaagacatatttgcattcagtattgttagtgcaacggcagttgtatgagtatgacttaccaaaatagggcgcagatctcacatatgacagcgatcagtgttagcagcttgtcatgaatctgcccagttgaaccaaatgcaaagatggttatgtgtcttgaatatatgcctgctcaatttagtggctagagaacaagtccatgggaacgttgttgtcagttgggcaaaccatttgtgctcattccatctaggctggtgtttaggttgtggtaattttatttcattttaaaaactattgtaattccgttgctcttgagtaatgatatttggtttgtccatggtgaaaaaaaaagagaataaggccatgagataaaaagaacaagaacagttcaaatatacgaacccaaagagcaaagattagagccaaaacaacacatccaacataaacagccgttgcatacagacgaactggatcaaacatcatccttagctgtttttgagggcccataacaaaggctcccaactgccaatatgtttccaaatgtaaacattactgcgaatttgataggtcttgcgaagacaataaaagactgtgcaagaaagtgaaatgtaagcacgtcattacacatgatagcaggactttaaagttattaccagaacctaacaaatatgtgacaacattctttccatggcttttattttaaatagtgtagaatatggcatggtttaaggattagcacaaagtcctaagttcatagtgatatgactcctagacaaatctggagtaagatgcacgtaaattaagaactacagtactagttctccagcacttgtagaccaaaagctaacaatgtatacaagctactctgatgaagaacagcctaacgtgaccaacaccaaatttcctgttcccaaactatcacccccacaaaacccattcagaagtttttaatattacatcaaacttaatcctcggagccacagtgtcaaatcacgtgtttcgaatcaaataaagcaagacagacagctgcaattgtcgttctcaaaggcatgacgtacaggtgcctggaatagcatatctacaaggctaattctccaactgcaggagaatgtagcaactgctcaaactctctaacacctatacgatacgggcgacggtttgcgagagcgtac

SEQ ID NO: 75786 - DNA, 1184 bp, Zea Mays
gtcgtcttcactgctcggttgctcgcgcgagtcgcgcaccagtcccaactaattccgccgccgacgcagcaagcagtgcagcaaccagcaagcaggcaagctgcgcgagaaagcaaaagcaagcaagcaaacaataagccgagcaggcaagccgcgcagggggccggccggccgggcaagcaagcagcaggcagcgcagcaagcagagcaagcgcaacaagcaggagcagcgccgcaagcagagcaacacagcaagcaagcagagcaagcgcaacaagcaggagcagcgccgcaagcagagcaacacagcaagcaagcagagcaacgcagcggcgtagcaagcagtgtacaatataaagagagttcgaacaattacatcgagagggataaatttgcatatattgaagatcgtcaaattatggagcattatcaagccattagaacacgaagggagcaaataccaaagacaagaaatttcaggaaatgtttctattgttgatgaaagcaacctaagtaattgatgaattggtcattgagacaaagatctatcattttcataattagtgttatttccggccctacccttagaagtatcctggctccgccactgatgggacctgctaatctctgaattgagattgctttcaaaatcatgcatgatccttgccagatggttttaaaccccttgaaacgcagatgcaatcacgattcacgaacttggagacgctaaaattcaaattcgagaaaatccaagtttacggccaattccttccgctaagcagtaagactgtctccagcaacatcctctatatacatcctctatatccgtcatttacagtcttctctaaaatattccatcttctatatatactttctctccaacaacgtcctctatatataaatacctatattaaagacatttttaatttttaatttttgtacatacgtatttgtcatactctcaaatgtattgtacatattttagttttattaaaccggttgtttaaagtattcaaatagatagagaaccgtttagagaaactctacatatggaggatccagcagcgttctctaaatttagaggaccgtttagaggacattgctggagggagtagaggacgtcctcgtcctctaaatttagggtacatgaccctttagagggtcttgttggagccagcctaagc

SEQ ID NO: 75787 - DNA, 843 bp, Zea Mays
agcatggttgtggacaacggagcgcccgaagcaccacatgctggtgctaccggcagcgtcatgtcatccgagatggccgtgagcccctcatcagcggcttcaagcaaccatgctccatttatgccgccggagatcccaggcatggccatggacgtgccaggcctagactcgacattcggatctgacgtagggaatggacctctgcaattaggaccagatggctcgtcgagagactccattagatccttggggcagctctggaacttcagcctctctgatctaacggcggatttgacgagtttgggagactatggcccaaccagcgttctggtagtagcaacccctctgatgataaaatgaaatggccgctcccattcgcagcagatttggacgtgctggagaactacaccggcacccctttcctgccttcggactcggacattctgctcgactccccggaccaagatgacatagtcgaatattttgctgacgccatcaacgggtctcagtcagacgaggagaggtcatagcgaagctagctcaaggtttttcaggcagggcgcagggatgtgtcttctcatggcctgctgcgagagatgctgcggctaatgtaatgtaactgtgccttgggcccgcgcccctgtgtgctgcggcaagtgtagctggtttaattagactttttttttaatttgtagctggttaattagaatcctaattctttggaataaaaaagtagtagctggagttatcggtaagaatcgctggatgtaatgcaaagctcgctctcacagtcacagctgggtgaccacaggaggacctcctttttgtttgttgtatatttgc

SEQ ID NO: 75788 - DNA, 1653 bp, Zea Mays
cccgtgctcgcgcgcgcgcgcgctctctctctctctctctctcccctccctgtctccctccccctctcggagtctcggtcgtggcgacgacgactgggcaggccgacgagcacccaccaggaaaagtattgctcctagcctcctacagctagttctttttatgattaagctccaatgaaggattctcaggatattcagagcacaacagagttgcagtcatcagcacagggtactaatgaagtgcaaagtcagcaaccaaacccgatgaccactgatgctcctgcaggaaattcgggttccttgtctatagctagtaatgacagtaagaaggtgtctcgcgaagacattgaacttgttcagaatttaatagagcgttgtcttcagctatacatgaacaaaggagaagttgttagaactctttctactcgtgctagaatagaacctggcttcactactttagtatggcagaaactcgaagaagagaactccgagttctttagggcttactatatccggttgaaattgaaacggcaaatcatcttgttcaatcatttattgcaacaccagtacaatttgatgaaatatccagcacctccaaatgttccattggctccaatacaaaatggaattcatcatatgccagttagcaatttaccaatggggtatccagtacttccgcagcctatcatgccggctcccggccagcctcacatggacccaatggcctgtggtctgtccaatggtcatgtggtcaatggaatacctgcaccaggtggttatcatccgatgcgcatgaactctggaaatgacatggttgtggacaacggagcgcccgaagcaccacatgctggtgctaccggcagcgtcatgtcatccgagatggccgtgagcccctcatcagcggcttcaagcaaccatgctccatttatgccgccggagatcccaggcatggccatggacgtgccaggcctagactcgacattcggatctgacgtagggaatggacctctgcaattaggaccagatggctcgtcgagagactccattagatccttggggcagctctggaacttcagcctctctgatctaacggcggatttgacgagtttgggagaagactatggcccaaccagcgttctggtagtagcaacccctctgatgataaaatgaaatggccgctcccattcgcagcagatttggacgtgctggagaactacaccggcacccctttcctgccttcggactcggacattctgctcgactccccggaccaagatgacatagtcgaatattttgctgacgccatcaacgggtctcagtcagacgaggagaggtcatagcgaagctagctcaaggtttttcaggcagggcgcagggatgtgtcttctcatggcctgctgcgagagatgctgcggctaatgtaatgtaactgtgccttgggcccgcgcccctgtgtgctgcggcaagtgtagctggtttaattagactttttttttaatttgtagctggttaattagaatcctaattctttggaataaaaaagtagtagctggagttatcggtaagaatcgctggatgtaatgcaaagctcgctctcacagtcacagctgggtgaccacaggaggacctcctttttgtttgttgtatatttgc

SEQ ID NO: 75789 - DNA, 1573 bp, Zea Mays
cccgtgctcgcgcgcgcgcgcgctctctctctctctctctctcccctccctgtctccctccccctctcggagtctcggtcgtggcgacgacgactgggcaggccgacgagcacccaccaggaaaagtattgctcctagcctcctacagctagttctttttatgattaagctccaatgaaggattctcaggatattcagagcacaacagagttgcagtcatcagcacagggtactaatgaagtgcaaagtcagcaaccaaacccgatgaccactgatgctcctgcaggaaattcgggttccttgtctatagctagtaatgacagtaagaaggtgtctcgcgaagacattgaacttgttcagaatttaatagagcgttgtcttcagctatacatgaacaaaggagaagttgttagaactctttctactcgtgctagaatagaacctggcttcactactttagtatggcagaaactcgaagaagagaactccgagttctttagggcttactatatccggttgaaattgaaacggcaaatcatcttgttcaatcatttattgcaacaccagtacaatttgatgaaatatccagcacctccaaatgttccattggctccaatacaaaatggaattcatcatatgccagttagcaatttaccaatggggtatccagtacttccgcagcctatcatgccggctcccggccagcctcacatggacccaatggcctgtggtctgtccaatggtcatgtggtcaatggaatacctgcaccaggtggttatcatccgatgcgcatgaactctggaaatgacatggttgtggacaacggagcgcccgaagcaccacatgctggtgctaccggcagcgtcatgtcatccgagatggccgtgagcccctcatcagcggcttcaagcaaccatgctccatttatgccgccggagatcccaggcatggccatggacgtgccaggcctagactcgacattcggatctgacgtagggaatggacctctgcaattaggaccagatggctcgtcgagagactccattagatccttggggcagctctggaacttcagcctctctgatctaacggcggatttgacgagtttgggagatttggacgtgctggagaactacaccggcacccctttcctgccttcggactcggacattctgctcgactccccggaccaagatgacatagtcgaatattttgctgacgccatcaacgggtctcagtcagacgaggagaggtcatagcgaagctagctcaaggtttttcaggcagggcgcagggatgtgtcttctcatggcctgctgcgagagatgctgcggctaatgtaatgtaactgtgccttgggcccgcgcccctgtgtgctgcggcaagtgtagctggtttaattagactttttttttaatttgtagctggttaattagaatcctaattctttggaataaaaaagtagtagctggagttatcggtaagaatcgctggatgtaatgcaaagctcgctctcacagtcacagctgggtgaccacaggaggacctcctttttgtttgttgtatatttgc

SEQ ID NO: 75790 - DNA, 1576 bp, Zea Mays
cccgtgctcgcgcgcgcgcgcgctctctctctctctctctctcccctccctgtctccctccccctctcggagtctcggtcgtggcgacgacgactgggcaggccgacgagcacccaccaggaaaagtattgctcctagcctcctacagctagttctttttatgattaagctccaatgaaggattctcaggatattcagagcacaacagagttgcagtcatcagcacagggtactaatgaagtgcaaagtcagcaaccaaacccgatgaccactgatgctcctgcaggaaattcgggttccttgtctatagctagtaatgacagtaagaaggtgtctcgcgaagacattgaacttgttcagaatttaatagagcgttgtcttcagctatacatgaacaaaggagaagttgttagaactctttctactcgtgctagaatagaacctggcttcactactttagtatggcagaaactcgaagaagagaactccgagttctttagggcttactatatccggttgaaattgaaacggcaaatcatcttgttcaatcatttattgcaacaccagtacaatttgatgaaatatccagcacctccaaatgttccattggctccaatacaaaatggaattcatcatatgccagttagcaatttaccaatggggtatccagtacttccgcagcctatcatgccggctcccggccagcctcacatggacccaatggcctgtggtctgtccaatggtcatgtggtcaatggaatacctgcaccaggtggttatcatccgatgcgcatgaactctggaaatgacatggttgtggacaacggagcgcccgaagcaccacatgctggtgctaccggcagcgtcatgtcatccgagatggccgtgagcccctcatcagcggcttcaagcaaccatgctccatttatgccgccggagatcccaggcatggccatggacgtgccaggcctagactcgacattcggatctgacgtagggaatggacctctgcaattaggaccagatggctcgtcgagagactccattagatccttggggcagctctggaacttcagcctctctgatctaacggcggatttgacgagtttgggagcagatttggacgtgctggagaactacaccggcacccctttcctgccttcggactcggacattctgctcgactccccggaccaagatgacatagtcgaatattttgctgacgccatcaacgggtctcagtcagacgaggagaggtcatagcgaagctagctcaaggtttttcaggcagggcgcagggatgtgtcttctcatggcctgctgcgagagatgctgcggctaatgtaatgtaactgtgccttgggcccgcgcccctgtgtgctgcggcaagtgtagctggtttaattagactttttttttaatttgtagctggttaattagaatcctaattctttggaataaaaaagtagtagctggagttatcggtaagaatcgctggatgtaatgcaaagctcgctctcacagtcacagctgggtgaccacaggaggacctcctttttgtttgttgtatatttgc

SEQ ID NO: 75791 - DNA, 1578 bp, Zea Mays
cccgtgctcgcgcgcgcgcgcgctctctctctctctctctctcccctccctgtctccctccccctctcggagtctcggtcgtggcgacgacgactgggcaggccgacgagcacccaccaggaaaagtattgctcctagcctcctacagctagttctttttatgattaagctccaatgaaggattctcagacttgttctacaggatattcagagcacaacagagttgcagtcatcagcacagggtactaatgaagtgcaaagtcagcaaccaaacccgatgaccactgatgctcctgcaggaaattcgggttccttgtctatagctagtaatgacagtaagaaggtgtctcgcgaagacattgaacttgttcagaatttaatagagcgttgtcttcagctatacatgaacaaaggagaagttgttagaactctttctactcgtgctagaatagaacctggcttcactactttagaaactcgaagaagagaactccgagttctttagggcttactatatccggttgaaattgaaacggcaaatcatcttgttcaatcatttattgcaacaccagtacaatttgatgaaatatccagcacctccaaatgttccattggctccaatacaaaatggaattcatcatatgccagttagcaatttaccaatggggtatccagtacttccgcagcctatcatgccggctcccggccagcctcacatggacccaatggcctgtggtctgtccaatggtcatgtggtcaatggaatacctgcaccaggtggttatcatccgatgcgcatgaactctggaaatgacatggttgtggacaacggagcgcccgaagcaccacatgctggtgctaccggcagcgtcatgtcatccgagatggccgtgagcccctcatcagcggcttcaagcaaccatgctccatttatgccgccggagatcccaggcatggccatggacgtgccaggcctagactcgacattcggatctgacgtagggaatggacctctgcaattaggaccagatggctcgtcgagagactccattagatccttggggcagctctggaacttcagcctctctgatctaacggcggatttgacgagtttgggagatttggacgtgctggagaactacaccggcacccctttcctgccttcggactcggacattctgctcgactccccggaccaagatgacatagtcgaatattttgctgacgccatcaacgggtctcagtcagacgaggagaggtcatagcgaagctagctcaaggtttttcaggcagggcgcagggatgtgtcttctcatggcctgctgcgagagatgctgcggctaatgtaatgtaactgtgccttgggcccgcgcccctgtgtgctgcggcaagtgtagctggtttaattagactttttttttaatttgtagctggttaattagaatcctaattctttggaataaaaaagtagtagctggagttatcggtaagaatcgctggatgtaatgcaaagctcgctctcacagtcacagctgggtgaccacaggaggacctcctttttgtttgttgtatatttgc

SEQ ID NO: 75792 - DNA, 1550 bp, Zea Mays
ccttaaccacctgctttatcttcccccgttcaccccgtgctcgcgcgcgcgcgcgctctctctctctctctctctcccctccctgtctccctccccctctcggagtctcggtcgtggcgacgacgactgggcaggccgacgagcacccaccaggaaaagtattgctcctagcctcctacagctagttctttttatgattaagctccaatgaaggattctcaggatattcagagcacaacagagttgcagtcatcagcacagggtactaatgaagtgcaaagtcagcaaccaaacccgatgaccactgatgctcctgcaggaaattcgggttccttgtctatagctagtaatgacagtaagaaggttcagaatttaatagagcgttgtcttcagctatacatgaacaaaggagaagttgttagaactctttctactcgtgctagaatagaacctggcttcactactttagtatggcagaaactcgaagaagagaactccgagttctttagggcttactatatccggttgaaattgaaacggcaaatcatcttgttcaatcatttattgcaacaccagtacaatttgatgaaatatccagcacctccaaatgttccattggctccaatacaaaatggaattcatcatatgccagttagcaatttaccaatggggtatccagtacttccgcagcctatcatgccggctcccggccagcctcacatggacccaatggcctgtggtctgtccaatggtcatgtggtcaatggaatacctgcaccaggtggttatcatccgatgcgcatgaactctggaaatgacatggttgtggacaacggagcgcccgaagcaccacatgctggtgctaccggcagcgtcatgtcatccgagatggccgtgagcccctcatcagcggcttcaagcaaccatgctccatttatgccgccggagatcccaggcatggccatggacgtgccaggcctagactcgacattcggatctgacgtagggaatggacctctgcaattaggaccagatggctcgtcgagagactccattagatccttggggcagctctggaacttcagcctctctgatctaacggcggatttgacgagtttgggagcagatttggacgtgctggagaactacaccggcacccctttcctgccttcggactcggacattctgctcgactccccggaccaagatgacatagtcagacgaggagaggtcatagcgaagctagctcaaggtttttcaggcagggcgcagggatgtgtcttctcatggcctgctgcgagagatgctgcggctaatgtaatgtaactgtgccttgggcccgcgcccctgtgtgctgcggcaagtgtagctggtttaattagactttttttttaatttgtagctggttaattagaatcctaattctttggaataaaaaagtagtagctggagttatcggtaagaatcgctggatgtaatgcaaagctcgctctcacagtcacagctgggtgaccacaggaggacctcctttttgtttgttgtatatttgc

SEQ ID NO: 75793 - DNA, 3245 bp, Zea Mays
caaaggacgatccatatctttgggaacgggagcgaaaagctatcgatccggtttactattttaaactttactctatgaactacactgtaaaagtgttttgattactaattaataggggttttatttcactcgatccaaagacgacactactaactttgcaaacaggcacaaatgcgatgcgtcatctacgcgcagatcgagcacctggaatcctgtgaatacacagcagcacagctgcatgcagagtctacaactacctgaggatctgtcgccaccgaacgcagcgggttcagtcgtaggcggcgctgaagaaggccttgacgacgttggcggagaggatctggaggacgccggagttgttggcccggccgacgcagcgcggcgacttgaactggctgacgggggcgccgagggagaggtagtggcggagcaccttctggaaggtgccgcgctgcagcacccgcagctcgagcgggccgatgccgcgcgccctccgcgacccgacgtagcccgggtccgcgaaggcgcggtccagctcgtcgcagcagctctgcagcacgtcgtcgccggcgtcggcgttcagctcccagaacaccacgtagtggcccgggtcgcgcgacacctccgcgtggctgctgtagtccaccacctccagcttctccgccgccaggaccttggccgcgctgtccacggccagctgcaggtcctgctcgctgctcttgtcgatgttgatgctcagcaacaggttccgccggcacacgaacttgagcttcggcgtcgagttgtagaacccggccacctgcaccacgtcccctagacggtaccggtacagccctgcgccaccccaaaaaaaaacaaaaaaccctcgttcagcttggaagcaaatcttatccgttcatctgacaagcagatcataggacagacacatcatgttctcagtttcttctctctaggccttttctctcatgcatgacgtgcgtgcccacacccatgactccatgatccatccatggagtcacagtcgtttacgcagtggaagcaaagtctccaggctgcaaagtctgcgaactcaggccatgggggaaaaaatcatacaaaatcctcacagccacagaggagaaccaagaaagcgaaaggttctcgctcgtctagtagctgctttactacattggaagactagtaaagaggtgaagagaacgactgaaaattcagctgctgctgctgctgcttcgttcgttcaacgaagcaggcagccagtgtttgacggacacggcgcgcggcaagtagccgttgcactcagttgtgtgaatgcacgccacctgctgctggccaggttcagttagactacggcatagctaggttcccaggctgcagaagggccaagagcaatggacggccggcaagccgacaaaaccaccatggaagcagatctttcgtcccggcatattattcgcggtcgatccaccagttccacacctaatccatatcagagatggcaatgatcccgatctccggttcctcctcgtgggaaattcttttattaggtcccgttcgttttaatcaaatccatagaaattgagagggattgaatcccccttaattcccatggattaggatgaaacgaataaattctctctcaacgagtaaacagggacgtagatggggaagcattcatcgtcccaataatcctcgttgagacccgttaattatatatgtgacaatattttcagatactagataattatattgcaaagaaatcacttgtttgtacaaatatgtttatctgacaatgtgtataagtgacaatattttgcattaataaacaaagaaaatacgtcctaattataatttaagcgatgacggagattccgacggggatttaccaccacatggaacggagattgagaagaaatatctccgcaagtgttcgtcgggatacctcctcgcggaaacggagagctaaaacccgacggagaattatccgttcccacccctaatccttatttactgggagctagtaatgtcgtagatgctactactactagtactctacaagatgctactactattatcaaattattaattctctttcagactaataaataaacttgctgaataagtcgtctctgtgcagctgcatcatcgtcgctcgtctcacttgtcattgagccaagtgtaatattcaggcagtgggcagtggtgcaggttccaggaaaaaagagtatactactactaactaggtgcattgcattgcatactttcaggcgtaacaagttactgtcttgtgacgctgtgacagacagtaacgctgcagccgacgatggatggatggatggatgggtgtgcaaaggtggaaaaaatatgtatccatgtatatcgtagaagatttgcaaagcacctgatcaaatgcgtagaaaagagacaacactttctggatcagaatcctttaaattaaagaagagcttttcggattagtttgtgcgatcctgtttcttgctagctgtggctggtttttttggttcatagcctaccgactccgacacacgctatgttaccgaatccagatctccccaagatcgtctataaatatatacatctcctggctgttcttgggcgacgacctaacctaccagacgcacgcacgcacacaacagaacagctaacgtcggtttcagaccttcctgacatgcagtttctttcttggccatctgctttctctgaaagggagatctccccccgtgcgcgcccgccccctcttttgttcgagaccggccgggagcgacgtacgtgatcgctaaagcccaaagggttccgctgaacggcgaccgccgaccggaccgctgccgccgccaccgccgccgccggagtcaatcccccggcctcctcctcctccttcggcggtccccgtcagaggtgcggtggcgcaagtcaacaaagaggaaagcgcgaggcgaaaccgggtcgggggcagctaatccgtctccgcactgtgcccaccggttaggattagtagtactagtacgtccactgtccacggacacaaggcgaagtttggtctcgatctggagggagcggttaggtggctgctggcatgaaagtaacaggcttctaggacaacaacaactcgtaccatccgaacctaaatccgatggacgcatctacggtttctttgaaaccaaccgcggtggtttacgatcgatcggtgagaatttttgactgttacctgcgaaagtggtgacgacaac

SEQ ID NO: 75794 - DNA, 235 bp, Zea Mays
ctctcaacctgttactatgattatcttaccaatgttgcaatggcatgaccagctagtgatcccgcaatgacacccagaggggatgaagctgctgctagtgcaattgtggagaaaaatgatttatcaccccattcagcaacaaaaaccaatacgaatgtgctagcaatagtaccagcagcagacatgacccccgcaccatttccagaaaatttcgatactgctaactcagcctcct

SEQ ID NO: 75795 - DNA, 278 bp, Zea Mays
ggcatgaccagctagtgatcccgcaatgacacccagaggggatgaagctgctgctagtgctgccaaggtattggaaaatagtgtcaatgttgattgtgctcatggaaatctgaccatttataaagaagagttcggagatgtaccaattgtggagaaaaatgatttatcaccccattcagcaacaaaaaccaatacgaatgtgctagcaatagtaccagcagcagacatgacccccgcaccatttccagaaaatttcgatactgctaactcagcctcct

SEQ ID NO: 75796 - DNA, 484 bp, Zea Mays
ccaccctgtctcacttcttcgcttgggtctccactcagttcagccgcaccatccggagcatccagtgtgacaacgtgcgtgagttctacaacaatgtgtcccgtgacttcttcctctctcgtggcatccacctccgcatgtcctgcccctacacgtcacctcagaacggtcgtgctgagcggatgattcgcacgacgaacgatgtagtgcgccctctccttttccaggcttcccttcccgtttcttactgggctgaggccctcggcactgccacctatctcctcaaccgtctccccaccaaggcggttgcccaccccaccccttacttcgctctcttcggcgtccatccctcctacgaccatcttcgagtcttcgggtgcgcttgctaccccaatctcgcttctactactcctcataagctcgcccctcgctccactcgttgtgtcttcctcggctactctcccgatcataaggggtatcggtg

SEQ ID NO: 75797 - DNA, 3698 bp, Zea Mays
ctcccctcttgtttcttctcacactgttaagttacacatcttataatgcttacttgaccctatttaatggccttgtccagtgccttgccgtctacatattatataaaccctttctcggtcgctcctccttgcaaccatcgaaaatccatcgccttcttcgcaagatccagggagaaaactaaacactgcgcgccatgagagagcgtccttcagtccactcaggggcggtgctagggtcggattagctgccgactcattcacccacatgccaagcaaacggccatggaaacgagcttcgcagatgagtgaatgaagcgggaggtaaaagcttcgatctcgcaccgtctttgcttggactgaagggtgctccctccgatcctttccttgtttactttacccatgcagcttcatcattcgtatctcaagtcaaggttttacttcatatgatctgtattttattttccaacctgctgtctcgaactcttgatctgtctttgcttgagctgcttattaattattatcttgcatatatattaggcatctgatgcatacatccatagcagctgccaggctattttaattttaccatgtgcgtgcttactgttcttctgtggttgttatatagctgttgtatatatataatggagatccgatgcttttttgtacttttcttgcccttttgatatgtacacatactagctatatatataatccttgatctgctccctgaatctatatactgttcgatctcttccaaaaagttatcccagtttctgaagaaaagaaaaggaagaaattgatttgctttgcatgtgtgtagatcttacaggacaggaccggatccgatccatgcaggtttctgctgtctttctgtgatctgtggaagaagatggtgtgcactgtacgttctagactagctagctaggactatatataaacgagaatctgtggaatcataaaaacacactttcgttcgatcgattcgtcgtgtcgtgcaacagcgaaacgtctttcgatctccctgtttatttgctttggaactttgcatgcaactagctattgattcgacgtgtgctagcatagcagctgtgtcgtctgtgtgatgctcctccacctttcttttatttggagcatattatgaccaccactacttggaccgaatcatcaggtttccaattcttttgccctattcccatgagcgtgtcttttccgcatgttcaccgcagcatttggtttgtgaaagtatgcgaacctacatgccggggccggccttggttttcctgtgatttgaaaagaggagtcttttcttgttcattagcacgcaacgcaagtgactgtttttttcacccaatgcaagctgcaagatacgaagagaaattaattagaacgatccaaggtattttgtgaatactgctgcgagtctgtatgcttcctgtctgcagtaattaagcgtttaactgctagtgattgacctagctaactgtttcagaacaataaacttgttcatatttggtatatctgcatgcgtgaatctcttgaagatgtgccagataccaatctctaaaaactgagtaacaagaatgtctagtcaaagagggttctacctgtgctactgctggtatcatatgtgtttatatttctttcataaatataacgttcgatatatacgcactcaataaaactgtttgaaatggtatattttttatttattaattcgtaattatcattacaatttcaagatttgggttattgctacttacttctaagtgtcactagataaattatgctcgagtgttaacccataattaaggtttgatgttctcaattaattcttccgcgaggagcatactatatactactaactgatgctgttttggatttaaataatagagatacaatgccctcaagaaccctcaaattgataagtaactatatgggatcgatccatcacatgtgttgcagaacaagttactgggagtatctgataacaggcatgtgcacttgattgagttgaacaagttattcaagagcttgttacctgcgttccactagatagagcttatggccatcaaaagacacttttcccccttctacacgttatattctgtgacataataagtaataaatgaacagcaaaactgtgaataggaacattttttttgttcttcgttcacgccacacatttgcatcaacaaaatgtatttttgcatcgattacaaacatagaactaaagagtggaggaaatatattttattcccccttatattttagtaatataaagattaacatagactaaaatgaagggactaccaaacaacccctaaaccttatcctcttcaccgtcttgagatgaagcacagtactgtacagtaccaaatagctcctgaccagaagactctacacaactacaccagatccgccgaggaagaggaagagagagagagggggctagcgtttgtcagggtgtgaaaccctaaccctaaagtcgccaaaggcagtatagcagagacagcgagaggctagcagtggcagtggacggaggggaggcggattggaactcacagagctagctgctgcgcgcatgtggaggcctgcaccaattcccacctcgtgtctgcaaccttgaactccttaacaatcttaaaacacctttaaacctcattggatgcactaaaaaactggcttcagatgtgggtgcctccaaattccaaggggcatgggctccctttccaaatgaaccagcgctggagtagtacctttctttattaccagggttttgtactttggtcattgggtctttcaagtgcatctcatcttgttttaccgaggaggagagagagagagagtaatggtgtctgaacaataatggatttggatggttttattttgcagtgtttgtggctgagtggcttattgtttttctcttaagagtgtgtccgacagtgtcttaaattagtgccctattttaaaatatatagctcaatacataaaaaaatatagttccaacagtttcctattatacaattttttttcaaaaaaaatataggtcacaacataaagtgacttaaatatactatactccaaactagtgtgctatccttgttttctaaaaaaacattttctttagaatatatgatttcaggtttaactgttgggacacgatatgtttttagttttctaaacactttaaatgatgtagtattttaattattggggtactattttaagtcaccttgttggaaatatgataagaaaattaaaaagtatttctcatgattttgtaccttagacttatttaccgaaaggctatggcttctctggcccaattggtagcatgaggctatgccaaaaaaatgctaatcatgggtcatgatctatgaatactataaccacgagaacatatcctgttccaatgctcctatacccccgttcaaaaaattcaataaaagagtgcttgaaagatttcacaaaaaaatacgaatggatagatgatgatgaaaacatatatcttcatgcaaatttctacaatgagagataaaataaaattataatgcaattgacgtggattacaaatcgaggtaaagagtgcaccgggcacaattatatcaccatggtttctctgttttgttctcgtggtagaagttttcattcatcctcagtttttgcatgaaagttattagccatgcacgaaactaaat

SEQ ID NO: 75798 - DNA, 3226 bp, Zea Mays
cccctttgactggccctgtgtctcctctcccctcttgtttcttctcacactgttaagttacacatcttataatgcttacttgaccctatttaatggccttgtccagtgccttgccgtctacatattatataaaccctttctcggtcgctcctccttgcaaccatcgaaaatccatcgccttcttcgcaagatccagggagaaaactaaacactgcgcgccatgaggtggtcagacagatcaagcactagctagcgcagctgcgcatcatatcttacaggacaggaccggatccgatccatgcaggtttctgctgtctttctgtgatctgtggaagaagatggtgtgcactgtacgttctagactagctagctaggactatatataaacgagaatctgtggaatcataaaaacacactttcgttcgatcgattcgtcgtgtcgtgcaacagcgaaacgtctttcgatctccctgtttatttgctttggaactttgcatgcaactagctattgattcgacgtgtgctagcatagcagctgtgtcgtctgtgtgatgctcctccacctttcttttatttggagcatattatgaccaccactacttggaccgaatcatcaggtttccaattcttttgccctattcccatgaggtttgtgatttatcatggtgttagctactagtagtgtttatgattttgtgatccacttgtgttttgcgtcttggaccagcgtgtcttttccgcatgttcaccgcagcatttggtttgtgaaagtatgcgaacctacatgccggggccggccttggttttcctgtgatttgaaaagaggagtcttttcttgttcattagcacgcaacgcaagtgactgtttttttcacccaatgcaagctgcaagatacgaagagaaattaattagaacgatccaaggtattttgtgaatactgctgcgagtctgtatgcttcctgtctgcagtaattaagcgtttaactgctagtgattgacctagctaactgtttcagaacaataaacttgttcatatttggtatatctgcatgcgtgaatctcttgaagatgtgccagataccaatctctaaaaactgagtaacaagaatgtctagtcaaagagggttctacctgtgctactgctggtatcatatgtgtttatatttctttcataaatataacgttcgatatatacgcactcaataaaactgtttgaaatggtatattttttatttattaattcgtaattatcattacaatttcaagatttgggttattgctacttacttctaagtgtcactagataaattatgctcgagtgttaacccataattaaggtttgatgttctcaattaattcttccgcgaggagcatactatatactactaactgatgctgttttggatttaaataatagagatacaatgccctcaagaaccctcaaattgataagtaactatatgggatcgatccatcacatgtgttgcagaacaagttactgggagtatctgataacaggcatgtgcacttgattgagttgaacaagttattcaagagcttgttacctgcgttccactagatagagcttatggccatcaaaagacacttttcccccttctacacgttatattctgtgacataataagtaataaatgaacagcaaaactgtgaataggaacattttttttgttcttcgttcacgccacacatttgcatcaacaaaatgtatttttgcatcgattacaaacatagaactaaagagtggaggaaatatattttattcccccttatattttagtaatataaagattaacatagactaaaatgaagggactaccaaacaacccctaaaccttatcctcttcaccgtcttgagatgaagcacagtactgtacagtaccaaatagctcctgaccagaagactctacacaactacaccagatccgccgaggaagaggaagagagagagagggggctagcgtttgtcagggtgtgaaaccctaaccctaaagtcgccaaaggcagtatagcagagacagcgagaggctagcagtggcagtggacggaggggaggcggattggaactcacagagctagctgctgcgcgcatgtggaggcctgcaccaattcccacctcgtgtctgcaaccttgaactccttaacaatcttaaaacacctttaaacctcattggatgcactaaaaaactggcttcagatgtgggtgcctccaaattccaaggggcatgggctccctttccaaatgaaccagcgctggagtagtacctttctttattaccagggttttgtactttggtcattgggtctttcaagtgcatctcatcttgttttaccgaggaggagagagagagagagtaatggtgtctgaacaataatggatttggatggttttattttgcagtgtttgtggctgagtggcttattgtttttctcttaagagtgtgtccgacagtgtcttaaattagtgccctattttaaaatatatagctcaatacataaaaaaatatagttccaacagtttcctattatacaattttttttcaaaaaaaatataggtcacaacataaagtgacttaaatatactatactccaaactagtgtgctatccttgttttctaaaaaaacattttctttagaatatatgatttcaggtttaactgttgggacacgatatgtttttagttttctaaacactttaaatgatgtagtattttaattattggggtactattttaagtcaccttgttggaaatatgataagaaaattaaaaagtatttctcatgattttgtaccttagacttatttaccgaaaggctatggcttctctggcccaattggtagcatgaggctatgccaaaaaaatgctaatcatgggtcatgatctatgaatactataaccacgagaacatatcctgttccaatgctcctatacccccgttcaaaaaattcaataaaagagtgcttgaaagatttcacaaaaaaatacgaatggatagatgatgatgaaaacatatatcttcatgcaaatttctacaatgagagataaaataaaattataatgcaattgacgtggattacaaatcgaggtaaagagtgcaccgggcacaattatatcaccatggtttctctgttttgttctcgtggtagaagttttcattcatcctcagtttttgcatgaaagttattagccatgcacgaaactaaat

SEQ ID NO: 75799 - DNA, 2556 bp, Zea Mays
gggaattgaaggcgcagatcgctgaccgcgccgccgtcacttgccgagcacgcaccgcggtagtagccgacaccgccgcgcacaacgttccgttcgtctcccctcgaaccagtcctcccaccaaaaacgcactcccgaacccgactctcctcttgctcgctctcggtggcgtctccgcctccgcagtccgcactcgcgcacgcttcccttcccttcctcgcccacgcggacgcggccacggccgctccaagctagcagcagagcgagagcagccaattttggcgcacctctctcactctccctccctccgttcagcagcgttcgtttcgttgctcactcagatccagccattcaggtgagagagtaggggcagcgatgcccacgccgccgctccgtggggcggggctcctgctccgtatctgcctcttcctctgcctctcactccgcccccgcctggcctcctccgagcccgacgccgacggccccggccccggctggacgggggtcacctgcagcgcggacggcgcgcgcgtcgtggcgctgcacctcccggggctgggcctctcgggcgccgtgccgccgggcacgctcggccgcctcaccgcgctgcagctgctcagcctgcgctccaacgacctctccggcccgctccccgccgacctcctgcgcctgcccgcgctcgagggcctccacctccaccgcaacgccttctccggcgcgctccccgccgccctcgcggggctgaccgcgctccaggtgctcgacctctctttcaacgccttcgacggcgccgtccccggcgcgctcgccaacctcacccgcctcgtcgcgctcgacctctccaacaactcgctttccggccgcgtcccggacctcggcctccccgcgctccgtttcctcaacctctccaacaaccgcctcgacgggaccgtgccggcgtccctcctccgcttccccgacgccgccttcgccggcaacagcctcacgcgcccggctccggctcaggcgccgccggttgttgtcgctccgcctcctggcctcgctgcgcctccccccgcgaggcggcggcccaggctcagcgaggcggccatcctcgccattgccgtgggagggtgcgtcctcgggttcgccgtcgcggcgctgctgctcctcgcattctgcaacagcagcagggagggccgcgatgaagagacagtaggcggcggcgcggctgcagggaagggcggggagaagaaggggagggaatcgcccgagtccaaggcggtcatcggcaaggccggggacggcaaccggatggtcttctttgaggccccgtcgctggcgttcgacctggaggacctgctccgcgcctccgccgaggtcctgggcaagggcgcgttcgggacggcgtaccgggccgtgctggaggacgccaccacggtcgtcgtcaagaggctcaaggaggtgaacgccgggcggcgcgacttcgagcagcagatggagctgctcgggcggatccgccacgacaacgtcgtcgagctccgcgcctactactactccaaggacgagaagctgctcgtgtacgattactacagccggggaagcgtgtccaacatgctccatgggaagaggggagaggacagaacaccattggactgggaaaccaggctaaagatcgccctgggagcagcacgaggagtggcacacatccacaccgagaacaacgggaggttcgttcacggcaacatcaaggcctccaacgtgttcatcaacaagcacgagcgcggctgcgtctcggaccacggcctggcgtcgctgatgaacccggtgacggtgaggtcccgttctctcgggtactgcgcgccggaggtcgctgacacgaggaaggcgtcccagtcctcggacgtctacagcttcggcgtcttcgtgctggagctcctcacggggaagtcgcccgtccagataaccggcggcaacggcggcgacgtggtccacctggtgagatgggtgcagtcggtggtgcgggaggagtggaccgccgaggtgttcgacggcgagctgctgcggtaccccaacatcgaggaggagatggtagagatgctccaggtcgcgatggcgtgcgtgtcgaggtcccccgagcggcgtcccaggatggcggacgtggtgaggaccatcgaggaggtgcgtcggagcggcagcgggaccgcgaccgggacggggacgcggccgtccaccgaggcctccaccccggccaccgccgctgaagcggcccagagcagggcggaggagggcggctcgtcggcggtggcgcagtgaccggacgcgacgcaggccgagctgcttgctggtggctcgtagcttggatgatcctgtgctttattttggcgggtgctgtaccattcgttctttcgtgttacgaaatcgtaacagaatgtcacgtggacgtggacacggtggtcggatttttggcagcaactgctcgctgctgactattgattgactctttgtacaagtgtgaaggaagaaaggcagctgtctcatctgttgatcaaggatatgcttgagtacaagaaacat

SEQ ID NO: 75800 - DNA, 2449 bp, Zea Mays
gttctacttctccgtatagatccttagctcgttgcaactttcctttcctatcgtcatgtactcatatcataattgaatccaattatccagtgtttggttgagagatgttgctaacatttggtatcagactactcgcatcctggaagattgcacgcatggaggcggcaatgcagcagattctcgacgcgatggcgtacatggagctccgcttgacagatgcgctggttggccgtggtggcgacagggtggaggacacggtctcagggctgcaatcctccaactccgccacctcctccgtcgccacgccgatgtacgacgacgtgttcgactcttcggtggccccgatgtacccaggcgatctgcacgccaccgccatcctcgacgtgctgtcccgcgtgcacacgctggacaagtgcatgacctcgcaggacaagctcgtcatcgacctcgatccagacgacatggagacaccattatcggagtcggcccttcccgtcgttcccagtgccaatgaaatggagacgcccaccacctgttcgactccggtcctcaccgagcacgcgccggccgaggccgcacacaactgcacactgcgggtgccccgtggagagccgcttccgcgcctgcttcacgcgttcctagcgcacgattggctcgaccactccgccgacacagacgactccgtgctaacatccatgtctgggtgcaccaagctcgtcgagctgcaaccgaggggcgtcaacctcagaggctgcattccggatgctctgttcgatgtcgagcttgagacgctcaacgtgccgtcgcacgcgctctcgggcatacttcccttgggctccaccaagctggcggagatgctacaatcgctcgacctctccgtccaccagctcacctatggcatcctcaccgagatgtcgctcttcttcaagctgcgtgtggatctgtattgcgccatacctgtcgacctctgcgagtctgttacccaaggggttgttccagcaggagaagacgaggatgaccccaagcaactctggcaccacctgcacgctcgctggccaagcgaccaacagaaacagcacctgcgctcacagacacaacacacacagaggcatcacagagcaacgacagccgaagaaagaaccaactatctctctggcctcattccaaagctcgtcaagcccaattcggtagccatggtgactattgcaagcaagcctacatcagattcaattgctgctcaagtggtgttcgatgaaatgcagcaagggtttcgaacatggatccaacgacaaccagatacatggtgccagagttgttgcccttcttcattgattgatgctctgcttggtgggtgttctagcgttggtgctcattgtgtgtgttacctgcttaaggtatatgctcttgctactaaacttcctgattggattgggcgcacacagtcacaaaaactaagaagctacagaggcaatatccctgggttaagaccaattccatggccatccttcattttactaagcagagagaataagcttaccaagtcatcagtcatggtcactgctagtgcgattcaggcttttgtgaatctggtcctcacttcttgtgatgctggttattccattgtcatgtttacaccaaattatttcatcacctacatgtcgttccagatgacaggtgctaccgacatattagttggtggttgcgattccaggacacttcattatgatgttgattggttggagaaggttctgaaagataaggagcatgtccctaaacttgttactgttttgaattcgaggaacccctctagagcttttattcccaggcctatgcttgagagaatttcagatctgtgcaaaagtgtaggacaacataccggtcaactaagcttgcatgggcagtattaccttatcattattacaacagtctgttggttggtgtggagttcctgaaacacatgatacttggattgatgtacaacaaagagctctatggccaccacggatccaccagtcattgtctacactatcagcggcttgggggcaagccgcatttcaagcggtggggaatgtcagtacactgccatgtggtgtcatgtgggcccttggaaggtggcatggggtattctctgctataaaatggagaagctgcgcaggcgataggcatcaatgaaatattcagaagacatccattccatattgtgcttctacctcttcagtctcttcctcctatcttctagagttctacttctccgtatagatccttagctcgttgcaactttcctttcctatcgtcatgtactcagatcataattgaatccaattatccagtgtttggttgagaggtgttgctaacaattttcgttgactgcgaggtagctttagcgactttgactatcgtatctcgagaatttacaagcccagccatgtatgtatggtatgagcagcca

SEQ ID NO: 75801 - DNA, 2973 bp, Zea Mays
tgtgcttctacctcttcagtctcttcctcctatcttctagagttctacttctccactactcgcatcctggaagattgcacgcatggaggcggcaatgcagcagattctcgacgcgatggcgtacatggagctccgcttgacagatgcgctggttggccgtggtggcgacagggtggaggacacggtctcagggctgcaatcctccaactccgccacctcctccgtcgccacgccgatgtacgacgacgtgttcgactcttcggtggccccgatgtacccaggcgatgtgttcggctcttcggcggcctcacccccaggcttcgatggcgagcctactttcgacgaggagcacaacaactccatcaccgagtacgtcgacgtctcgtgccacgaccatctcttcctcctcgacaccacctgggactcctcgcagcagcacaacgccagcatcccaggacggcgccaacatcccggttgcagcgcgcggctgcagcgccgaccgctccagcacctgaccgtcgaccccgtcagcgccgtggacaccatgcctctcgatttcaatctcactctcgacgagttcaaccagcggttcgacgcgtccgctagcgtgccgcctagcccggtcgcagtcatcgccgacaattggggcgggtgcttcgacagcgagcagtaccacacgagaccatccgtcgtcgctgatagttggggcggattcttcggtggcgaggacctcgcttcgtcaggcaacgccacgagattcgtcctccccatcgcctccaccgacgagcccagcatcgacatcgcgctagcccgtgccaactccgaagtcacagatgactccgtgttcgtgaccaccgaacctgccggctacgacgactccgagctgcacgccaccgccatcctcgacgtgctgtcccgcgtgcacacgctggacaagtgcatgacctcgcaggacaagctcgtcatcgacctcgatccagacgacatggagacaccattatcggagtcggcccttcccgtcgttcccagtgccaatgaaatggagacgcccaccacctgttcgactccggtcctcaccgagcacgcgccggccgaggccgcacacaactgcacactgcgggtgccccgtggagagccgcttccgcgcctgcttcacgcgttcctagcgcacgattggctcgaccactccgccgacacagacgactccgtgctaacatccatgtctgggtgcaccaagctcgtcgagctgcaaccgaggggcgtcaacctcagaggctgcattccggatgctctgttcgatgtcgagcttgagacgctcaacgtgccgtcgcacgcgctctcgggcatacttcccttgggctccaccaagctggcggagatgctacaatcgctcgacctctccgtccaccagctcacctatggcatcctcaccgagatgtcgctcttcttcaagctgcgtgtggatctgtattgcgccatacctgtcgacctctgcgagtctgttacccaaggggttgttccagcaggagaagacgaggatgaccccaagcaactctggcaccacctgcacgctcgctggccaagcgaccaacagaaacagcacctgcgctcacagacacaacacacacagaggcatcacagagcaacgacagccgaagaaagaaccaactatctctctggcctcattccaaagctcgtcaagcccaattcggtagccatggtgactattgcaagcaagcctacatcagattcaattgctgctcaagtggtgttcgatgaaatgcagcaagggtttcgaacatggatccaacgacaaccagatacatggtgccagagttgttgcccttcttcattgattgatgctctgcttggtgggtgttctagcgttggtgctcattgtgtgtgttacctgcttaaggtatatgctcttgctactaaacttcctgattggattgggcgcacacagtcacaaaaactaagaagctacagaggcaatatccctgggttaagaccaattccatggccatccttcattttactaagcagagagaataagcttaccaagtcatcagtcatggtcactgctagtgcgattcaggcttttgtgaatctggtcctcacttcttgtgatgctggttattccattgtcatgtttacaccaaattatttcatcacctacatgtcgttccagatgacaggtgctaccgacatattagttggtggttgcgattccaggacacttcattatgatgttgattggttggagaaggttctgaaagataaggagcatgtccctaaacttgttactgttttgaattcgaggaacccctctagagcttttattcccaggcctatgcttgagagaatttcagatctgtgcaaaagtgtaggacaacataccggtcaactaagcttgcatgggcagtattaccttatcattattacaacagtctgttggttggtgtggagttcctgaaacacatgatacttggattgatgtacaacaaagagctctatggccaccacggatccaccagtcattgtctacactatcagcggcttgggggcaagccgcatttcaagcggtggggaatgtcagtacactgccatgtggtgtcatgtgggcccttggaaggtggcatggggtattctctgctataaaatggagaagctgcgcaggcgataggcatcaatgaaatattcagaagacatccattccatattgtgcttctacctcttcagtctcttcctcctatcttctagagttctacttctccgtatagatccttagctcgttgcaactttcctttcctatcgtcatgtactcagatcataattgaatccaattatccagtgtttggttgagaggtgttgctaacaattttcgttgactgcgaggtagctttagcgactttgactatcgtatctcgagaatttacaagcccagccatgtatgtatggtatgagcagcca

SEQ ID NO: 75802 - DNA, 1455 bp, Zea Mays
attactgcacgtcccctcgatcactgggcgtgactgcgtgggcgggcagacaggagtggccgcggtgcaaaaaaaaaggagaggagaaagaacgacgccacagaggccacgcggcctttgccgccacgaaaaaaaaagccggctcacgtgtcggtccctgacacgtggggccgccacgcacgcagcggatgcggcggggctggagcgacacgtcggccgccgccgccgcctctaggatgtccccgtcgctttctggtgggaccggcggggatacggcccggtgccattggatacccggctctgctatcacctacaggtgggtcctgcggcctctgtgggggtggggaaagcaaacggtctgtttcttcgttcgtttggtgcctggctgcctgcggttaaacgggcagcaaagaaaaagaaaatgatttcccgaaatgggctcggggaagggatgctataaaaagtggagttgtcagccaacaacggcggcagcgagcgcacgaaagttggttcggaggtttcttgaggggtttagcttggcggcaagtcaaatgcgagcggagtgatgtggcccatggaggaagaggaggtgttcgtgacggtgaggcggacggagcacgtcgacgtcacctcccgggcggtggtcgtggctgcggggcgcgccgccgtcgcggggcccaggacggtgcgggtcttctgcgacgactacgacgcgaccgactcgtccggcgacgaagcggaggaggaggaggaaaagaaggccgcgcgcaggagggtgaagcgctacgtgcaggagatccacctggagcgggcggcaaaggaggaggaggaggcgacggccgcggcgtctctgggggcggtgctcccggggccgaagcggaagcggaagcccgacggtgaggcctcggagccccggttccgcggcgtgcggcggcggccgtggggcaagtacgcggcggagatccgcgacccgtggcgccgggtgcgggtgtggctcggcaccttcgacaccgccgaggaggccgccaaggtgtacgactcggccgccgtccagctccgcggccgcgacgccaccaccaacttccagcagcaggtggacgaattattccaagacatcaccgacctgttccagatcgacccgctgcccgtcgcctagactctctctgcgcaccgggttcgcctagtccggccaattttggttccgccgtcttgtttttatttgggaaaagctgtattgttttagcgtatgaagaagggaagaagagacaaagaagaagtgtccggcggcgaatccccctccccgccaaggaggaagaagtgagtttttggcacgacccgagcgatgggtggttggtggtgcgcgctcttttccctcagcgttgctgggccgtggaaactgtggcgccggagaacaggattccccggccggcgagccgaagacagagacaggagaag

SEQ ID NO: 75803 - DNA, 2345 bp, Zea Mays
ctcacttccactttaacttaccctattacctttctgctcgtggtgagtgctgacaccacctcacgcacacaagccgccggcggcgaccagaccgaccacctcgcgcactagccttgctcgcttctcgtcgccggctcgttgccggctcgtcggcacgatgtcgtcggagcctccacccgccccttctgccgccgcagcagagggactggctgctgacctttccgccgccaccctcagcaagaagcagcagaagaaggacgccaggaaggcggagaaggctgagaaggcggcgcagcgccagcaacagcagcagccggccgacgccgaggacccatttgcggccaactacggctatccgcccggtcagcaagaagatggctttcgtcgtgctgcgccagagcatgagcaccgtgcagtgcgtgctcgttgccagcgccgacgccggcgtcagcacgcaaatggtgcgcttcgccaccgccttaagcaaggagtccatcgtcgacgttgagggcgtcgtgtccctccccaaggagcccctcaaggccaccacgcagcaagttgagattcaagtcaggaagatctattgcatcaatagggctatcccaacccttccaattaaccttgaagatgcagctcggagtgaggcagattttgagaaggctgaactggctggagaaaagcttgttcgtgttggtcaagatacccgcttgaactacagagctattgatctacgaacaccctcgaatcaagccatattccggatccagtgtcaagttgaaaacaaattcagagaatttctgttgtcaaaggactttgttgggatccacacgccaaaattgatttctggatccagtgaaggtggtgcagctgtattcaagcttctgtacaatggtcaacctgcttgcttggcacaatctcctcagttgcacaagcagatggctctatgtggtggttttgaacgagtatttgaggttggccctgtgtttagagcagaaaattcaaacacacacaggcatctctgtgagtttgttggtcttgatgctgaaatggagattaaggagcattattttgaggtctgtgacattatagatggcttatttgtatcaatatttaaacacttgactgaaaactgcaataaagaactcgagacgataaacaggcagtatccatttgaacctctgaagtatctagacaaaacattgaagctcacttatgaagaaggagttcaaatgttgaaggaagccggaacagaaattgagcctatgggtgacctcaatactgaagctgagaaaaaacttggtcggcttgtcagggaaaagtatgacacagattttttcattatgtatcgatatcctttggctgtgcgtcccttctacactatgccttgttatgacaacccagcttacagcaattcttttgatgtctttattcgaggcgaggagataatatctggagcgcaaaggatacacactcctgagctgttgaccaagcgtgcaacagagtgtggaatcgatgtcagcactatctcgacctacattgaagtcttcagctatggcgcgcctccgcatggtggtttcggggtgggtttggagagggtggtgatgctgttctgcgccctaaacaacatcaggaagacctcgatgttccctcgcgacccgcagaggcttgtgccgtaatttactgagtccaatgccctgagtttgcagcagagcgtactggttgttttgatgttctttgagcatcgaacatcgctaacttgcaatctcagctactgaagccccggttaccgtggttcagagttcctgttaaattcacaaagctacttgtatctattagattgctgaaaccagcaagtacgatcctttttgggatttgatctggtctaattgttgttaagtggaggtattgctctcagtttttttgtgctctgtttgtcggcatatgccaagagctagggcttcttaagttctaagtttttagacgagtggattccttttttttaagagccggcaaaagttctgccctgcacctgttaaaaatagatattaccctgttccaattctaaataatatgacgtgtcgccttctagatatttatattatgtagatgtacaatatgtctagatacagatagtaaagtaatgtatgtctttataaagagagaagaattgtgctgcgaatgaatttgtcgtctgtcaaatgccttgattccaggttggcagcatgccttctgttttgaaatgataagcgcatgttttgaaatgagaagaattgtgctgagatacttcaggtacgtctaacttgacgccaatataatgtggtcatgctcgtgcacgcatgtgtttt

SEQ ID NO: 75804 - DNA, 2329 bp, Zea Mays
ctcacttccactttaacttaccctattacctttctgctcgtggtgagtgctgacaccacctcacgcacacaagccgccggcggcgaccagaccgaccacctcgcgcactagccttgctcgcttctcgtcgccggctcgttgccggctcgtcggcacgatgtcgtcggagcctccacccgccccttctgccgccgcagcagagggactggctgctgacctttccgccgccaccctcagcaagaagcagcagaagaaggacgccaggaaggcggagaaggctgagaaggcggcgcagcgccagcaacagcagcagccggccgacgccgaggacccatttgcggccaactacggctatccgcccggtcagcaagaagatggctttcgtcgtgctgcgccagagcatgagcaccgtgcagtgcgtgctcgttgccagcgccgacgccggcgtcagcacgcaaatggtgcgcttcgccaccgccttaagcaaggagtccatcgtcgacgttgagggcgtcgtgtccctccccaaggagcccctcaaggccaccacgcagcaagttgagattcaagtcaggaagatctattgcatcaatagggctatcccaacccttccaattaaccttgaagatgcagctcggagtgaggcagattttgagaaggctgaactggctggagaaaagcttgttcgtgttggtcaagatacccgcttgaactacagagctattgatctacgaacaccctcgaatcaagccatattccggatccagtgtcaagttgaaaacaaattcagagaatttctgttgtcaaaggactttgttgggatccacacgccaaaattgatttctggatccagtgaaggtggtgcagctgtattcaagcttctgtacaatggtcaacctgcttgcttggcacaatctcctcagttgcacaagcagatggctctatgtggtggttttgaacgagtatttgaggttggccctgtgtttagagcagaaaattcaaacacacacaggcatctctgtgagtttgttggtcttgatgctgaaatggagattaaggagcattattttgagatggcttatttgtatcaatatttaaacacttgactgaaaactgcaataaagaactcgagacgataaacaggcagtatccatttgaacctctgaagtatctagacaaaacattgaagctcacttatgaagaaggagttcaaatgttgaaggaagccggaacagaaattgagcctatgggtgacctcaatactgaagctgagaaaaaacttggtcggcttgtcagggaaaagtatgacacagattttttcattatgtatcgatatcctttggctgtgcgtcccttctacactatgccttgttatgacaacccagcttacagcaattcttttgatgtctttattcgaggcgaggagataatatctggagcgcaaaggatacacactcctgagctgttgaccaagcgtgcaacagagtgtggaatcgatgtcagcactatctcgacctacattgaagtcttcagctatggcgcgcctccgcatggtggtttcggggtgggtttggagagggtggtgatgctgttctgcgccctaaacaacatcaggaagacctcgatgttccctcgcgacccgcagaggcttgtgccgtaatttactgagtccaatgccctgagtttgcagcagagcgtactggttgttttgatgttctttgagcatcgaacatcgctaacttgcaatctcagctactgaagccccggttaccgtggttcagagttcctgttaaattcacaaagctacttgtatctattagattgctgaaaccagcaagtacgatcctttttgggatttgatctggtctaattgttgttaagtggaggtattgctctcagtttttttgtgctctgtttgtcggcatatgccaagagctagggcttcttaagttctaagtttttagacgagtggattccttttttttaagagccggcaaaagttctgccctgcacctgttaaaaatagatattaccctgttccaattctaaataatatgacgtgtcgccttctagatatttatattatgtagatgtacaatatgtctagatacagatagtaaagtaatgtatgtctttataaagagagaagaattgtgctgcgaatgaatttgtcgtctgtcaaatgccttgattccaggttggcagcatgccttctgttttgaaatgataagcgcatgttttgaaatgagaagaattgtgctgagatacttcaggtacgtctaacttgacgccaatataatgtggtcatgctcgtgcacgcatgtgtttt

SEQ ID NO: 75805 - DNA, 1307 bp, Zea Mays
cgaaattgtaaaaaggaaacataaggctgttgattcagccgtgagggtcctcaaggaaggtggaatggatgcgatcaagctggaagggggtgccccatcgaggatcactgcagccaaggctattgtggaggctggaatcgctgtcatggggcatgttggcctcacaccgcaagctattagtgttctcggtggatttaggcctcaagggaagacggttgacagtgctataaaggttgtggagacagcacttgccttgcaggaggctggatgcttctcggttgtgttggagtgtgtgcctgctccagtggcagcagctgcaacatcagcattgaaaatcccaaccattggcattggggctggaccattctgtagtggccaggttcgtttgttctttgctccgtaaaatgaggaggagaagtaagatcacttgctttgctcacagatactgagatacaagatgttgactctggtcatatccatccagtagtctacatgccatcaatcatcatacactctaaaaaacacatacatgcctttgtgggcctcgcttaaaatgaaataagcatgtcgtttatgacatgtgaagaactgaagatgcacaacatgtttgttcatgaagcctgatatgggcttattataatgcaggtcttggtgtaccatgacttgttagggatgctgcaacacccacatcatgccaaggtcacaccaaaattctgtaaacaatttggtaacgtgggcgatgtcatcaacaaggcgctatcagagtacaagcaagaagtggaggctcaggctttccctggtccaagccacacaccgtataagataactcccacagatgttgacggctttgcagatgcactgcagaagatgggtttgagtgacgccgcagatgccgcagccgccgctgctgaaaacagggagaaaggtggagaaccaaaaggagagtagctaatctaataatgcctgttgttttcagcagatgcacctagacctagagtagagaatgtgagggcagattacctagcataacggtgtcctgcactagaacaatttttgccagattgcagccacataaagtcagactgcaggtcatacagaatcgtttggctttggatagcctccgaaagtcagaactgtcgacaatcgaatgtttcatacgatctgatggtctccgattctcgtcactatatcagtagagcccaccaggtcacatagaacactcctgctcctgctgtcggtcaatgagcctcgtgcagagctaatcttaagaccttgagtagtcaccaactttggcaacaaaaagcggg

SEQ ID NO: 75806 - DNA, 1733 bp, Zea Mays
ccggtgccgagttgggggtcgagcacaacatggcaacacgctgtggatatggattgcccaagtggaggaggtcgacgacgacgacgagcggcctgggccctcggcagtgggcacacgcaatttgattactcccccatctttccaaattttgactacttggacgacgtgaagtttaggcccaagttcaaaggcccgcccgccgccccgcccgtattctactccaattccaaacactcgcccgtccccgtcgctccccatcccacaccaaccctctgtgcctcggtccctccgcccgtacgcgcgacgagagacacgatgcggcggtccctaccccttctcctcgcgcggcaggtggcgcggcggcggcggctgagcaacgtgccggagtccaccgtctacgggggcccacgcccgcaggagtcctcggcggcgcggcgcgtgacggtgaccacactccgtgggaagcaccgccgcggggagcccatcaccgtcgtcaccgcctacgactacccctcggcggtccacgtcgactccgccggcatcgacgtctgcctcgtcggggactccgccgccatggtcgtccacggccacgacaccacgctccccatcacgctcgacatcatgctcgagcactgccgcgccgtggcccggggcgcgccgcgcccgctcctcgtcggggatctcccattcggctgctacgagtcctccgccgcccaggctgttgattcagccgtgagggtcctcaaggaaggtggaatggatgcgatcaagctggaagggggtgccccatcgaggatcactgcagccaaggctattgtggaggctggaatcgctgtcatggggcatgttggcctcacaccgcaagctattagtgttctcggtggatttaggcctcaagggaagacggttgacagtgctataaaggttgtggagacagcacttgccttgcaggaggctggatgcttctcggttgtgttggagtgtgtgcctgctccagtggcagcagctgcaacatcagcattgaaaatcccaaccattggcattggggctggaccattctgtagtggccaggtcttggtgtaccatgacttgttagggatgctgcaacacccacatcatgccaaggtcacaccaaaattctgtaaacaatttggtaacgtgggcgatgtcatcaacaaggcgctatcagagtacaagcaagaagtggaggctcaggctttccctggtccaagccacacaccgtataagataactcccacagatgttgacggctttgcagatgcactgcagaagatgggtttgagtgacgccgcagatgccgcagccgccgctgctgaaaacagggagaaaggtggagaaccaaaaggagagtagctaatctaataatgcctgttgttttcagcagatgcacctagacctagagtagagaatgtgagggcagattacctagcataacggtgtcctgcactagaacaatttttgccagattgcagccacataaagtcagactgcaggtcatacagaatcgtttggctttggatagcctccgaaagtcagaactgtcgacaatcgaatgtttcatacgatctgatggtctccgattctcgtcactatatcagtagagcccaccaggtcacatagaacactcctgctcctgctgtcggtcaatgagcctcgtgcagagctaatcttaagaccttgagtagtcaccaactttggcaacaaaaagcggg

SEQ ID NO: 75807 - DNA, 1059 bp, Zea Mays
aaaccatcaaattccaaactgcatcggtatcaaaaacagtgtctcaggtacagtcttggcatgacatcttacaacacagatcaaaatcaaacagcactaccgaaaaaccgtatgctgtgtatgcatcgctgatgaagggtaaagctagcaattcggctactcccatcaaatatcaaacaaaaagcagccatacacaacacgatgcataggtggcaaattggcgcttcatacccacaagcgctgtctcctgatgagactcaaaccgattgctaccattccctactgagagccaaacctcgaatcacttcttctagtgcttcttgtctttcgcgggaccccttggtactttgctcagaaccttctcatcgaacacggcgtactgcttcttaatctcaacccaccccttctcgccataggtgtcaatctgatcctcatacttctcatacaggacaggtactgtgtgcagcaccacaaacactgttttgcataagaggaagacgatccagtgtcagccaatcagatacatacaagagtggttaaaaacaaggctcttcctaagttgcttggatcccttaccaatgtagactaaggtcaataagttgcagcaacttccaaggacagaaagcaaccaaagcccagcaataacctaaattttccaatagagaaaaaaatgaggcaagtgtagcttgattgctgtacaaaccattgtacatcataggcaaatgacacagtgggcataccattaggaacttcttaatgtcccggccaagagcaattcggcggagattagcaaaggccctgttgatctcataacgagtggataccgcaatgttgacaactaaatcttcaggaatgaccacctctgggatctttgggggagacctgaattgatgggcagaatttcacatcatgaaattagcctatgcccatctaactagcaatggacaaacttgtatgttttatagtttgagcagtttatgatactgaggtgatctcttacttgtggataaacgatgaagcattagaccagagaaagagaacacccagagagaatatgag

SEQ ID NO: 75808 - DNA, 2216 bp, Zea Mays
ttttgaaacacttatagtagcacatgattaagaattcatgtcactggctcctcttaggcggtcaagcagttggacttttgatgagaaaattttagtgcaagcattgtacaaggttctgctttcagtgtcaaagaagtacccagttgtactctatataagagatgttgagaagttccttcacaagtccccaaaaatgtatctcctgtttgagaaactactaaacaagcttgaaggtccagtgttaatcctcggatcaaggattgtagatatgaacagtgatgaggaatcggatgacagattgactgttctgttcccatataatatagaaatcaagccacctgaaaatgaaaaccaccttgtaagttggaactcccaattagaagaagacatgaagatgattcagtttcaagataaccgaaatcatattatggaagtgcttgcagaaaatgatcttgaatgtgatgatttaggttcgatttgcctatctgatactatgtgccttagcaagtatatagaggaaattgtggtgtctgcagtttcgtatcacttgatgaataacaaagatccagagtatcgaaatgggaaattagttctatccacaaagaggcaacaagataagtgataaggacagcatgaaattggaagcgacagatgacgccttaaaggctgctgaaaaggcaactgctccaaccactgcaaaatcagaaacaaaatcagcaacatcactgccacctgctcgggctccggctgctgctgctgctgctcccgctagtgcccctgctcctagaattgagagcaaaacagaacttgaaaagaaggataatccacctccagttgcaaaagcaccggaagtaacacccgataatgagtttgaaaagcgtattagaccagaagtgatacctgctaatgaaattggagtttcatttgatgatattggtgccttggatgatatcaaagaatcccttcaagagcttgtcatgcttcctctaagacggcctgacctcttcaaaggcggtcttcttaaaccctgcagaggtatattactttttggtcctccaggaacaggcaagactatgcttgccaaggctatagcaaatgaagctcaagcaagttttataaatgtctctatgtcaactatcacatcgaagtggtttggtgaagacgaaaagaatgtccgagcattgttcacgttagcggctaaagtatcaccaaccatcattttcgtcgatgaagttgatagcatgcttgggcagcggaacagagctggagagcatgaggcaatgaggaagatcaagaatgaatttatgacacactgggatggcctcttgtcaagaccggatcagagaattcttgttcttgctgcaaccaaccggcctttcgatcttgatgaggctataatccgtaggttcgagcgaagtcgggaactcataatgcggcgacttctgtcaaaggagaaagttgatgaagggctggacttcaaggagctagcaaccatgacagaaggatatagtggaagtgatctcaagaacctgtgcacgacggcagcgtatcgccctgtgagagagctaatccagaaggaaagaaagaaggagctggagaagctgaagtgtgagaaaggagaaactccgtcggatcctccgaagaaggaaaaggaggagaccatcattctaaggccgctgaacatgacagatctgaaagaagcaaagaaccaggtggctgcaagtttcgctgctgaaggcgccataatgagcgagctgaggcaatggaacgagttgtacggtgaaggcggctccagaaagaagcagcagttgacatacttcctctgagcaatatgaaaatcaggcgcaaaaatgtatgaacataatttgagaagtagagtagagcacaaagcagccatgaggaaatagaccgaacatgtaatcgtgtataagaagaacatgagaaaagggtgcgtgttagggggacaaggacaagaaatcaggccgtaaaagccagtatctggtgtaggacaaggaaggacagttttcatctccaccaaaattccagtttgcctgtgctggttgttgttgtattacactaataatggatctgcggtgtagatcgctcttctcttcatcttttcctggtcgcatcatccttctgtatatgtacaaactggtaggttgtggcaacgaaaggtttttaaagcagcttatatatatcttctccaagactcc

SEQ ID NO: 75809 - DNA, 2250 bp, Zea Mays
gttcttttgaaacacttatagtagcacatgattaagaattcatgtcactggctcctcttaggcggtcaagcagttggacttttgatgagaaaattttagtgcaagcattgtacaaggttctgctttcagtgtcaaagaagtacccagttgtactctatataagagatgttgagaagttccttcacaagtccccaaaaatgtatctcctgtttgagaaactactaaacaagcttgaaggtccagtgttaatcctcggatcaaggattgtagatatgaacagtgatgaggaatcggatgacagattgactgttctgttcccatataatatagaaatcaagccacctgaaaatgaaaaccaccttgtaagttggaactcccaattagaagaagacatgaagatgattcagtttcaagataaccgaaatcatattatggaagtgcttgcagaaaatgatcttgaatgtgatgatttaggttcgatttgcctatctgatactatgtgccttagcaagtatatagaggaaattgtggtgtctgcagtttcgtatcacttgatgaataacaaagatccagagtatcgaaatgggaaattagttctatccacaaagaggcaacaagataagtgataaggacagcatgaaattggaagcgacagatgacgccttaaaggctgctgaaaaggcaactgctccaaccactgcaaaatcagaaacaaaatcagcaacatcactgccacctgctcgggctccggctgctgctgctgctgctcccgctagtgcccctgctcctagaattgagagcaaaacagaacttgaaaagaaggataatccacctccagttgcaaaagcaccggaagtaacacccgataatgagtttgaaaagcgtattagaccagaagtgatacctgctaatgaaattggagtttcatttgatgatattggtgccttggatgatatcaaagaatcccttcaagagcttgtcatgcttcctctaagacggcctgacctcttcaaaggcggtcttcttaaaccctgcagaggtatattactttttggtcctccaggaacaggcaagactatgcttgccaaggctatagcaaatgaagctcaagcaagttttataaatgtctctatgtcaactatcacatcgaagtggtttggtgaagacgaaaagaatgtccgagcattgttcacgttagcggctaaagtatcaccaaccatcattttcgtcgatgaagttgatagcatgcttgggcagcggaacagagctggagagcatgaggcaatgaggaagatcaagaatgaatttatgacacactgggatggcctcttgtcaagaccggatcagagaattcttgttcttgctgcaaccaaccggcctttcgatcttgatgaggctataatccgtaggttcgagcgaagaatcatggtaggtctgccatcgatgggaagtcgggaactcataatgcggcgacttctgtcaaaggagaaagttgatgaagggctggacttcaaggagctagcaaccatgacagaaggatatagtggaagtgatctcaagaacctgtgcacgacggcagcgtatcgccctgtgagagagctaatccagaaggaaagaaagaaggagctggagaagctgaagtgtgagaaaggagaaactccgtcggatcctccgaagaaggaaaaggaggagaccatcattctaaggccgctgaacatgacagatctgaaagaagcaaagaaccaggtggctgcaagtttcgctgctgaaggcgccataatgagcgagctgaggcaatggaacgagttgtacggtgaaggcggctccagaaagaagcagcagttgacatacttcctctgagcaatatgaaaatcaggcgcaaaaatgtatgaacataatttgagaagtagagtagagcacaaagcagccatgaggaaatagaccgaacatgtaatcgtgtataagaagaacatgagaaaagggtgcgtgttagggggacaaggacaagaaatcaggccgtaaaagccagtatctggtgtaggacaaggaaggacagttttcatctccaccaaaattccagtttgcctgtgctggttgttgttgtattacactaataatggatctgcggtgtagatcgctcttctcttcatcttttcctggtcgcatcatccttctgtatatgtacaaactggtaggttgtggcaacgaaaggtttttaaagcagcttatatatatcttctccaagactcc

SEQ ID NO: 75810 - DNA, 2462 bp, Zea Mays
caaaacattctgactttctgatgagacggttaaaagatcaatctccgagacgacgcttgaacgtgtgtcgggattgcttggatctctttctattcttccacaaaaggaacagcccaaaggaactatacgtagacaaagcagcatgatggatgtcaaattaaggagttctgagagtatgagcaacttaacaaagctcagaagaaatgcatctacttcctctgatatgagtagcatggcttcgcaaggaccttcaactagtacagctcctcttaggcggtcaagcagttggacttttgatgagaaaattttagtgcaagcattgtacaaggttctgctttcagtgtcaaagaagtacccagttgtactctatataagagatgttgagaagttccttcacaagtccccaaaaatgtatctcctgtttgagaaactactaaacaagcttgaaggtccagtgttaatcctcggatcaaggattgtagatatgaacagtgatgaggaatcggatgacagattgactgttctgttcccatataatatagaaatcaagccacctgaaaatgaaaaccaccttgtaagttggaactcccaattagaagaagacatgaagatgattcagtttcaagataaccgaaatcatattatggaagtgcttgcagaaaatgatcttgaatgtgatgatttaggttcgatttgcctatctgatactatgtgccttagcaagtatatagaggaaattgtggtgtctgcagtttcgtatcacttgatgaataacaaagatccagagtatcgaaatgggaaattagttctatccacaaagaggcaacaagataagtgataaggacagcatgaaattggaagcgacagatgacgccttaaaggctgctgaaaaggcaactgctccaaccactgcaaaatcagaaacaaaatcagcaacatcactgccacctgctcgggctccggctgctgctgctgctgctcccgctagtgcccctgctcctagaattgagagcaaaacagaacttgaaaagaaggataatccacctccagttgcaaaagcaccggaagtaacacccgataatgagtttgaaaagcgtattagaccagaagtgatacctgctaatgaaattggagtttcatttgatgatattggtgccttggatgatatcaaagaatcccttcaagagcttgtcatgcttcctctaagacggcctgacctcttcaaaggcggtcttcttaaaccctgcagaggtatattactttttggtcctccaggaacaggcaagactatgcttgccaaggctatagcaaatgaagctcaagcaagttttataaatgtctctatgtcaactatcacatcgaagtggtttggtgaagacgaaaagaatgtccgagcattgttcacgttagcggctaaagtatcaccaaccatcattttcgtcgatgaagttgatagcatgcttgggcagcggaacagagctggagagcatgaggcaatgaggaagatcaagaatgaatttatgacacactgggatggcctcttgtcaagaccggatcagagaattcttgttcttgctgcaaccaaccggcctttcgatcttgatgaggctataatccgtaggttcgagcgaagaatcatggtaggtctgccatcgatgggaagtcgggaactcataatgcggcgacttctgtcaaaggagaaagttgatgaagggctggacttcaaggagctagcaaccatgacagaaggatatagtggaagtgatctcaagaacctgtgcacgacggcagcgtatcgccctgtgagagagctaatccagaaggaaagaaagaaggagctggagaagctgaagtgtgagaaaggagaaactccgtcggatcctccgaagaaggaaaaggaggagaccatcattctaaggccgctgaacatgacagatctgaaagaagcaaagaaccaggtggctgcaagtttcgctgctgaaggcgccataatgagcgagctgaggcaatggaacgagttgtacggtgaaggcggctccagaaagaagcagcagttgacatacttcctctgagcaatatgaaaatcaggcgcaaaaatgtatgaacataatttgagaagtagagtagagcacaaagcagccatgaggaaatagaccgaacatgtaatcgtgtataagaagaacatgagaaaagggtgcgtgttagggggacaaggacaagaaatcaggccgtaaaagccagtatctggtgtaggacaaggaaggacagttttcatctccaccaaaattccagtttgcctgtgctggttgttgttgtattacactaataatggatctgcggtgtagatcgctcttctcttcatcttttcctggtcgcatcatccttctgtatatgtacaaactggtaggttgtggcaacgaaaggtttttaaagcagcttatatatatcttctccaagactcc

SEQ ID NO: 75811 - DNA, 2492 bp, Zea Mays
tcaaaacattctgactttctgatgagacggttaaaagatcaatctccgagacgacgcttgaacgtgtgtcgggattgcttggatctctttctattcttccacaaaaggaacagcccaaaggaactatacgtagacaaagcagcatgatggatgtcaaattaaggagttctgagagtatgagcaacttaacaaagctcagaagaaatgcatctacttcctctgatatgagtagcatggcttcgcaaggaccttcaactagtacagctcctcttaggcggtcaagcagttggacttttgatgagaaaattttagtgcaagcattgtacaaggttctgctttcagtgtcaaagaagtacccagttgtactctatataagagatgttgagaagttccttcacaagtccccaaaaatgtatctcctgtttgagaaactactaaacaagcttgaaggtccagtgttaatcctcggatcaaggattgtagatatgaacagtgatgaggaatcggatgacagattgactgttctgttcccatataatatagaaatcaagccacctgaaaatgaaaaccaccttgtaagttggaactcccaattagaagaagacatgaagatgattcagtttcaagataaccgaaatcatattatggaagtgcttgcagaaaatgatcttgaatgtgatgatttaggttcgatttgcctatctgatactatgtgccttagcaagtatatagaggaaattgtggtgtctgcagtttcgtatcacttgatgaataacaaagatccagagtatcgaaatgggaaattagttctatccacaaagagcttgtcccatgcattggaaatttttcaaggcaacaagataagtgataaggacagcatgaaattggaagcgacagatgacgccttaaaggctgctgaaaaggcaactgctccaaccactgcaaaatcagaaacaaaatcagcaacatcactgccacctgctcgggctccggctgctgctgctgctgctcccgctagtgcccctgctcctagaattgagagcaaaacagaacttgaaaagaaggataatccacctccagttgcaaaagcaccggaagtaacacccgataatgagtttgaaaagcgtattagaccagaagtgatacctgctaatgaaattggagtttcatttgatgatattggtgccttggatgatatcaaagaatcccttcaagagcttgtcatgcttcctctaagacggcctgacctcttcaaaggcggtcttcttaaaccctgcagaggtatattactttttggtcctccaggaacaggcaagactatgcttgccaaggctatagcaaatgaagctcaagcaagttttataaatgtctctatgtcaactatcacatcgaagtggtttggtgaagacgaaaagaatgtccgagcattgttcacgttagcggctaaagtatcaccaaccatcattttcgtcgatgaagttgatagcatgcttgggcagcggaacagagctggagagcatgaggcaatgaggaagatcaagaatgaatttatgacacactgggatggcctcttgtcaagaccggatcagagaattcttgttcttgctgcaaccaaccggcctttcgatcttgatgaggctataatccgtaggttcgagcgaagaatcatggtaggtctgccatcgatgggaagtcgggaactcataatgcggcgacttctgtcaaaggagaaagttgatgaagggctggacttcaaggagctagcaaccatgacagaaggatatagtggaagtgatctcaagaacctgtgcacgacggcagcgtatcgccctgtgagagagctaatccagaaggaaagaaagaaggagctggagaagctgaagtgtgagaaaggagaaactccgtcggatcctccgaagaaggaaaaggaggagaccatcattctaaggccgctgaacatgacagatctgaaagaagcaaagaaccaggtggctgcaagtttcgctgctgaaggcgccataatgagcgagctgaggcaatggaacgagttgtacggtgaaggcggctccagaaagaagcagcagttgacatacttcctctgagcaatatgaaaatcaggcgcaaaaatgtatgaacataatttgagaagtagagtagagcacaaagcagccatgaggaaatagaccgaacatgtaatcgtgtataagaagaacatgagaaaagggtgcgtgttagggggacaaggacaagaaatcaggccgtaaaagccagtatctggtgtaggacaaggaaggacagttttcatctccaccaaaattccagtttgcctgtgctggttgttgttgtattacactaataatggatctgcggtgtagatcgctcttctcttcatcttttcctggtcgcatcatccttctgtatatgtacaaactggtaggttgtggcaacgaaaggtttttaaagcagcttatatatatcttctccaagactcc

SEQ ID NO: 75812 - DNA, 3015 bp, Zea Mays
ccccctccgcctctcccgtctctccaggccgccaccaacaccacaccaccacccgttgccacgctgccggccgcccacgcctcgcgccagccgatcctttcattccatcctccctccctccgcccccgcctcccaattttagccgcacggccgccgccgccgccggccggccggagagcaggagcagctaggccgccatggaggcgaagagcgtggtcatgtcggcgctcgggatcgggatcggcgtcggcgtcggcctgggcctcgcgtccgcgccctgggccgccggcgcctcggcctcctccagggccgcgggggtcaccgtcgaccgggtggagcaggacctccgccgcctcctcgtcgacggcgccgacaccaaggtcaccttcgacgagttcccgtactacctcagtgagcaaacacgtgttgtgctgacgagcgctgcgtacgtccacttgaagcaagcagatatttctaagtacaccaggaaccttgctccagccagccgtacaatcctgctgtcaggtcctgcagagctctaccagcagatgcttgccagggcgcttgcccactattttcaagcaaagttgctcttgctagatcctactgatttccttataaagatccatagcaaatatggcacaggtggcagcacagagaagacggttaaaagatcaatctccgagacgacgcttgaacgtgtgtcgggattgcttggatctctttctattcttccacaaaaggaacagcccaaaggaactatacgtagacaaagcagcatgatggatgtcaaattaaggagttctgagagtatgagcaacttaacaaagctcagaagaaatgcatctacttcctctgatatgagtagcatggcttcgcaaggaccttcaactagtacagctcctcttaggcggtcaagcagttggacttttgatgagaaaattttagtgcaagcattgtacaaggttctgctttcagtgtcaaagaagtacccagttgtactctatataagagatgttgagaagttccttcacaagtccccaaaaatgtatctcctgtttgagaaactactaaacaagcttgaaggtccagtgttaatcctcggatcaaggattgtagatatgaacagtgatgaggaatcggatgacagattgactgttctgttcccatataatatagaaatcaagccacctgaaaatgaaaaccaccttgtaagttggaactcccaattagaagaagacatgaagatgattcagtttcaagataaccgaaatcatattatggaagtgcttgcagaaaatgatcttgaatgtgatgatttaggttcgatttgcctatctgatactatgtgccttagcaagtatatagaggaaattgtggtgtctgcagtttcgtatcacttgatgaataacaaagatccagagtatcgaaatgggaaattagttctatccacaaagagcttgtcccatgcattggaaatttttcaaggcaacaagataagtgataaggacagcatgaaattggaagcgacagatgacgccttaaaggctgctgaaaaggcaactgctccaaccactgcaaaatcagaaacaaaatcagcaacatcactgccacctgctcgggctccggctgctgctgctgctgctcccgctagtgcccctgctcctagaattgagagcaaaacagaacttgaaaagaaggataatccacctccagttgcaaaagcaccggaagtaacacccgataatgagtttgaaaagcgtattagaccagaagtgatacctgctaatgaaattggagtttcatttgatgatattggtgccttggatgatatcaaagaatcccttcaagagcttgtcatgcttcctctaagacggcctgacctcttcaaaggcggtcttcttaaaccctgcagagtggtttggtgaagacgaaaagaatgtccgagcattgttcacgttagcggctaaagtatcaccaaccatcattttcgtcgatgaagttgatagcatgcttgggcagcggaacagagctggagagcatgaggcaatgaggaagatcaagaatgaatttatgacacactgggatggcctcttgtcaagaccggatcagagaattcttgttcttgctgcaaccaaccggcctttcgatcttgatgaggctataatccgtaggttcgagcgaagaatcatggtaggtctgccatcgatgggaagtcgggaactcataatgcggcgacttctgtcaaaggagaaagttgatgaagggctggacttcaaggagctagcaaccatgacagaaggatatagtggaagtgatctcaagaacctgtgcacgacggcagcgtatcgccctgtgagagagctaatccagaaggaaagaaagaaggagctggagaagctgaagtgtgagaaaggagaaactccgtcggatcctccgaagaaggaaaaggaggagaccatcattctaaggccgctgaacatgacagatctgaaagaagcaaagaaccaggtggctgcaagtttcgctgctgaaggcgccataatgagcgagctgaggcaatggaacgagttgtacggtgaaggcggctccagaaagaagcagcagttgacatacttcctctgagcaatatgaaaatcaggcgcaaaaatgtatgaacataatttgagaagtagagtagagcacaaagcagccatgaggaaatagaccgaacatgtaatcgtgtataagaagaacatgagaaaagggtgcgtgttagggggacaaggacaagaaatcaggccgtaaaagccagtatctggtgtaggacaaggaaggacagttttcatctccaccaaaattccagtttgcctgtgctggttgttgttgtattacactaataatggatctgcggtgtagatcgctcttctcttcatcttttcctggtcgcatcatccttctgtatatgtacaaactggtaggttgtggcaacgaaaggtttttaaagcagcttatatatatcttctccaagactcc

SEQ ID NO: 75813 - DNA, 2954 bp, Zea Mays
cttcccccgccccctccgcctctcccgtctctccaggccgccaccaacaccacaccaccacccgttgccacgctgccggccgcccacgcctcgcgccagccgatcctttcattccatcctccctccctccgcccccgcctcccaattttagccgcacggccgccgccgccgccggccggccggagagcaggagcagctaggccgccatggaggcgaagagcgtggtcatgtcggcgctcgggatcgggatcggcgtcggcgtcggcctgggcctcgcgtccgcgccctgggccgccggcgcctcggcctcctccagggccgcgggggtcaccgtcgaccgggtggagcaggacctccgccgcctcctcgtcgacggcgccgacaccaaggtcaccttcgacgagttcccgtactacctcagtgagcaaacacgtgttgtgctgacgagcgctgcgtacgtccacttgaagcaagcagatatttctaagtacaccaggaaccttgctccagccagccgtacaatcctgctgtcaggtcctgcagagctctaccagcagatgcttgccagggcgcttgcccactattttcaagcaaagttgctcttgctagatcctactgatttccttataaagatccatagcaaatatggcacaggtggcagcacagagaagacggttaaaagatcaatctccgagacgacgcttgaacgtgtgtcgggattgcttggatctctttctattcttccacaaaaggaacagcccaaaggaactatacgtagacaaagcagcatgatggatgtcaaattaaggagttctgagagtatgagcaacttaacaaagctcagaagaaatgcatctacttcctctgatatgagtagcatggcttcgcaaggaccttcaactagtacagctcctcttaggcggtcaagcagttggacttttgatgagaaaattttagtgcaagcattgtacaaggttctgctttcagtgtcaaagaagtacccagttgtactctatataagagatgttgagaagttccttcacaagtccccaaaaatgtatctcctgtttgagaaactactaaacaagcttgaaggtccagtgttaatcctcggatcaaggattgtagatatgaacagtgatgaggaatcggatgacagattgactgttctgttcccatataatatagaaatcaagccacctgaaaatgaaaaccaccttgtaagttggaactcccaattagaagaagacatgaagatgattcagtttcaagataaccgaaatcatattatggaagtgcttgcagaaaatgatcttgaatgtgatgatttaggttcgatttgcctatctgatactatgtgccttagcaagtatatagaggaaattgtggtgtctgcagtttcgtatcacttgatgaataacaaagatccagagtatcgaaatgggaaattagttctatccacaaagagcttgtcccatgcattggaaatttttcaaggcaacaagataagtgataaggacagcatgaaattggaagcgacagatgacgccttaaaggaagtaacacccgataatgagtttgaaaagcgtattagaccagaagtgatacctgctaatgaaattggagtttcatttgatgatattggtgccttggatgatatcaaagaatcccttcaagagcttgtcatgcttcctctaagacggcctgacctcttcaaaggcggtcttcttaaaccctgcagaggtatattactttttggtcctccaggaacaggcaagactatgcttgccaaggctatagcaaatgaagctcaagcaagttttataaatgtctctatgtcaactatcacatcgaagtggtttggtgaagacgaaaagaatgtccgagcattgttcacgttagcggctaaagtatcaccaaccatcattttcgtcgatgaagttgatagcatgcttgggcagcggaacagagctggagagcatgaggcaatgaggaagatcaagaatgaatttatgacacactgggatggcctcttgtcaagaccggatcagagaattcttgttcttgctgcaaccaaccggcctttcgatcttgatgaggctataatccgtaggttcgagcgaagaatcatggtaggtctgccatcgatgggaagtcgggaactcataatgcggcgacttctgtcaaaggagaaagttgatgaagggctggacttcaaggagctagcaaccatgacagaaggatatagtggaagtgatctcaagaacctgtgcacgacggcagcgtatcgccctgtgagagagctaatccagaaggaaagaaagaaggagctggagaagctgaagtgtgagaaaggagaaactccgtcggatcctccgaagaaggaaaaggaggagaccatcattctaaggccgctgaacatgacagatctgaaagaagcaaagaaccaggtggctgcaagtttcgctgctgaaggcgccataatgagcgagctgaggcaatggaacgagttgtacggtgaaggcggctccagaaagaagcagcagttgacatacttcctctgagcaatatgaaaatcaggcgcaaaaatgtatgaacataatttgagaagtagagtagagcacaaagcagccatgaggaaatagaccgaacatgtaatcgtgtataagaagaacatgagaaaagggtgcgtgttagggggacaaggacaagaaatcaggccgtaaaagccagtatctggtgtaggacaaggaaggacagttttcatctccaccaaaattccagtttgcctgtgctggttgttgttgtattacactaataatggatctgcggtgtagatcgctcttctcttcatcttttcctggtcgcatcatccttctgtatatgtacaaactggtaggttgtggcaacgaaaggtttttaaagcagcttatatatatcttctccaagactcc

SEQ ID NO: 75814 - DNA, 3127 bp, Zea Mays
cttcccccgccccctccgcctctcccgtctctccaggccgccaccaacaccacaccaccacccgttgccacgctgccggccgcccacgcctcgcgccagccgatcctttcattccatcctccctccctccgcccccgcctcccaattttagccgcacggccgccgccgccgccggccggccggagagcaggagcagctaggccgccatggaggcgaagagcgtggtcatgtcggcgctcgggatcgggatcggcgtcggcgtcggcctgggcctcgcgtccgcgccctgggccgccggcgcctcggcctcctccagggccgcgggggtcaccgtcgaccgggtggagcaggacctccgccgcctcctcgtcgacggcgccgacaccaaggtcaccttcgacgagttcccgtactacctcagtgagcaaacacgtgttgtgctgacgagcgctgcgtacgtccacttgaagcaagcagatatttctaagtacaccaggaaccttgctccagccagccgtacaatcctgctgtcaggtcctgcagagctctaccagcagatgcttgccagggcgcttgcccactattttcaagcaaagttgctcttgctagatcctactgatttccttataaagatccatagcaaatatggcacaggtggcagcacagagaagacggttaaaagatcaatctccgagacgacgcttgaacgtgtgtcgggattgcttggatctctttctattcttccacaaaaggaacagcccaaaggaactatacgtagacaaagcagcatgatggatgtcaaattaaggagttctgagagtatgagcaacttaacaaagctcagaagaaatgcatctacttcctctgatatgagtagcatggcttcgcaaggaccttcaactagtacaggcggtcaagcagttggacttttgatgagaaaattttagtgcaagcattgtacaaggttctgctttcagtgtcaaagaagtacccagttgtactctatataagagatgttgagaagttccttcacaagtccccaaaaatgtatctcctgtttgagaaactactaaacaagcttgaaggtccagtgttaatcctcggatcaaggattgtagatatgaacagtgatgaggaatcggatgacagattgactgttctgttcccatataatatagaaatcaagccacctgaaaatgaaaaccaccttgtaagttggaactcccaattagaagaagacatgaagatgattcagtttcaagataaccgaaatcatattatggaagtgcttgcagaaaatgatcttgaatgtgatgatttaggttcgatttgcctatctgatactatgtgccttagcaagtatatagaggaaattgtggtgtctgcagtttcgtatcacttgatgaataacaaagatccagagtatcgaaatgggaaattagttctatccacaaagagcttgtcccatgcattggaaatttttcaaggcaacaagataagtgataaggacagcatgaaattggaagcgacagatgacgccttaaaggctgctgaaaaggcaactgctccaaccactgcaaaatcagaaacaaaatcagcaacatcactgccacctgctcgggctccggctgctgctgctgctgctcccgctagtgcccctgctcctagaattgagagcaaaacagaacttgaaaagaaggataatccacctccagttgcaaaagcaccggaagtaacacccgataatgagtttgaaaagcgtattagaccagaagtgatacctgctaatgaaattggagtttcatttgatgatattggtgccttggatgatatcaaagaatcccttcaagagcttgtcatgcttcctctaagacggcctgacctcttcaaaggcggtcttcttaaaccctgcagaggtatattactttttggtcctccaggaacaggcaagactatgcttgccaaggctatagcaaatgaagctcaagcaagttttataaatgtctctatgtcaactatcacatcgaagtggtttggtgaagacgaaaagaatgtccgagcattgttcacgttagcggctaaagtatcaccaaccatcattttcgtcgatgaagttgatagcatgcttgggcagcggaacagagctggagagcatgaggcaatgaggaagatcaagaatgaatttatgacacactgggatggcctcttgtcaagaccggatcagagaattcttgttcttgctgcaaccaaccggcctttcgatcttgatgaggctataatccgtaggttcgagcgaagaatcatggtaggtctgccatcgatgggaagtcgggaactcataatgcggcgacttctgtcaaaggagaaagttgatgaagggctggacttcaaggagctagcaaccatgacagaaggatatagtggaagtgatctcaagaacctgtgcacgacggcagcgtatcgccctgtgagagagctaatccagaaggaaagaaagaaggagctggagaagctgaagtgtgagaaaggagaaactccgtcggatcctccgaagaaggaaaaggaggagaccatcattctaaggccgctgaacatgacagatctgaaagaagcaaagaaccaggtggctgcaagtttcgctgctgaaggcgccataatgagcgagctgaggcaatggaacgagttgtacggtgaaggcggctccagaaagaagcagcagttgacatacttcctctgagcaatatgaaaatcaggcgcaaaaatgtatgaacataatttgagaagtagagtagagcacaaagcagccatgaggaaatagaccgaacatgtaatcgtgtataagaagaacatgagaaaagggtgcgtgttagggggacaaggacaagaaatcaggccgtaaaagccagtatctggtgtaggacaaggaaggacagttttcatctccaccaaaattccagtttgcctgtgctggttgttgttgtattacactaataatggatctgcggtgtagatcgctcttctcttcatcttttcctggtcgcatcatccttctgtatatgtacaaactggtaggttgtggcaacgaaaggtttttaaagcagcttatatatatcttctccaagactcc

SEQ ID NO: 75815 - DNA, 3264 bp, Zea Mays
cggcgcgccattgcactgcaccaccagcctgcctgtgcagagagacggaggaggagacacacagggcagcgaccagcgaaggaccgagaagctagcaacggcaacgagcagaggcccgagcccgacacttgcgctccgcttcccccgccccctccgcctctcccgtctctccaggccgccaccaacaccacaccaccacccgttgccacgctgccggccgcccacgcctcgcgccagccgatcctttcattccatcctccctccctccgcccccgcctcccaattttagccgcacggccgccgccgccgccggccggccggagagcaggagcagctaggccgccatggaggcgaagagcgtggtcatgtcggcgctcgggatcgggatcggcgtcggcgtcggcctgggcctcgcgtccgcgccctgggccgccggcgcctcggcctcctccagggccgcgggggtcaccgtcgaccgggtggagcaggacctccgccgcctcctcgtcgacggcgccgacaccaaggtcaccttcgacgagttcccgtactacctcagtgagcaaacacgtgttgtgctgacgagcgctgcgtacgtccacttgaagcaagcagatatttctaagtacaccaggaaccttgctccagccagccgtacaatcctgctgtcaggtcctgcagagctctaccagcagatgcttgccagggcgcttgcccactattttcaagcaaagttgctcttgctagatcctactgatttccttataaagatccatagcaaatatggcacaggtggcagcacagagaagacggttaaaagatcaatctccgagacgacgcttgaacgtgtgtcgggattgcttggatctctttctattcttccacaaaaggaacagcccaaaggaactatacgtagacaaagcagcatgatggatgtcaaattaaggagttctgagagtatgagcaacttaacaaagctcagaagaaatgcatctacttcctctgatatgagtagcatggcttcgcaaggaccttcaactagtacagctcctcttaggcggtcaagcagttggacttttgatgagaaaattttagtgcaagcattgtacaaggttctgctttcagtgtcaaagaagtacccagttgtactctatataagagatgttgagaagttccttcacaagtccccaaaaatgtatctcctgtttgagaaactactaaacaagcttgaaggtccagtgttaatcctcggatcaaggattgtagatatgaacagtgatgaggaatcggatgacagattgactgttctgttcccatataatatagaaatcaagccacctgaaaatgaaaaccaccttgtaagttggaactcccaattagaagaagacatgaagatgattcagtttcaagataaccgaaatcatattatggaagtgcttgcagaaaatgatcttgaatgtgatgatttaggttcgatttgcctatctgatactatgtgccttagcaagtatatagaggaaattgtggtgtctgcagtttcgtatcacttgatgaataacaaagatccagagtatcgaaatgggaaattagttctatccacaaagagcttgtcccatgcattggaaatttttcaaggcaacaagataagtgataaggacagcatgaaattggaagcgacagatgacgccttaaaggctgctgaaaaggcaactgctccaaccactgcaaaatcagaaacaaaatcagcaacatcactgccacctgctcgggctccggctgctgctgctgctgctcccgctagtgcccctgctcctagaattgagagcaaaacagaacttgaaaagaaggataatccacctccagttgcaaaagcaccggaagtaacacccgataatgagtttgaaaagcgtattagaccagaagtgatacctgctaatgaaattggagtttcatttgatgatattggtgccttggatgatatcaaagaatcccttcaagagcttgtcatgcttcctctaagacggcctgacctcttcaaaggcggtcttcttaaaccctgcagaggtatattactttttggtcctccaggaacaggcaagactatgcttgccaaggctatagcaaatgaagctcaagcaagttttataaatgtctctatgtcaactatcacatcgaagtggtttggtgaagacgaaaagaatgtccgagcattgttcacgttagcggctaaagtatcaccaaccatcattttcgtcgatgaagttgatagcatgcttgggcagcggaacagagctggagagcatgaggcaatgaggaagatcaagaatgaatttatgacacactgggatggcctcttgtcaagaccggatcagagaattcttgttcttgctgcaaccaaccggcctttcgatcttgatgaggctataatccgtaggttcgagcgaaggtctgccatcgatgggaagtcgggaactcataatgcggcgacttctgtcaaaggagaaagttgatgaagggctggacttcaaggagctagcaaccatgacagaaggatatagtggaagtgatctcaagaacctgtgcacgacggcagcgtatcgccctgtgagagagctaatccagaaggaaagaaagaaggagctggagaagctgaagtgtgagaaaggagaaactccgtcggatcctccgaagaaggaaaaggaggagaccatcattctaaggccgctgaacatgacagatctgaaagaagcaaagaaccaggtggctgcaagtttcgctgctgaaggcgccataatgagcgagctgaggcaatggaacgagttgtacggtgaaggcggctccagaaagaagcagcagttgacatacttcctctgagcaatatgaaaatcaggcgcaaaaatgtatgaacataatttgagaagtagagtagagcacaaagcagccatgaggaaatagaccgaacatgtaatcgtgtataagaagaacatgagaaaagggtgcgtgttagggggacaaggacaagaaatcaggccgtaaaagccagtatctggtgtaggacaaggaaggacagttttcatctccaccaaaattccagtttgcctgtgctggttgttgttgtattacactaataatggatctgcggtgtagatcgctcttctcttcatcttttcctggtcgcatcatccttctgtatatgtacaaactggtaggttgtggcaacgaaaggtttttaaagcagcttatatatatcttctccaagactcc

SEQ ID NO: 75816 - DNA, 3246 bp, Zea Mays
cggcgcgccattgcactgcaccaccagcctgcctgtgcagagagacggaggaggagacacacagggcagcgaccagcgaaggaccgagaagctagcaacggcaacgagcagaggcccgagcccgacacttgcgctccgcttcccccgccccctccgcctctcccgtctctccaggccgccaccaacaccacaccaccacccgttgccacgctgccggccgcccacgcctcgcgccagccgatcctttcattccatcctccctccctccgcccccgcctcccaattttagccgcacggccgccgccgccgccggccggccggagagcaggagcagctaggccgccatggaggcgaagagcgtggtcatgtcggcgctcgggatcgggatcggcgtcggcgtcggcctgggcctcgcgtccgcgccctgggccgccggcgcctcggcctcctccagggccgcgggggtcaccgtcgaccgggtggagcaggacctccgccgcctcctcgtcgacggcgccgacaccaaggtcaccttcgacgagttcccgtactacctcagtgagcaaacacgtgttgtgctgacgagcgctgcgtacgtccacttgaagcaagcagatatttctaagtacaccaggaaccttgctccagccagccgtacaatcctgctgtcaggtcctgcagagctctaccagcagatgcttgccagggcgcttgcccactattttcaagcaaagttgctcttgctagatcctactgatttccttataaagatccatagcaaatatggcacaggtggcagcacagagaagacggttaaaagatcaatctccgagacgacgcttgaacgtgtgtcgggattgcttggatctctttctattcttccacaaaaggaacagcccaaaggaactatacgtagacaaagcagcatgatggatgtcaaattaaggagttctgagagtatgagcaacttaacaaagctcagaagaaatgcatctacttcctctgatatgagtagcatggcttcgcaaggaccttcaactagtacagctcctcttaggcggtcaagcagttggacttttgatgagaaaattttagtgcaagcattgtacaaggttctgctttcagtgtcaaagaagtacccagttgtactctatataagagatgttgagaagttccttcacaagtccccaaaaatgtatctcctgtttgagaaactactaaacaagcttgaaggtccagtgttaatcctcggatcaaggattgtagatatgaacagtgatgaggaatcggatgacagattgactgttctgttcccatataatatagaaatcaagccacctgaaaatgaaaaccaccttgtaagttggaactcccaattagaagaagacatgaagatgattcagtttcaagataaccgaaatcatattatggaagtgcttgcagaaaatgatcttgaatgtgatgatttaggttcgatttgcctatctgatactatgtgccttagcaagtatatagaggaaattgtggtgtctgcagtttcgtatcacttgatgaataacaaagatccagagtatcgaaatgggaaattagttctatccacaaagaggcaacaagataagtgataaggacagcatgaaattggaagcgacagatgacgccttaaaggctgctgaaaaggcaactgctccaaccactgcaaaatcagaaacaaaatcagcaacatcactgccacctgctcgggctccggctgctgctgctgctgctcccgctagtgcccctgctcctagaattgagagcaaaacagaacttgaaaagaaggataatccacctccagttgcaaaagcaccggaagtaacacccgataatgagtttgaaaagcgtattagaccagaagtgatacctgctaatgaaattggagtttcatttgatgatattggtgccttggatgatatcaaagaatcccttcaagagcttgtcatgcttcctctaagacggcctgacctcttcaaaggcggtcttcttaaaccctgcagaggtatattactttttggtcctccaggaacaggcaagactatgcttgccaaggctatagcaaatgaagctcaagcaagttttataaatgtctctatgtcaactatcacatcgaagtggtttggtgaagacgaaaagaatgtccgagcattgttcacgttagcggctaaagtatcaccaaccatcattttcgtcgatgaagttgatagcatgcttgggcagcggaacagagctggagagcatgaggcaatgaggaagatcaagaatgaatttatgacacactgggatggcctcttgtcaagaccggatcagagaattcttgttcttgctgcaaccaaccggcctttcgatcttgatgaggctataatccgtaggttcgagcgaagaatcatggtaggtctgccatcgatgggaagtcgggaactcataatgcggcgacttctgtcaaaggagaaagttgatgaagggctggacttcaaggagctagcaaccatgacagaaggatatagtggaagtgatctcaagaacctgtgcacgacggcagcgtatcgccctgtgagagagctaatccagaaggaaagaaagaaggagctggagaagctgaagtgtgagaaaggagaaactccgtcggatcctccgaagaaggaaaaggaggagaccatcattctaaggccgctgaacatgacagatctgaaagaagcaaagaaccaggtggctgcaagtttcgctgctgaaggcgccataatgagcgagctgaggcaatggaacgagttgtacggtgaaggcggctccagaaagaagcagcagttgacatacttcctctgagcaatatgaaaatcaggcgcaaaaatgtatgaacataatttgagaagtagagtagagcacaaagcagccatgaggaaatagaccgaacatgtaatcgtgtataagaagaacatgagaaaagggtgcgtgttagggggacaaggacaagaaatcaggccgtaaaagccagtatctggtgtaggacaaggaaggacagttttcatctccaccaaaattccagtttgcctgtgctggttgttgttgtattacactaataatggatctgcggtgtagatcgctcttctcttcatcttttcctggtcgcatcatccttctgtatatgtacaaactggtaggttgtggcaacgaaaggtttttaaagcagcttatatatatcttctccaagactcc

SEQ ID NO: 75817 - DNA, 4829 bp, Zea Mays
gtgcttctccctcactgctcgcccctctcccttccggccgttccggtaaattctctccatcttggtcaccgtagttgctctacaatccttcagtttcggagtaatgttctgtccacccgggcttcagattcagagaggctagcaaacgtgcagtctggttgcgatttgaggccggctcatgtcgtcagtttaatccggttgtgattctcagccgtttcctgccgctacttggtccagccgtccaggtacagttgggaatccatgtcaggctttgtgaatttcgggagtagggagggtggagtggtggaccggagtaccggaccggctggtgttaggtttaggatcttgtcccaatccaatctggtagcaccagtcagccttcacttctgtgcctgcctgcctagtttcaaggagatcagtcaatcaatggtctctaacctgtaaccaccaccacccctcctttactcctccttccttcccgctgcactgcatcctggtaaaagctagtgctcgtgagcaactgctcgtctttgagactttcttcaacacgaaccatgtgaaattccagcaatcatggatagggtagctcaggcggctactgaatgcacagatgttccgtggaagccagttccccaaccgcttcctgtcctgcccttgcctgcttatttgttcagcggtctcgctatccaagcatcaaaatttgttcttataccaactggcttcttggcgcttgcccccctcctctgaaattgtatcattttcttctttagaacaagaattgtctagtcttaacttctccctctgatacgaactagggttagataaggtttcctgttactttgcagtttcctcttgacttggtgtgctttcccgagtcttcagtcatctcctgcctgaagcaaactggcttctaaaaataaattgtcttgtctgaagataataaaacacagcgatgcaccaagacagtttcaggtcggtggtctgcagatccctctcgaagagcctgcccccaaggagcaaagatggcagctgttccgaaacagtccagtgcactgtcccctgtatcgtcacgctgcagccttcggtctgtcggagctgccaaggtcgggatgtacagagcgcgtcgcagagctacagggaggatgaaaggtccatgtcgttccacggggactacctgatggtgccctcgctgtccaagcattttgctgaggacctcctaataagaggcgccatggatctccaggagtcccttgcgatgcttgagaggttccaagctgcgtcactgagcatgagactactgtccagcaagaagataagaccggaaactggtgaacagtctcctgcgatagacaccatagtccgtgaagttctcctgaggccatcgaacgccaagcaggtgcaggtcaatggattaaaacaacagctaagcgattctaccagtgagttgaaaaatattgtcaaggatagtttttacaagaagaaccactctctggtgtccaacaatgagcaggcctctttgactttgagccagtcggcacggcacttgccgaacagttacctgatgcccaagcctgctgctcatcagaagaaatctgtgcccatgtcgtcgccatcttgtgcagcagtgcgacctgaaaagtctaagacgccaagcttggtagccaagctcatgggtctcgatggattgccctcgccgaaagctaaatccaccatgaaagacgacaagaacaaggcagcgagttcaccaagagcgctgttcgataccgagaggcccaggtcgaagaggctgctgccgcagttactcaaacaggaggctggttttggctcagagatgcctcggtcagaaaagctgccaccattgcaatctaacgttcaaaagaactctaccagctcaaagaagggcatcgtcggcacttcgtatactaccggagcggttcatgatactgcatcgatcaaaccgatccaaagagcggcatacgttgagcaggctcgaccgaaatccccgaaagaaatcaagatcgtctcttctcctacaggcaggaagcaacgggcgaatgagatcaacaggaggagcacggagaaacaaaggccttattcaggtgaaagaagcagagaaaggatgaatgctgcgaagtcaagagctggatcagcgtctcgtagcgcggaagcagtagcgaaacagtgtgataggagatcagttgcgtcaaggagcaatcgtacttgtgactcggtggtgaagcccaactcaccgaaaccacagagcaattccagagcgaggagagtgcccaggagaaatgttaagagctccaccgttgatgaattagtggcttacgagatagaaaaagagattctccatgccctggaccaaactgacggtccatccacagaacatagcgcgacaccgagcgacgaagcctgcccgagcgctgactgggacgaagcatcttctgtgggcgacatcctgaaagatcctggcgaggccagcgaaacatcgcagtctgctgtccgtgactgtagaatcagctcagctggtgcggatgcagatgctattcactcaccgacgcacagagccccgacaagggaagctgaaataaaagacgagatcggcttgcttctcctcagtgacaaaccgttccttagcagagcagctgagctcataggcgttgatgtgtatggggatctgagtaaccagtgtgacaggatctccaaggctagaacgagaaaccgtcggctctatctggacgcggcaggagagcaactggagctgaaacaccgccagcagaacatcctgtggccttacgctaggccgctgggccggagatggaggtcatcgtcatcggcgtacctgtcgctggaggagctgctgagagatgtcagcgacggggttaggaatctggaggatgggtattgcagtggagatgcccgccgtggcagcaaggatagcctggacgtgaagctggagagggatctcacctcctccgcagatgcgttgatcagtagtgtttgggacatgggctggcaaggtttggcttgtgtggaggcggaatgcttcgtcagagatgccggggaggagatcctgtccttgctcgtcgaggaagctgctctagacatgtgtctgcactgccatagtgccatgtgatgatatgaacatacagcgataagttgctgccatcgggacgatctataacaacttgcagcttcagttcttgtagttgtttttctttttttaggtttgaagtagatttcgtccgtgtaatcaccaggattgtagtagtataggaaccagtgaagtgatgtgttcatgagttcatcaagacatgactgaacaaaacaaggccatgaaaggaaggaaaaaaaaacagaaaaggtcacatacctgtcgtgttttgttgagtggcgacttgcgagcaccaacaaagccgagtcacgggccgagcccacgggagattcctattggcatctccatccgtcctcgtcggcatcccagccacacacacacacacaccgcacctagccacctaccctgctgtcccccgtgccgtcgccgatggagtccttgggcgtgctgctgctccaccccttcaacgcgtacctggagcaggagctggaccgccgcttccgcctgtaccgcttctgggagacgccccgcgaggagttcctccgcgcgcacgcgggcgccgtgcgcgccgtcgtcggcaacgccagctacggcgccgacgccgcgctcatcgacgcgctcccggcgctcgagatcgttgcctccttctccgtcggcatcgaccgcgtcgacctcgccaagtgccgcgaccgcgggatccgggtcaccaacacccccgacgtcctcaccgacgacgtcgccgacctcgccgtagggctcgccatcgccgtgctccgcaggatcccgcaggccgaccgatacgtccgcgcggggctctggaagtccaggggagactacaccctaaccacgcggttcagcggcaagcgggtgggcatcatcgggctgggcaggatagggcaggcggtggcgaagcgagtggaggcgttcgactgcccggtgagctaccaccagcggacggagcagcgggcgacgtacccgagctacacctactacccgtcggtggtggagctggcggcgaacagcgacgtgctggtggtggcgtgcccgctgaacgcgcagacgcgccacatcgtgagccgcgaggtgatggaagcgctaggccccagcggcgtgctgatcaacgtcggccgtgggccacacgtggacgagcgcgagatggtggcggcgctggcggacgggcggctcggcggcgccgggctggacgtgttcgaggacgagcctaacgtgcccgaggcgcttctggggatggacaacgtcgtgctgctgccccacgtcggcagcggcaccaacgagacgcgcaaggccatggccgacctcgtgctcgggaacctggaggcgcacgtgctcagcaagccgctgctgactccggttgtctgacgtttccttgtttctattacgaaataacaagcgcctgcgcctgacagcgagtggggattaaattcaaaatgttttgttttgatttgatcgccgctggtgaatggaactgaaatgtgctgtcaattctcagtccagtgcacacgacacgcttgcacgaatgtcgagcaaattatggcatcttcttttgcgaagccgcctcctcgtctgtacactctcttcccctttggagactttacgtatctgcgatgaggtttgttcatcctaagtccttttcggttggagggatttagtgaggattaaaacaaatttatataggagaagatttaaccttctc

SEQ ID NO: 75818 - DNA, 5595 bp, Zea Mays
cgggaagcgacgcagcctgtgcttctccctcactgctcgcccctctcccttccggccgttccgtttcctcttgacttggtgtgctttcccgagtcttcagtcatctcctgcctgaagcaaactggcttctaaaaataaattgtcttgtctgaagataataaaacacagcgatgcaccaagacagtttcaggtcggtggtctgcagatccctctcgaagagcctgcccccaaggagcaaagatggcagctgttccgaaacagtccagtgcactgtcccctgtatcgtcacgctgcagccttcggtctgtcggagctgccaaggtcgggatgtacagagcgcgtcgcagagctacagggaggatgaaaggtccatgtcgttccacggggactacctgatggtgccctcgctgtccaagcattttgctgaggacctcctaataagaggcgccatggatctccaggagtcccttgcgatgcttgagaggttccaagctgcgtcactgagcatgagactactgtccagcaagaagataagaccggaaactggtgaacagtctcctgcgatagacaccatagtccgtgaagttctcctgaggccatcgaacgccaagcaggtgcaggtcaatggattaaaacaacagctaagcgattctaccagtgagttgaaaaatattgtcaaggatagtttttacaagaagaaccactctctggtgtccaacaatgagcaggcctctttgactttgagccagtcggcacggcacttgccgaacagttacctgatgcccaagcctgctgctcatcagaagaaatctgtgcccatgtcgtcgccatcttgtgcagcagtgcgacctgaaaagtctaagacgccaagcttggtagccaagctcatgggtctcgatggattgccctcgccgaaagctaaatccaccatgaaagacgacaagaacaaggcagcgagttcaccaagagcgctgttcgataccgagaggcccaggtcgaagaggctgctgccgcagttactcaaacaggaggctggttttggctcagagatgcctcggtcagaaaagctgccaccattgcaatctaacgttcaaaagaactctaccagctcaaagaagggcatcgtcggcacttcgtatactaccggagcggttcatgatactgcatcgatcaaaccgatccaaagagcggcatacgttgagcaggctcgaccgaaatccccgaaagaaatcaagatcgtctcttctcctacaggcaggaagcaacgggcgaatgagatcaacaggaggagcacggagaaacaaaggccttattcaggtgaaagaagcagagaaaggatgaatgctgcgaagtcaagagctggatcagcgtctcgtagcgcggaagcagtagcgaaacagtgtgataggagatcagttgcgtcaaggagcaatcgtacttgtgactcggtggtgaagcccaactcaccgaaaccacagagcaattccagagcgaggagagtgcccaggagaaatgttaagagctccaccgttgatgaattagtggcttacgagatagaaaaagagattctccatgccctggaccaaactgacggtccatccacagaacatagcgcgacaccgagcgacgaagcctgcccgagcgctgactgggacgaagcatcttctgtgggcgacatcctgaaagatcctggcgaggccagcgaaacatcgcagtctgctgtccgtgactgtagaatcagctcagctggtgcggatgcagatgctattcactcaccgacgcacagagccccgacaagggaagctgaaataaaagacgagatcggcttgcttctcctcagtgacaaaccgttccttagcagagcagctgagctcataggcgttgatgtgtatggggatctgagtaaccagtgtgacaggatctccaaggctagaacgagaaaccgtcggctctatctggacgcggcaggagagcaactggagctgaaacaccgccagcagaacatcctgtggccttacgctaggccgctgggccggagatggaggtcatcgtcatcggcgtacctgtcgctggaggagctgctgagagatgtcagcgacggggttaggaatctggaggatgggtattgcagtggagatgcccgccgtggcagcaaggatagcctggacgtgaagctggagagggatctcacctcctccgcagatgcgttgatcagtagtgtttgggacatgggctggcaaggtttggcttgtgtggaggcggaatgcttcgtcagagatgccggggaggagatcctgtccttgctcgtcgaggaagctgctctagacatgtgtctgcactgccatagtgccatgtgatgatatgaacatacagcgataagttgctgccatcgggacgatctataacaacttgcagcttcagttcttgtagttgtttttctttttttaggtttgaagtagatttcgtccgtgtaatcaccaggattgtagtagtataggaaccagtgaagtgatgtgttcatgagttcatcaagacatgactgaacaaaacaaggccatgaaaggaaggaaaaaaaaacagaaaaggtcacatacctgtcgtgttttgttgagtggcgacttgcgagcaccaacaaagccgagtcacgggccgagcccacgggagattcctattggcatctccatccgtcctcgtcggcatcccagccacacacacacacacaccgcacctagccacctaccctgctgtcccccgtgccgtcgccgatggagtccttgggcgtgctgctgctccaccccttcaacgcgtacctggagcaggagctggaccgccgcttccgcctgtaccgcttctgggagacgccccgcgaggagttcctccgcgcgcacgcgggcgccgtgcgcgccgtcgtcggcaacgccagctacggcgccgacgccgcgctcatcgacgcgctcccggcgctcgagatcgttgcctccttctccgtcggcatcgaccgcgtcgacctcgccaagtgccgcgaccgcgggatccgggtcaccaacacccccgacgtcctcaccgacgacgtcgccgacctcgccgtagggctcgccatcgccgtgctccgcaggatcccgcaggccgaccgatacgtccgcgcggggctctggaagtccaggggagactacaccctaaccacgcgggtgcgtcggtttcttctatttcttgttcttgttattaatcgttaattataccgaatatcgtctcttccttgctgtaacatacatacataaatacaatggtattgtttgtttagatctgtagtgtcgcttgtttagatctgcattgcttactatgccgaggtagtgatccgattagcgacccccagtcccatcatatgaaacactgaaactgcatttttaggccataccaatctgtcgttgagttgattgccacgcttttactcttcttagatatcatcatatacagaatgcagtaacattaccttcctgcagctgactgactggcaagagagttgctatcctggggcttggcaagataggctcaggcgctcagcgatagcttcttattaagttgttaattataccgaatttcatttcttccttgctctaccatacatacatacaatagtgttgtttgtatagatcaccagtgttgcttgtttagttctgtatcgctttctcacttgaactatgcttatatatgccgaggtagtaatccgattagagaatccctgtcccaccatctgaaactgtatttttaggccataccaatctgtgattgagttgcttggcctgctgttactctttttcgatagcatcattatatatatagagtgcgataagccggtaacagtatcttcctgcagcagctgggtggcaagagagttgtatcctggtaggctcagcggtatcttcttattaatttgttaactataccggatttcatcccttccttgctctaccatacatacacacactagtgttgtttgtttagatcactagtggtgcttgtttagatctgtattgctttctcacttgaactacgccgaggtaataatctgattagcgaatcctggtcccatcatctgaagctgcatttttaggccataccaatgtgtcattgagttgcttggcacgctgtttgttttcagcatgagcatatatagagtgcagtaacgttatcttcctgcagctgagtggcaagagagttggtatcctggggcttggcaggatagggtcagcgatagcgaaaagagccgaggcattcggttgttccataagctacagctcaagatcagagaagcctttcccagactacaaattccacgtgagcgctgtcgacctggcagccaactgcgacgtgctcatcgtgacgtgctcgcttaccgccgagacccaccatgtcgtgagccgcgaggtcatcgacgcgctgggtccagagggcgtgcttgtaaacgttggccgcggagcacacgtggatgaacccgagctcgtcgccgcgctcctcgagggtcgcctgggaggagcggggcttgacgtgtatgagcacgagcccttggctcctgagcagctcctgggcctggacaacgtcgtcttggtgcctcacgtgggcagcgatactgaagaaacgtgcagggcgatggccgacctagtgctagcaaacttggaggcgcacgcgtcggatgagccattgctcactccggtgatctgattattgttatcttttgtttcagcggcaagcgggtgggcatcatcgggctgggcaggatagggcaggcggtggcgaagcgagtggaggcgttcgactgcccggtgagctaccaccagcggacggagcagcgggcgacgtacccgagctacacctactacccgtcggtggtggagctggcggcgaacagcgacgtgctggtggtggcgtgcccgctgaacgcgcagacgcgccacatcgtgagccgcgaggtgatggaagcgctaggccccagcggcgtgctgatcaacgtcggccgtgggccacacgtggacgagcgcgagatggtggcggcgctggcggacgggcggctcggcggcgccgggctggacgtgttcgaggacgagcctaacgtgcccgaggcgcttctggggatggacaacgtcgtgctgctgccccacgtcggcagcggcaccaacgagacgcgcaaggccatggccgacctcgtgctcgggaacctggaggcgcacgtgctcagcaagccgctgctgactccggttgtctgacgtttccttgtttctattacgaaataacaagcgcctgcgcctgacagcgagtggggattaaattcaaaatgttttgttttgatttgatcgccgctggtgaatggaactgaaatgtgctgtcaattctcagtccagtgcacacgacacgcttgcacgaatgtcgagcaaattatggcatcttcttttgcgaagccgcctcctcgtctgtacactctcttcccctttggagactttacgtatctgcgatgaggtttgttcatcctaagtccttttcggttggagggatttagtgaggattaaaacaaatttatataggagaagatttaaccttctc

SEQ ID NO: 75819 - DNA, 4207 bp, Zea Mays
gaggacagtacgagtagactagcagtagtagctgtctgcccctctctcatctagtatctctctgctccttccattccttgcgactccactgtcctcctccctcccacagatcttggcttccgtctcctacccccagcacaagcacttgcagctcaaagcagccagccagaagcctcggtctcggagtcggagggacgcagccagccggcgccgcgcctggcgggcgggagagtgcgcttcaggcggcttcagtccagtccagtccactcccgccaagacgcaaaagcctgtctgttcctccaccttctggttgctccagaaaacacagcgatgcaccaagacagtttcaggtcggtggtctgcagatccctctcgaagagcctgcccccaaggagcaaagatggcagctgttccgaaacagtccagtgcactgtcccctgtatcgtcacgctgcagccttcggtctgtcggagctgccaaggtcgggatgtacagagcgcgtcgcagagctacagggaggatgaaaggtccatgtcgttccacggggactacctgatggtgccctcgctgtccaagcattttgctgaggacctcctaataagaggcgccatggatctccaggagtcccttgcgatgcttgagaggttccaagctgcgtcactgagcatgagactactgtccagcaagaagataagaccggaaactggtgaacagtctcctgcgatagacaccatagtccgtgaagttctcctgaggccatcgaacgccaagcaggtgcaggtcaatggattaaaacaacagctaagcgattctaccagtgagttgaaaaatattgtcaaggatagtttttacaagaagaaccactctctggtgtccaacaatgagcaggcctctttgactttgagccagtcggcacggcacttgccgaacagttacctgatgcccaagcctgctgctcatcagaagaaatctgtgcccatgtcgtcgccatcttgtgcagcagtgcgacctgaaaagtctaagacgccaagcttggtagccaagctcatgggtctcgatggattgccctcgccgaaagctaaatccaccatgaaagacgacaagaacaaggcagcgagttcaccaagagcgctgttcgataccgagaggcccaggtcgaagaggctgctgccgcagttactcaaacaggaggctggttttggctcagagatgcctcggtcagaaaagctgccaccattgcaatctaacgttcaaaagaactctaccagctcaaagaagggcatcgtcggcacttcgtatactaccggagcggttcatgatactgcatcgatcaaaccgatccaaagagcggcatacgttgagcaggctcgaccgaaatccccgaaagaaatcaagatcgtctcttctcctacaggcaggaagcaacgggcgaatgagatcaacaggaggagcacggagaaacaaaggccttattcaggtgaaagaagcagagaaaggatgaatgctgcgaagtcaagagctggatcagcgtctcgtagcgcggaagcagtagcgaaacagtgtgataggagatcagttgcgtcaaggagcaatcgtacttgtgactcggtggtgaagcccaactcaccgaaaccacagagcaattccagagcgaggagagtgcccaggagaaatgttaagagctccaccgttgatgaattagtggcttacgagatagaaaaagagattctccatgccctggaccaaactgacggtccatccacagaacatagcgcgacaccgagcgacgaagcctgcccgagcgctgactgggacgaagcatcttctgtgggcgacatcctgaaagatcctggcgaggccagcgaaacatcgcagtctgctgtccgtgactgtagaatcagctcagctggtgcggatgcagatgctattcactcaccgacgcacagagccccgacaagggaagctgaaataaaagacgagatcggcttgcttctcctcagtgacaaaccgttccttagcagagcagctgagctcataggcgttgatgtgtatggggatctgagtaaccagtgtgacaggatctccaaggctagaacgagaaaccgtcggctctatctggacgcggcaggagagcaactggagctgaaacaccgccagcagaacatcctgtggccttacgctaggccgctgggccggagatggaggtcatcgtcatcggcgtacctgtcgctggaggagctgctgagagatgtcagcgacggggttaggaatctggaggatgggtattgcagtggagatgcccgccgtggcagcaaggatagcctggacgtgaagctggagagggatctcacctcctccgcagatgcgttgatcagtagtgtttgggacatgggctggcaaggtttggcttgtgtggaggcggaatgcttcgtcagagatgccggggaggagatcctgtccttgctcgtcgaggaagctgctctagacatgtgtctgcactgccatagtgccatgtgatgatatgaacatacagcgataagttgctgccatcgggacgatctataacaacttgcagcttcagttcttgtagttgtttttctttttttaggtttgaagtagatttcgtccgtgtaatcaccaggattgtagtagtataggaaccagtgaagtgatgtgttcatgagttcatcaagacatgactgaacaaaacaaggccatgaaaggaaggaaaaaaaaacagaaaaggtcacatacctgtcgtgttttgttgagtggcgacttgcgagcaccaacaaagccgagtcacgggccgagcccacgggagattcctattggcatctccatccgtcctcgtcggcatcccagccacacacacacacacaccgcacctagccacctaccctgctgtcccccgtgccgtcgccgatggagtccttgggcgtgctgctgctccaccccttcaacgcgtacctggagcaggagctggaccgccgcttccgcctgtaccgcttctgggagacgccccgcgaggagttcctccgcgcgcacgcgggcgccgtgcgcgccgtcgtcggcaacgccagctacggcgccgacgccgcgctcatcgacgcgctcccggcgctcgagatcgttgcctccttctccgtcggcatcgaccgcgtcgacctcgccaagtgccgcgaccgcgggatccgggtcaccaacacccccgacgtcctcaccgacgacgtcgccgacctcgccgtagggctcgccatcgccgtgctccgcaggatcccgcaggccgaccgatacgtccgcgcggggctctggaagtccaggggagactacaccctaaccacgcggttcagcggcaagcgggtgggcatcatcgggctgggcaggatagggcaggcggtggcgaagcgagtggaggcgttcgactgcccggtgagctaccaccagcggacggagcagcgggcgacgtacccgagctacacctactacccgtcggtggtggagctggcggcgaacagcgacgtgctggtggtggcgtgcccgctgaacgcgcagacgcgccacatcgtgagccgcgaggtgatggaagcgctaggccccagcggcgtgctgatcaacgtcggccgtgggccacacgtggacgagcgcgagatggtggcggcgctggcggacgggcggctcggcggcgccgggctggacgtgttcgaggacgagcctaacgtgcccgaggcgcttctggggatggacaacgtcgtgctgctgccccacgtcggcagcggcaccaacgagacgcgcaaggccatggccgacctcgtgctcgggaacctggaggcgcacgtgctcagcaagccgctgctgactccggttgtctgacgtttccttgtttctattacgaaataacaagcgcctgcgcctgacagcgagtggggattaaattcaaaatgttttgttttgatttgatcgccgctggtgaatggaactgaaatgtgctgtcaattctcagtccagtgcacacgacacgcttgcacgaatgtcgagcaaattatggcatcttcttttgcgaagccgcctcctcgtctgtacactctcttcccctttggagactttacgtatctgcgatgaggtttgttcatcctaagtccttttcggttggagggatttagtgaggattaaaacaaatttatataggagaagatttaaccttctc

SEQ ID NO: 75820 - DNA, 2789 bp, Zea Mays
gaggacagtacgagtagactagcagtagtagctgtctgcccctctctcatctagtatctctctgctccttccattccttgcgactccactgtcctcctccctcccacagatcttggcttccgtctcctacccccagcacaagcacttgcagctcaaagcagccagccagaagcctcggtctcggagtcggagggacgcagccagccggcgccgcgcctggcgggcgggagagtgcgcttcaggcggcttcagtccagtccagtccactcccgccaagacgcaaaaggcttacgagatagaaaaagagattctccatgccctggaccaaactgacggtccatccacagaacatagcgcgacaccgagcgacgaagcctgcccgagcgctgactgggacgaagcatcttctgtgggcgacatcctgaaagatcctggcgaggccagcgaaacatcgcagtctgctgtccgtgactgtagaatcagctcagctggtgcggatgcagatgctattcactcaccgacgcacagagccccgacaagggaagctgaaataaaagacgagatcggcttgcttctcctcagtgacaaaccgttccttagcagagcagctgagctcataggcgttgatgtgtatggggatctgagtaaccagtgtgacaggatctccaaggctagaacgagaaaccgtcggctctatctggacgcggcaggagagcaactggagctgaaacaccgccagcagaacatcctgtggccttacgctaggccgctgggccggagatggaggtcatcgtcatcggcgtacctgtcgctggaggagctgctgagagatgtcagcgacggggttaggaatctggaggatgggtattgcagtggagatgcccgccgtggcagcaaggatagcctggacgtgaagctggagagggatctcacctcctccgcagatgcgttgatcagtagtgtttgggacatgggctggcaaggtttggcttgtgtggaggcggaatgcttcgtcagagatgccggggaggagatcctgtccttgctcgtcgaggaagctgctctagacatgtgtctgcactgccatagtgccatgtgatgatatgaacatacagcgataagttgctgccatcgggacgatctataacaacttgcagcttcagttcttgtagttgtttttctttttttaggtttgaagtagatttcgtccgtgtaatcaccaggattgtagtagtataggaaccagtgaagtgatgtgttcatgagttcatcaagacatgactgaacaaaacaaggccatgaaaggaaggaaaaaaaaacagaaaaggtcacatacctgtcgtgttttgttgagtggcgacttgcgagcaccaacaaagccgagtcacgggccgagcccacgggagattcctattggcatctccatccgtcctcgtcggcatcccagccacacacacacacacaccgcacctagccacctaccctgctgtcccccgtgccgtcgccgatggagtccttgggcgtgctgctgctccaccccttcaacgcgtacctggagcaggagctggaccgccgcttccgcctgtaccgcttctgggagacgccccgcgaggagttcctccgcgcgcacgcgggcgccgtgcgcgccgtcgtcggcaacgccagctacggcgccgacgccgcgctcatcgacgcgctcccggcgctcgagatcgttgcctccttctccgtcggcatcgaccgcgtcgacctcgccaagtgccgcgaccgcgggatccgggtcaccaacacccccgacgtcctcaccgacgacgtcgccgacctcgccgtagggctcgccatcgccgtgctccgcaggatcccgcaggccgaccgatacgtccgcgcggggctctggaagtccaggggagactacaccctaaccacgcggttcagcggcaagcgggtgggcatcatcgggctgggcaggatagggcaggcggtggcgaagcgagtggaggcgttcgactgcccggtgagctaccaccagcggacggagcagcgggcgacgtacccgagctacacctactacccgtcggtggtggagctggcggcgaacagcgacgtgctggtggtggcgtgcccgctgaacgcgcagacgcgccacatcgtgagccgcgaggtgatggaagcgctaggccccagcggcgtgctgatcaacgtcggccgtgggccacacgtggacgagcgcgagatggtggcggcgctggcggacgggcggctcggcggcgccgggctggacgtgttcgaggacgagcctaacgtgcccgaggcgcttctggggatggacaacgtcgtgctgctgccccacgtcggcagcggcaccaacgagacgcgcaaggccatggccgacctcgtgctcgggaacctggaggcgcacgtgctcagcaagccgctgctgactccggttgtctgacgtttccttgtttctattacgaaataacaagcgcctgcgcctgacagcgagtggggattaaattcaaaatgttttgttttgatttgatcgccgctggtgaatggaactgaaatgtgctgtcaattctcagtccagtgcacacgacacgcttgcacgaatgtcgagcaaattatggcatcttcttttgcgaagccgcctcctcgtctgtacactctcttcccctttggagactttacgtatctgcgatgaggtttgttcatcctaagtccttttcggttggagggatttagtgaggattaaaacaaatttatataggagaagatttaaccttctc

SEQ ID NO: 75821 - DNA, 4090 bp, Zea Mays
ctgtggctggcgccagcgcccagagatcttggcttccgtctcctacccccagcacaagcacttgcagctcaaagcagccagccagaagcctcggtctcggagtcggagggacgcagccagccggcgccgcgcctggcgggcgggagagtgcgcttcaggcggcttcagtccagtccagtccactcccgccaagacgcaaaagaaaacacagcgatgcaccaagacagtttcaggtcggtggtctgcagatccctctcgaagagcctgcccccaaggagcaaagatggcagctgttccgaaacagtccagtgcactgtcccctgtatcgtcacgctgcagccttcggtctgtcggagctgccaaggtcgggatgtacagagcgcgtcgcagagctacagggaggatgaaaggtccatgtcgttccacggggactacctgatggtgccctcgctgtccaagcattttgctgaggacctcctaataagaggcgccatggatctccaggagtcccttgcgatgcttgagaggttccaagctgcgtcactgagcatgagactactgtccagcaagaagataagaccggaaactggtgaacagtctcctgcgatagacaccatagtccgtgaagttctcctgaggccatcgaacgccaagcaggtgcaggtcaatggattaaaacaacagctaagcgattctaccagtgagttgaaaaatattgtcaaggatagtttttacaagaagaaccactctctggtgtccaacaatgagcaggcctctttgactttgagccagtcggcacggcacttgccgaacagttacctgatgcccaagcctgctgctcatcagaagaaatctgtgcccatgtcgtcgccatcttgtgcagcagtgcgacctgaaaagtctaagacgccaagcttggtagccaagctcatgggtctcgatggattgccctcgccgaaagctaaatccaccatgaaagacgacaagaacaaggcagcgagttcaccaagagcgctgttcgataccgagaggcccaggtcgaagaggctgctgccgcagttactcaaacaggaggctggttttggctcagagatgcctcggtcagaaaagctgccaccattgcaatctaacgttcaaaagaactctaccagctcaaagaagggcatcgtcggcacttcgtatactaccggagcggttcatgatactgcatcgatcaaaccgatccaaagagcggcatacgttgagcaggctcgaccgaaatccccgaaagaaatcaagatcgtctcttctcctacaggcaggaagcaacgggcgaatgagatcaacaggaggagcacggagaaacaaaggccttattcaggtgaaagaagcagagaaaggatgaatgctgcgaagtcaagagctggatcagcgtctcgtagcgcggaagcagtagcgaaacagtgtgataggagatcagttgcgtcaaggagcaatcgtacttgtgactcggtggtgaagcccaactcaccgaaaccacagagcaattccagagcgaggagagtgcccaggagaaatgttaagagctccaccgttgatgaattagtggcttacgagatagaaaaagagattctccatgccctggaccaaactgacggtccatccacagaacatagcgcgacaccgagcgacgaagcctgcccgagcgctgactgggacgaagcatcttctgtgggcgacatcctgaaagatcctggcgaggccagcgaaacatcgcagtctgctgtccgtgactgtagaatcagctcagctggtgcggatgcagatgctattcactcaccgacgcacagagccccgacaagggaagctgaaataaaagacgagatcggcttgcttctcctcagtgacaaaccgttccttagcagagcagctgagctcataggcgttgatgtgtatggggatctgagtaaccagtgtgacaggatctccaaggctagaacgagaaaccgtcggctctatctggacgcggcaggagagcaactggagctgaaacaccgccagcagaacatcctgtggccttacgctaggccgctgggccggagatggaggtcatcgtcatcggcgtacctgtcgctggaggagctgctgagagatgtcagcgacggggttaggaatctggaggatgggtattgcagtggagatgcccgccgtggcagcaaggatagcctggacgtgaagctggagagggatctcacctcctccgcagatgcgttgatcagtagtgtttgggacatgggctggcaaggtttggcttgtgtggaggcggaatgcttcgtcagagatgccggggaggagatcctgtccttgctcgtcgaggaagctgctctagacatgtgtctgcactgccatagtgccatgtgatgatatgaacatacagcgataagttgctgccatcgggacgatctataacaacttgcagcttcagttcttgtagttgtttttctttttttaggtttgaagtagatttcgtccgtgtaatcaccaggattgtagtagtataggaaccagtgaagtgatgtgttcatgagttcatcaagacatgactgaacaaaacaaggccatgaaaggaaggaaaaaaaaacagaaaaggtcacatacctgtcgtgttttgttgagtggcgacttgcgagcaccaacaaagccgagtcacgggccgagcccacgggagattcctattggcatctccatccgtcctcgtcggcatcccagccacacacacacacacaccgcacctagccacctaccctgctgtcccccgtgccgtcgccgatggagtccttgggcgtgctgctgctccaccccttcaacgcgtacctggagcaggagctggaccgccgcttccgcctgtaccgcttctgggagacgccccgcgaggagttcctccgcgcgcacgcgggcgccgtgcgcgccgtcgtcggcaacgccagctacggcgccgacgccgcgctcatcgacgcgctcccggcgctcgagatcgttgcctccttctccgtcggcatcgaccgcgtcgacctcgccaagtgccgcgaccgcgggatccgggtcaccaacacccccgacgtcctcaccgacgacgtcgccgacctcgccgtagggctcgccatcgccgtgctccgcaggatcccgcaggccgaccgatacgtccgcgcggggctctggaagtccaggggagactacaccctaaccacgcggttcagcggcaagcgggtgggcatcatcgggctgggcaggatagggcaggcggtggcgaagcgagtggaggcgttcgactgcccggtgagctaccaccagcggacggagcagcgggcgacgtacccgagctacacctactacccgtcggtggtggagctggcggcgaacagcgacgtgctggtggtggcgtgcccgctgaacgcgcagacgcgccacatcgtgagccgcgaggtgatggaagcgctaggccccagcggcgtgctgatcaacgtcggccgtgggccacacgtggacgagcgcgagatggtggcggcgctggcggacgggcggctcggcggcgccgggctggacgtgttcgaggacgagcctaacgtgcccgaggcgcttctggggatggacaacgtcgtgctgctgccccacgtcggcagcggcaccaacgagacgcgcaaggccatggccgacctcgtgctcgggaacctggaggcgcacgtgctcagcaagccgctgctgactccggttgtctgacgtttccttgtttctattacgaaataacaagcgcctgcgcctgacagcgagtggggattaaattcaaaatgttttgttttgatttgatcgccgctggtgaatggaactgaaatgtgctgtcaattctcagtccagtgcacacgacacgcttgcacgaatgtcgagcaaattatggcatcttcttttgcgaagccgcctcctcgtctgtacactctcttcccctttggagactttacgtatctgcgatgaggtttgttcatcctaagtccttttcggttggagggatttagtgaggattaaaacaaatttatataggagaagatttaaccttctc

SEQ ID NO: 75822 - DNA, 4003 bp, Zea Mays
cccctccttgccatcaaaagctggatcgacacggctgagctttcgcgtccgctgttactgtggctggcgccagcgcccagagcctgtctgttcctccaccttctggttgctccagaaaacacagcgatgcaccaagacagtttcaggtcggtggtctgcagatccctctcgaagagcctgcccccaaggagcaaagatggcagctgttccgaaacagtccagtgcactgtcccctgtatcgtcacgctgcagccttcggtctgtcggagctgccaaggtcgggatgtacagagcgcgtcgcagagctacagggaggatgaaaggtccatgtcgttccacggggactacctgatggtgccctcgctgtccaagcattttgctgaggacctcctaataagaggcgccatggatctccaggagtcccttgcgatgcttgagaggttccaagctgcgtcactgagcatgagactactgtccagcaagaagataagaccggaaactggtgaacagtctcctgcgatagacaccatagtccgtgaagttctcctgaggccatcgaacgccaagcaggtgcaggtcaatggattaaaacaacagctaagcgattctaccagtgagttgaaaaatattgtcaaggatagtttttacaagaagaaccactctctggtgtccaacaatgagcaggcctctttgactttgagccagtcggcacggcacttgccgaacagttacctgatgcccaagcctgctgctcatcagaagaaatctgtgcccatgtcgtcgccatcttgtgcagcagtgcgacctgaaaagtctaagacgccaagcttggtagccaagctcatgggtctcgatggattgccctcgccgaaagctaaatccaccatgaaagacgacaagaacaaggcagcgagttcaccaagagcgctgttcgataccgagaggcccaggtcgaagaggctgctgccgcagttactcaaacaggaggctggttttggctcagagatgcctcggtcagaaaagctgccaccattgcaatctaacgttcaaaagaactctaccagctcaaagaagggcatcgtcggcacttcgtatactaccggagcggttcatgatactgcatcgatcaaaccgatccaaagagcggcatacgttgagcaggctcgaccgaaatccccgaaagaaatcaagatcgtctcttctcctacaggcaggaagcaacgggcgaatgagatcaacaggaggagcacggagaaacaaaggccttattcaggtgaaagaagcagagaaaggatgaatgctgcgaagtcaagagctggatcagcgtctcgtagcgcggaagcagtagcgaaacagtgtgataggagatcagttgcgtcaaggagcaatcgtacttgtgactcggtggtgaagcccaactcaccgaaaccacagagcaattccagagcgaggagagtgcccaggagaaatgttaagagctccaccgttgatgaattagtggcttacgagatagaaaaagagattctccatgccctggaccaaactgacggtccatccacagaacatagcgcgacaccgagcgacgaagcctgcccgagcgctgactgggacgaagcatcttctgtgggcgacatcctgaaagatcctggcgaggccagcgaaacatcgcagtctgctgtccgtgactgtagaatcagctcagctggtgcggatgcagatgctattcactcaccgacgcacagagccccgacaagggaagctgaaataaaagacgagatcggcttgcttctcctcagtgacaaaccgttccttagcagagcagctgagctcataggcgttgatgtgtatggggatctgagtaaccagtgtgacaggatctccaaggctagaacgagaaaccgtcggctctatctggacgcggcaggagagcaactggagctgaaacaccgccagcagaacatcctgtggccttacgctaggccgctgggccggagatggaggtcatcgtcatcggcgtacctgtcgctggaggagctgctgagagatgtcagcgacggggttaggaatctggaggatgggtattgcagtggagatgcccgccgtggcagcaaggatagcctggacgtgaagctggagagggatctcacctcctccgcagatgcgttgatcagtagtgtttgggacatgggctggcaaggtttggcttgtgtggaggcggaatgcttcgtcagagatgccggggaggagatcctgtccttgctcgtcgaggaagctgctctagacatgtgtctgcactgccatagtgccatgtgatgatatgaacatacagcgataagttgctgccatcgggacgatctataacaacttgcagcttcagttcttgtagttgtttttctttttttaggtttgaagtagatttcgtccgtgtaatcaccaggattgtagtagtataggaaccagtgaagtgatgtgttcatgagttcatcaagacatgactgaacaaaacaaggccatgaaaggaaggaaaaaaaaacagaaaaggtcacatacctgtcgtgttttgttgagtggcgacttgcgagcaccaacaaagccgagtcacgggccgagcccacgggagattcctattggcatctccatccgtcctcgtcggcatcccagccacacacacacacacaccgcacctagccacctaccctgctgtcccccgtgccgtcgccgatggagtccttgggcgtgctgctgctccaccccttcaacgcgtacctggagcaggagctggaccgccgcttccgcctgtaccgcttctgggagacgccccgcgaggagttcctccgcgcgcacgcgggcgccgtgcgcgccgtcgtcggcaacgccagctacggcgccgacgccgcgctcatcgacgcgctcccggcgctcgagatcgttgcctccttctccgtcggcatcgaccgcgtcgacctcgccaagtgccgcgaccgcgggatccgggtcaccaacacccccgacgtcctcaccgacgacgtcgccgacctcgccgtagggctcgccatcgccgtgctccgcaggatcccgcaggccgaccgatacgtccgcgcggggctctggaagtccaggggagactacaccctaaccacgcggttcagcggcaagcgggtgggcatcatcgggctgggcaggatagggcaggcggtggcgaagcgagtggaggcgttcgactgcccggtgagctaccaccagcggacggagcagcgggcgacgtacccgagctacacctactacccgtcggtggtggagctggcggcgaacagcgacgtgctggtggtggcgtgcccgctgaacgcgcagacgcgccacatcgtgagccgcgaggtgatggaagcgctaggccccagcggcgtgctgatcaacgtcggccgtgggccacacgtggacgagcgcgagatggtggcggcgctggcggacgggcggctcggcggcgccgggctggacgtgttcgaggacgagcctaacgtgcccgaggcgcttctggggatggacaacgtcgtgctgctgccccacgtcggcagcggcaccaacgagacgcgcaaggccatggccgacctcgtgctcgggaacctggaggcgcacgtgctcagcaagccgctgctgactccggttgtctgacgtttccttgtttctattacgaaataacaagcgcctgcgcctgacagcgagtggggattaaattcaaaatgttttgttttgatttgatcgccgctggtgaatggaactgaaatgtgctgtcaattctcagtccagtgcacacgacacgcttgcacgaatgtcgagcaaattatggcatcttcttttgcgaagccgcctcctcgtctgtacactctcttcccctttggagactttacgtatctgcgatgaggtttgttcatcctaagtccttttcggttggagggatttagtgaggattaaaacaaatttatataggagaagatttaaccttctc

SEQ ID NO: 75823 - DNA, 5607 bp, Zea Mays
gtatcatcgccaccatgcctggtcaaagtaaatgaactcacaccgatggaggagcccccctccttgccatcaaaagctggatcgacacggctgagctttcgcgtccgctgttactgtggctggcgccagcgcccagagcctgtctgttcctccaccttctggttgctccagaaaacacagcgatgcaccaagacagtttcaggtcggtggtctgcagatccctctcgaagagcctgcccccaaggagcaaagatggcagctgttccgaaacagtccagtgcactgtcccctgtatcgtcacgctgcagccttcggtctgtcggagctgccaaggtcgggatgtacagagcgcgtcgcagagctacagggaggatgaaaggtccatgtcgttccacggggactacctgatggtgccctcgctgtccaagcattttgctgaggacctcctaataagaggcgccatggatctccaggagtcccttgcgatgcttgagaggttccaagctgcgtcactgagcatgagactactgtccagcaagaagataagaccggaaactggtgaacagtctcctgcgatagacaccatagtccgtgaagttctcctgaggccatcgaacgccaagcaggtgcaggtcaatggattaaaacaacagctaagcgattctaccagtgagttgaaaaatattgtcaaggatagtttttacaagaagaaccactctctggtgtccaacaatgagcaggcctctttgactttgagccagtcggcacggcacttgccgaacagttacctgatgcccaagcctgctgctcatcagaagaaatctgtgcccatgtcgtcgccatcttgtgcagcagtgcgacctgaaaagtctaagacgccaagcttggtagccaagctcatgggtctcgatggattgccctcgccgaaagctaaatccaccatgaaagacgacaagaacaaggcagcgagttcaccaagagcgctgttcgataccgagaggcccaggtcgaagaggctgctgccgcagttactcaaacaggaggctggttttggctcagagatgcctcggtcagaaaagctgccaccattgcaatctaacgttcaaaagaactctaccagctcaaagaagggcatcgtcggcacttcgtatactaccggagcggttcatgatactgcatcgatcaaaccgatccaaagagcggcatacgttgagcaggctcgaccgaaatccccgaaagaaatcaagatcgtctcttctcctacaggcaggaagcaacgggcgaatgagatcaacaggaggagcacggagaaacaaaggccttattcaggtgaaagaagcagagaaaggatgaatgctgcgaagtcaagagctggatcagcgtctcgtagcgcggaagcagtagcgaaacagtgtgataggagatcagttgcgtcaaggagcaatcgtacttgtgactcggtggtgaagcccaactcaccgaaaccacagagcaattccagagcgaggagagtgcccaggagaaatgttaagagctccaccgttgatgaattagtggcttacgagatagaaaaagagattctccatgccctggaccaaactgacggtccatccacagaacatagcgcgacaccgagcgacgaagcctgcccgagcgctgactgggacgaagcatcttctgtgggcgacatcctgaaagatcctggcgaggccagcgaaacatcgcagtctgctgtccgtgactgtagaatcagctcagctggtgcggatgcagatgctattcactcaccgacgcacagagccccgacaagggaagctgaaataaaagacgagatcggcttgcttctcctcagtgacaaaccgttccttagcagagcagctgagctcataggcgttgatgtgtatggggatctgagtaaccagtgtgacaggatctccaaggctagaacgagaaaccgtcggctctatctggacgcggcaggagagcaactggagctgaaacaccgccagcagaacatcctgtggccttacgctaggccgctgggccggagatggaggtcatcgtcatcggcgtacctgtcgctggaggagctgctgagagatgtcagcgacggggttaggaatctggaggatgggtattgcagtggagatgcccgccgtggcagcaaggatagcctggacgtgaagctggagagggatctcacctcctccgcagatgcgttgatcagtagtgtttgggacatgggctggcaaggtttggcttgtgtggaggcggaatgcttcgtcagagatgccggggaggagatcctgtccttgctcgtcgaggaagctgctctagacatgtgtctgcactgccatagtgccatgtgatgatatgaacatacagcgataagttgctgccatcgggacgatctataacaacttgcagcttcagttcttgtagttgtttttctttttttaggtttgaagtagatttcgtccgtgtaatcaccaggattgtagtagtataggaaccagtgaagtgatgtgttcatgagttcatcaagacatgactgaacaaaacaaggccatgaaaggaaggaaaaaaaaacagaaaaggtcacatacctgtcgtgttttgttgagtggcgacttgcgagcaccaacaaagccgagtcacgggccgagcccacgggagattcctattggcatctccatccgtcctcgtcggcatcccagccacacacacacacacaccgcacctagccacctaccctgctgtcccccgtgccgtcgccgatggagtccttgggcgtgctgctgctccaccccttcaacgcgtacctggagcaggagctggaccgccgcttccgcctgtaccgcttctgggagacgccccgcgaggagttcctccgcgcgcacgcgggcgccgtgcgcgccgtcgtcggcaacgccagctacggcgccgacgccgcgctcatcgacgcgctcccggcgctcgagatcgttgcctccttctccgtcggcatcgaccgcgtcgacctcgccaagtgccgcgaccgcgggatccgggtcaccaacacccccgacgtcctcaccgacgacgtcgccgacctcgccgtagggctcgccatcgccgtgctccgcaggatcccgcaggccgaccgatacgtccgcgcggggctctggaagtccaggggagactacaccctaaccacgcgggtgcgtcggtttcttctatttcttgttcttgttattaatcgttaattataccgaatatcgtctcttccttgctgtaacatacatacataaatacaatggtattgtttgtttagatctgtagtgtcgcttgtttagatctgcattgcttactatgccgaggtagtgatccgattagcgacccccagtcccatcatatgaaacactgaaactgcatttttaggccataccaatctgtcgttgagttgattgccacgcttttactcttcttagatatcatcatatacagaatgcagtaacattaccttcctgcagctgactgactggcaagagagttgctatcctggggcttggcaagataggctcaggcgctcagcgatagcttcttattaagttgttaattataccgaatttcatttcttccttgctctaccatacatacatacaatagtgttgtttgtatagatcaccagtgttgcttgtttagttctgtatcgctttctcacttgaactatgcttatatatgccgaggtagtaatccgattagagaatccctgtcccaccatctgaaactgtatttttaggccataccaatctgtgattgagttgcttggcctgctgttactctttttcgatagcatcattatatatatagagtgcgataagccggtaacagtatcttcctgcagcagctgggtggcaagagagttgtatcctggtaggctcagcggtatcttcttattaatttgttaactataccggatttcatcccttccttgctctaccatacatacacacactagtgttgtttgtttagatcactagtggtgcttgtttagatctgtattgctttctcacttgaactacgccgaggtaataatctgattagcgaatcctggtcccatcatctgaagctgcatttttaggccataccaatgtgtcattgagttgcttggcacgctgtttgttttcagcatgagcatatatagagtgcagtaacgttatcttcctgcagctgagtggcaagagagttggtatcctggggcttggcaggatagggtcagcgatagcgaaaagagccgaggcattcggttgttccataagctacagctcaagatcagagaagcctttcccagactacaaattccacgtgagcgctgtcgacctggcagccaactgcgacgtgctcatcgtgacgtgctcgcttaccgccgagacccaccatgtcgtgagccgcgaggtcatcgacgcgctgggtccagagggcgtgcttgtaaacgttggccgcggagcacacgtggatgaacccgagctcgtcgccgcgctcctcgagggtcgcctgggaggagcggggcttgacgtgtatgagcacgagcccttggctcctgagcagctcctgggcctggacaacgtcgtcttggtgcctcacgtgggcagcgatactgaagaaacgtgcagggcgatggccgacctagtgctagcaaacttggaggcgcacgcgtcggatgagccattgctcactccggtgatctgattattgttatcttttgtttcagcggcaagcgggtgggcatcatcgggctgggcaggatagggcaggcggtggcgaagcgagtggaggcgttcgactgcccggtgagctaccaccagcggacggagcagcgggcgacgtacccgagctacacctactacccgtcggtggtggagctggcggcgaacagcgacgtgctggtggtggcgtgcccgctgaacgcgcagacgcgccacatcgtgagccgcgaggtgatggaagcgctaggccccagcggcgtgctgatcaacgtcggccgtgggccacacgtggacgagcgcgagatggtggcggcgctggcggacgggcggctcggcggcgccgggctggacgtgttcgaggacgagcctaacgtgcccgaggcgcttctggggatggacaacgtcgtgctgctgccccacgtcggcagcggcaccaacgagacgcgcaaggccatggccgacctcgtgctcgggaacctggaggcgcacgtgctcagcaagccgctgctgactccggttgtctgacgtttccttgtttctattacgaaataacaagcgcctgcgcctgacagcgagtggggattaaattcaaaatgttttgttttgatttgatcgccgctggtgaatggaactgaaatgtgctgtcaattctcagtccagtgcacacgacacgcttgcacgaatgtcgagcaaattatggcatcttcttttgcgaagccgcctcctcgtctgtacactctcttcccctttggagactttacgtatctgcgatgaggtttgttcatcctaagtccttttcggttggagggatttagtgaggattaaaacaaatttatataggagaagatttaaccttctc

SEQ ID NO: 75824 - DNA, 5593 bp, Zea Mays
gtcgtctttgccatcaatcgtatcatcgccaccatgcctggtcaaagtaaatgaactcacaccgatggaggagcccccctccttgccatcaaaagctggatcgacacggctgagctttcgcgtccgctgttactgtggctggcgccagcgcccagagaaaacacagcgatgcaccaagacagtttcaggtcggtggtctgcagatccctctcgaagagcctgcccccaaggagcaaagatggcagctgttccgaaacagtccagtgcactgtcccctgtatcgtcacgctgcagccttcggtctgtcggagctgccaaggtcgggatgtacagagcgcgtcgcagagctacagggaggatgaaaggtccatgtcgttccacggggactacctgatggtgccctcgctgtccaagcattttgctgaggacctcctaataagaggcgccatggatctccaggagtcccttgcgatgcttgagaggttccaagctgcgtcactgagcatgagactactgtccagcaagaagataagaccggaaactggtgaacagtctcctgcgatagacaccatagtccgtgaagttctcctgaggccatcgaacgccaagcaggtgcaggtcaatggattaaaacaacagctaagcgattctaccagtgagttgaaaaatattgtcaaggatagtttttacaagaagaaccactctctggtgtccaacaatgagcaggcctctttgactttgagccagtcggcacggcacttgccgaacagttacctgatgcccaagcctgctgctcatcagaagaaatctgtgcccatgtcgtcgccatcttgtgcagcagtgcgacctgaaaagtctaagacgccaagcttggtagccaagctcatgggtctcgatggattgccctcgccgaaagctaaatccaccatgaaagacgacaagaacaaggcagcgagttcaccaagagcgctgttcgataccgagaggcccaggtcgaagaggctgctgccgcagttactcaaacaggaggctggttttggctcagagatgcctcggtcagaaaagctgccaccattgcaatctaacgttcaaaagaactctaccagctcaaagaagggcatcgtcggcacttcgtatactaccggagcggttcatgatactgcatcgatcaaaccgatccaaagagcggcatacgttgagcaggctcgaccgaaatccccgaaagaaatcaagatcgtctcttctcctacaggcaggaagcaacgggcgaatgagatcaacaggaggagcacggagaaacaaaggccttattcaggtgaaagaagcagagaaaggatgaatgctgcgaagtcaagagctggatcagcgtctcgtagcgcggaagcagtagcgaaacagtgtgataggagatcagttgcgtcaaggagcaatcgtacttgtgactcggtggtgaagcccaactcaccgaaaccacagagcaattccagagcgaggagagtgcccaggagaaatgttaagagctccaccgttgatgaattagtggcttacgagatagaaaaagagattctccatgccctggaccaaactgacggtccatccacagaacatagcgcgacaccgagcgacgaagcctgcccgagcgctgactgggacgaagcatcttctgtgggcgacatcctgaaagatcctggcgaggccagcgaaacatcgcagtctgctgtccgtgactgtagaatcagctcagctggtgcggatgcagatgctattcactcaccgacgcacagagccccgacaagggaagctgaaataaaagacgagatcggcttgcttctcctcagtgacaaaccgttccttagcagagcagctgagctcataggcgttgatgtgtatggggatctgagtaaccagtgtgacaggatctccaaggctagaacgagaaaccgtcggctctatctggacgcggcaggagagcaactggagctgaaacaccgccagcagaacatcctgtggccttacgctaggccgctgggccggagatggaggtcatcgtcatcggcgtacctgtcgctggaggagctgctgagagatgtcagcgacggggttaggaatctggaggatgggtattgcagtggagatgcccgccgtggcagcaaggatagcctggacgtgaagctggagagggatctcacctcctccgcagatgcgttgatcagtagtgtttgggacatgggctggcaaggtttggcttgtgtggaggcggaatgcttcgtcagagatgccggggaggagatcctgtccttgctcgtcgaggaagctgctctagacatgtgtctgcactgccatagtgccatgtgatgatatgaacatacagcgataagttgctgccatcgggacgatctataacaacttgcagcttcagttcttgtagttgtttttctttttttaggtttgaagtagatttcgtccgtgtaatcaccaggattgtagtagtataggaaccagtgaagtgatgtgttcatgagttcatcaagacatgactgaacaaaacaaggccatgaaaggaaggaaaaaaaaacagaaaaggtcacatacctgtcgtgttttgttgagtggcgacttgcgagcaccaacaaagccgagtcacgggccgagcccacgggagattcctattggcatctccatccgtcctcgtcggcatcccagccacacacacacacacaccgcacctagccacctaccctgctgtcccccgtgccgtcgccgatggagtccttgggcgtgctgctgctccaccccttcaacgcgtacctggagcaggagctggaccgccgcttccgcctgtaccgcttctgggagacgccccgcgaggagttcctccgcgcgcacgcgggcgccgtgcgcgccgtcgtcggcaacgccagctacggcgccgacgccgcgctcatcgacgcgctcccggcgctcgagatcgttgcctccttctccgtcggcatcgaccgcgtcgacctcgccaagtgccgcgaccgcgggatccgggtcaccaacacccccgacgtcctcaccgacgacgtcgccgacctcgccgtagggctcgccatcgccgtgctccgcaggatcccgcaggccgaccgatacgtccgcgcggggctctggaagtccaggggagactacaccctaaccacgcgggtgcgtcggtttcttctatttcttgttcttgttattaatcgttaattataccgaatatcgtctcttccttgctgtaacatacatacataaatacaatggtattgtttgtttagatctgtagtgtcgcttgtttagatctgcattgcttactatgccgaggtagtgatccgattagcgacccccagtcccatcatatgaaacactgaaactgcatttttaggccataccaatctgtcgttgagttgattgccacgcttttactcttcttagatatcatcatatacagaatgcagtaacattaccttcctgcagctgactgactggcaagagagttgctatcctggggcttggcaagataggctcaggcgctcagcgatagcttcttattaagttgttaattataccgaatttcatttcttccttgctctaccatacatacatacaatagtgttgtttgtatagatcaccagtgttgcttgtttagttctgtatcgctttctcacttgaactatgcttatatatgccgaggtagtaatccgattagagaatccctgtcccaccatctgaaactgtatttttaggccataccaatctgtgattgagttgcttggcctgctgttactctttttcgatagcatcattatatatatagagtgcgataagccggtaacagtatcttcctgcagcagctgggtggcaagagagttgtatcctggtaggctcagcggtatcttcttattaatttgttaactataccggatttcatcccttccttgctctaccatacatacacacactagtgttgtttgtttagatcactagtggtgcttgtttagatctgtattgctttctcacttgaactacgccgaggtaataatctgattagcgaatcctggtcccatcatctgaagctgcatttttaggccataccaatgtgtcattgagttgcttggcacgctgtttgttttcagcatgagcatatatagagtgcagtaacgttatcttcctgcagctgagtggcaagagagttggtatcctggggcttggcaggatagggtcagcgatagcgaaaagagccgaggcattcggttgttccataagctacagctcaagatcagagaagcctttcccagactacaaattccacgtgagcgctgtcgacctggcagccaactgcgacgtgctcatcgtgacgtgctcgcttaccgccgagacccaccatgtcgtgagccgcgaggtcatcgacgcgctgggtccagagggcgtgcttgtaaacgttggccgcggagcacacgtggatgaacccgagctcgtcgccgcgctcctcgagggtcgcctgggaggagcggggcttgacgtgtatgagcacgagcccttggctcctgagcagctcctgggcctggacaacgtcgtcttggtgcctcacgtgggcagcgatactgaagaaacgtgcagggcgatggccgacctagtgctagcaaacttggaggcgcacgcgtcggatgagccattgctcactccggtgatctgattattgttatcttttgtttcagcggcaagcgggtgggcatcatcgggctgggcaggatagggcaggcggtggcgaagcgagtggaggcgttcgactgcccggtgagctaccaccagcggacggagcagcgggcgacgtacccgagctacacctactacccgtcggtggtggagctggcggcgaacagcgacgtgctggtggtggcgtgcccgctgaacgcgcagacgcgccacatcgtgagccgcgaggtgatggaagcgctaggccccagcggcgtgctgatcaacgtcggccgtgggccacacgtggacgagcgcgagatggtggcggcgctggcggacgggcggctcggcggcgccgggctggacgtgttcgaggacgagcctaacgtgcccgaggcgcttctggggatggacaacgtcgtgctgctgccccacgtcggcagcggcaccaacgagacgcgcaaggccatggccgacctcgtgctcgggaacctggaggcgcacgtgctcagcaagccgctgctgactccggttgtctgacgtttccttgtttctattacgaaataacaagcgcctgcgcctgacagcgagtggggattaaattcaaaatgttttgttttgatttgatcgccgctggtgaatggaactgaaatgtgctgtcaattctcagtccagtgcacacgacacgcttgcacgaatgtcgagcaaattatggcatcttcttttgcgaagccgcctcctcgtctgtacactctcttcccctttggagactttacgtatctgcgatgaggtttgttcatcctaagtccttttcggttggagggatttagtgaggattaaaacaaatttatataggagaagatttaaccttctc

SEQ ID NO: 75825 - DNA, 3758 bp, Zea Mays
gaggacagtacgagtagactagcagtagtagctgtctgcccctctctcatctagtatctctctgctccttccattccttgcgactccactgtcctcctccctcccacagatcttggcttccgtctcctacccccagcacaagcacttgcagctcaaagcagccagccagaagcctcggtctcggagtcggagggacgcagccagccggcgccgcgcctggcgggcgggagagtgcgcttcaggcggcttcagtccagtccagtccactcccgccaagacgcaaaagaaaacacagcgatgcaccaagacagtttcaggtcggtggtctgcagatccctctcgaagagcctgcccccaaggagcaaagatggcagctgttccgaaacagtccagtgcactgtcccctgtatcgtcacgctgcagccttcggtctgtcggagctgccaaggtcgggatgtacagagcgcgtcgcagagctacagggaggatgaaaggtccatgtcgttccacggggactacctgatggtgccctcgctgtccaagcattttgctgaggacctcctaataagaggcgccatggatctccaggagtcccttgcgatgcttgagaggttccaagctgcgtcactgagcatgagactactgtccagcaagaagataagaccggaaactggtgaacagtctcctgcgatagacaccatagtccgtgaagttctcctgaggccatcgaacgccaagcaggtgcaggtcaatggattaaaacaacagctaagcgattctaccagtgagttgaaaaatattgtcaaggatagtttttacaagaagaaccactctctggtgtccaacaatgagcaggcctctttgactttgagccagtcggcacggcacttgccgaacagttacctgatgcccaagcctgctgctcatcagaagaaatctgtgcccatgtcgtcgccatcttgtgcagcagtgcgacctgaaaagtctaagacgccaagcttggtagccaagctcatgggtctcgatggattgccctcgccgaaagctaaatccaccatgaaagacgacaagaacaaggcagcgagttcaccaagagcgctgttcgataccgagaggcccaggtcgaagaggctgctgccgcagttactcaaacaggaggctggttttggctcagagatgcctcggtcagaaaagctgccaccattgcaatctaacgttcaaaagaactctaccagctcaaagaagggcatcgtcggcacttcgtatactaccggagcggttcatgatactgcatcgatcaaaccgatccaaagagcggcatacgttgagcaggctcgaccgaaatccccgaaagaaatcaagatcgtctcttctcctacaggcaggaagcaacgggcgaatgagatcaacaggaggagcacggagaaacaaaggccttattcaggtgaaagaagcagagaaaggatgaatgctgcgaagtcaagagctggatcagcgtctcgtagcgcggaagcagtagcgaaacagtgtgataggagatcagttgcgtcaaggagcaatcgtacttgtgactcggtggtgaagcccaactcaccgaaaccacagagcaattccagagcgaggagagtgcccaggagaaatgttaagagctccaccgttgatgaattagtggcttacgagatagaaaaagagattctccatgccctggaccaaactgacggtccatccacagaacatagcgcgacaccgagcgacgaagcctgcccgagcgctgactgggacgaagcatcttctgtgggcgacatcctgaaagatcctggcgaggccagcgaaacatcgcagtctgctgtccgtgactgtagaatcagctcagctggtgcggatgcagatgctattcactcaccgacgcacagagccccgacaagggaagctgaaataaaagacgagatcggcttgcttctcctcagtgacaaaccgttccttagcagagcagctgagctcataggcgttgatgtgtatggggatctgagtaaccagtgtgacaggatctccaaggctagaacgagaaaccgtcggctctatctggacgcggcaggagagcaactggagctgaaacaccgccagcagaacatcctgtggccttacgctaggccgctgggccggagatggaggtcatcgtcatcggcgtacctgtcgctggaggagctgctgagagatgtcagcgacggggttaggaatctggaggatgggtattgcagtggagatgcccgccgtggcagcaaggatagcctggacgtgaagctggagagggatctcacctcctccgcagatgcgttgatcagtagtgtttgggacatgggctggcaaggtttggcttgtgtggaggcggaatgcttcgtcagagatgccggggaggagatcctgtccttgctcgtcgaggaagctgctctagacatgtgtctgcactgccatagtgccatgtgatgatatgaacatacagcgataagttgctgccatcgggacgatctataacaacttgcagcttcagttcttgtagttgtttttctttttttaggtttgaagtagatttcgtccgtgtaatcaccaggattgtagtagtataggaaccagtgaagtgatgtgttcatgagttcatcaagacatgactgaacaaaacaaggccatgaaaggaaggaaaaaaaaacagaaaaggtcacatacctgtcgtgttttgttgagtggcgacttgcgagcaccaacaaagccgagtcacgggccgagcccacgggagattcctattggcatctccatccgtcctcgtcggcatcccagccacacacacacacacaccgcacctagccacctaccctgctgtcccccgtgccgtcgccgatggagtccttgggcgtgctgctgctccaccccttcaacgcgtacctggagcaggagctggaccgccgcttccgcctgtaccgcttctgggagacgccccgcgaggagttcctccgcgcgcacgcgggcgccgtgcgcgccgtcgtcggcaacgccagctacggcgccgacgccgcgctcatcgacgcgctcccggcgctcgagatcgttgcctccttctccgtcggcatcgaccgcgtcgacctcgccaagtgccgcgaccgcgggatccgggtcaccaacacccccgacgtcctcaccgacgacgtcgccgacctcgccgtagggctcgccatcgccgtgctccgcaggatcccgcaggccgaccgatacgtccgcgcggggctctggaagtccaggggagactacaccctaaccacgcgggtgcgtcggtttcttctatttcttgttcttgttattaatcgttaattataccgaatatcgtctcttccttgctgtaacatacatacataaatacaatggtattgtttgtttagatctgtagtgtcgcttgtttagatctgcattgcttactatgccgaggtagtgatccgattagcgacccccagtcccatcatatgaaacactgaaactgcatttttaggccataccaatctgtcgttgagttgattgccacgcttttactcttcttagatatcatcatatacagaatgcagtaacattaccttcctgcagctgactgactggcaagagagttgctatcctggggcttggcaagataggctcaggcgctcagcgatagcttcttattaagttgttaattataccgaatttcatttcttccttgctctaccatacatacatac

SEQ ID NO: 75826 - DNA, 1986 bp, Zea Mays
agccaagagccaggcaagcaaaacaatagggcttcatcccaccgcgcgccaccggaccttgaacggttgaacccccctgcctccccagttccccagccatggcggcggccccctacgaccgggaggacggtctgcagccgtcggcgccgccgcacgcggtggacgcttacgatcccagctacgtgccggactccgtcaagaccttcgtggtgcacctgtaccgccacatccgggacaagaacgtctacgagatccaccagatgtacgagggcggcttccagcgcctctccgaccgcctcttccgcgacgctccctggccctccgcggaggccgtcgcaccctactgcgacggcgatcccgtcttcctcctcctctaccgcgagctctggtaccgccacgcccacgcccgcctctctccgctcactgccgcgcaccgcgccgagtcctggaccaactactgcgacctcttcagagtcgtccttcacggcgtcgtcaacatgcagctgcccaaccagtggctctgggacatggtcgacgagtttgtctaccagttccagagctgctgccaataccgcgccaagctcaagaccaagacggaggacgagctcaaccagctcaagcagttcgacaaggttgcgctggtcgagaagtccatgatcacacagatcctcgagagggagaaggagggcctggagcagttcaccgccaccgatggctacgactacgagggcgggagcaacgtgctcaaggtgctcggctactacagcatgattggcctcctcaggatacactgcctccttggggattaccacactggcctcaagtgcctcggtcccatcgacctcaaccagcaaggggtctacagcattgtcatcgggagccacatttccaccatctatcactatggcttcgcaaaccttatgatgcgcaggtatgttgaggccactcgtgaattcaacaagattcttctgtatatcctcaagtacaagcagtatcatcagaagtcccctcagtatgatcagatactgaagaaaaatgagcagatgtatgcactgttggtgatttgcctatctttgtgcccacagaacaagctcattgatgaaaatgttagcacccagctgaaagaaaagtataacgacaagatgacaaagatgcagaggtatgatgatgaagcatacgctgcttatgatgagctattttcgtatgcttgccccaagttcattacaccatcacctccagtgctggaccagccgctaacaaactataaccaggatgcataccgtctacagttgaagctgtttctttatgaagtaaagcagcagcagttgctttctgggatccggagttatctgaagctatattcaacaataaccattagcaaacttgcccaatatatggaagtggatgaagcaacgctaaggtcaatcttgatgacatacaagcacaaaatgcatgcggttgacagtgacggaaagatggtatcgagtgcagactttgacttttacattgttgaggatgttattcatgtcgtggagtccaaacctactaagcgtcatggcgattactttttgagacaaattttgaagttcgaggaaatgatcggtggactggataaagtacagcttgactgaacctggtagcaaatatggagagaaatgccactgctttctttttgctaatataggaatagatgtttatgatggatgtcattagcaagttatgtttgtgccttctgtagcccatgcaaaaacccgtcattttttctctcttttcactggattcgactttgaagcccgttgaggcaattagcagagtcgtgatgttaattttggtcgcccagttgcttgaatagtgatctcatatcctatctgggagtggcatgcaaattgagttgtgccagcaaccggcatgtcctagctaaagaggatcggtgctaaagggaacaaatttgtaccgatgagaatttagatgagtcgctcatcagca

SEQ ID NO: 75827 - DNA, 1476 bp, Zea Mays
cgcacacgttccagagctgctgccaataccgcgccaagctcaagaccaagacggaggacgagctcaaccagctcaagcagttcgacaaggcgtggaacgtgtacggggtcctcaactacctgcaggcgctggtcgagaagtccatgatcacacagatcctcgagagggagaaggagggcctggagcagttcaccgccaccgatggctacgactacgagggcgggagcaacgtgctcaaggtgctcggctactacagcatgattggcctcctcaggatacactgcctccttggggattaccacactggcctcaagtgcctcggtcccatcgacctcaaccagcaaggggtctacagcattgtcatcgggagccacatttccaccatctatcactatggcttcgcaaaccttatgatgcgcaggtatgttgaggccactcgtgaattcaacaagattcttctgtatatcctcaagtacaagcagtatcatcagaagtcccctcagtatgatcagatactgaagaaaaatgagcagatgtatgcactgttggtgatttgcctatctttgtgcccacagaacaagctcattgatgaaaatgttagcacccagctgaaagaaaagtataacgacaagatgacaaagatgcagaggtatgatgatgaagcatacgctgcttatgatgagctattttcgtatgcttgccccaagttcattacaccatcacctccagtgctggaccagccgctaacaaactataaccaggatgcataccgtctacagttgaagctgtttctttatgaagtaaagcagcagcagttgctttctgggatccggagttatctgaagctatattcaacaataaccattagcaaacttgcccaatatatggaagtggatgaagcaacgctaaggtcaatcttgatgacatacaagcacaaaatgcatgcggttgacagtgacggaaagatggtatcgagtgcagactttgacttttacattgttgaggatgttattcatgtcgtggagtccaaacctactaagcgtcatggcgattactttttgagacaaattttgaagttcgaggaaatgatcggtggactggataaagtacagcttgactgaacctggtagcaaatatggagagaaatgccactgctttctttttgctaatataggaatagatgtttatgatggatgtcattagcaagttatgtttgtgccttctgtagcccatgcaaaaacccgtcattttttctctcttttcactggattcgactttgaagcccgttgaggcaattagcagagtcgtgatgttaattttggtcgcccagttgcttgaatagtgatctcatatcctatctgggagtggcatgcaaattgagttgtgccagcaaccggcatgtcctagctaaagaggatcggtgctaaagggaacaaatttgtaccgatgagaatttagatgagtcgctcatcagca

SEQ ID NO: 75828 - DNA, 384 bp, Zea Mays
cgccatcgtcccactcgctctcgtcgctgtgaagactattcagcatcgcttggtctcgatggtctgttggtctgcatgggtggtggtttggttaagagtggagttcgatagaagcaggaaatgaagtttgtgtgaggctcgtctggtgctcgacgaaacacctcatccacgaaagcatcatcgttttcgggaactttcgcattgattggtacgttgattgatcacatgatgcggaagacgatccaagtcgaccacaagatgttgtaaagcatgagccactcgcgaggtgatgctgatggacgaacctgaagatggataactgaacgagtaccaaggcaaaggatggtcatcaagtgatcgtcgtctaacaacactaacctagtg

SEQ ID NO: 75829 - DNA, 3291 bp, Zea Mays
cccggttggtgatcgaggctgtcaccatggaagcgaagcaggctgaagcacgctgggagaagatgatgttggccatcgagaagctgacaggaaaggttgatgccatggaggaagagaggacgctgtttcgcaagcaaatggaggagaccgggaaggctgtttctcttcttcgggtggaagccatggcaagggatatggatcgttatgggaatgaagaagcaggagaaagagacagcagaaattctcagaacagaggagaaagaatgtacagaggtagagaggagagttctgggcaactggacagagatggggaacagttgcaacagcatataccaaggatgccctttccaaagtttggaggaacaaatccagccagttggattatacaatgtgaagattacttcaacctctaccgggtccctgattttctgaagtccactgtggcgtctctcaactttgaaggttgaagcaagggttgggtgattggaggaatttgtctaggctggtattagacgaatttggagtggaagaatatgtgaaggagtttgaggaagcaagatatgctactgctgttcataatcctatgatggatgaaacattttatgtcagtcagtttgtcaaaggactgaagaatgaaattcagtatccagttatgtcccagcttcctgctactgttcacaaggcacaactattggctcaagttcaacaggatattattgataagggaggaatgaagttttacccaagcagcctgttcttggtagattgggaggaggaaatagagcagatggtaaaggtgttgagatgggaggatggagtaaggagagacaactaaaggagtatagaagagtgaatggtctatgcttcacttgtggagagaaatttgaacctggtcatcaagcaaggtgccagaaagggaatgcagtccagttacatgttctagttcctgaggatatggagaaggttttaactcctgaagtattggagcaaatagagcaagaggagaaacaggaagaagaggaactgaagctgtctctgaatgctattaatggggctgatgattctcaatgtatccgacttagagcattgattcagcatcagatgttattaatgttggttgattctggaagttctaccagtttcattagcaagcagatggtggaaaagttaaagttggaggtggaagaatgtgacccagtgaaggtcagggtggctagtggggatattatggtcagcactcagagagtaagggaagtaaaatggtggactgggaggggcacacctttgttttccctatgagagtgttggacattggggtatatgattccattttgggatttgactggttgagggcccatagtcctatgaactgtgactgggataacaagaccttggagttttaccatcagggacagaaagtccaaatacaaggagactgtgctctgttacagaagtttctcaagtgcatgctgttcaggtgcagaaatggttgaaagggaatgaggtctgggcttttgtgttgctggaacaggtggtaccaaagaaagaagaggtgaaggggcagttagcagcactactcacagaatttcaggatttattcgctcagcctgcagccttacctcccaaaagggtgtttgaccactatataccattgctgccagggtcggttccagtgaatgccagaccatatagatactctccactacacaaagatgagatagagagacaagtggcagaattgctcaaagcaggcttgattgttcctagtgtaagctcttttgcttctccggtattactggtacaaaagaaagatggaacatggaggttttgcatagattatagaaagctcaatgatatgacagtgaagaataggtttccaatgcctttggtggatgagattttagatgagttggcaggcacccaatatttttccagtttggatatgacagctgggtaccatcagattagaatgggcgaagaagatgagcacaagactgcttttaaaaccccatcatgggcattatcaattcagagtaatgccatttgggttgaccaatgctcctgccacttttcagtgtgctatgaatagtattttggaacccttcctcaggaagtttgtgcttgtttttattgatgatattctcatttacagcccaacattgcaagatcatgttcaacatttgaagcaagttttcactgtgttaaggcatcaccagttttatctcaaaaggaagaaatgtgtgtttgctcaggcggaattgcagtatttgggccatattatttctaaggaaggggttgctactgatccatccaagactgaggccatggtcaggtggccagtgcctacttctgtcactgagttaagaggttttctcggtttgactgggtattacaggaagtttgtcaggcattatggtactctggcaaagcccttgacaatattacttcaaggcaagaaggcatgggtgtggacacttgaagctcagaaggcttttgaacatcttaagaaggccatgactcaaacacctgttctggctttaccaaggtttgagataccttttgtggttgagactgatgcttgtgatgaaggcataggggctgttcttatgcaggagcacaaaccattggctttcttgagtaaggccctgggtatgaagaacaagcaactatccatttatgagaaggaatttctggccttaatcatggcagttgacaggtggagaccttatttgcaaaggtcctctttcactattatgacagaccatcagtctctgtctttcttgggagaacagcagcttcagtctgaattgcaaagaaaagctatggctaagcttatgggtctccagttcaagatagtgtacaagaagggaaaagagaatgtggtggcagatgctttgtctagggtgggggcagccatgattttagcactggtttcggaggtccaaccggtttggcttcaggaaattttgaactcttatgccacagatttgcaggcccagcaacttttacagaaattggtaatacagagtcctgatgaagatggctattttcttcagcagggagtgatcagaaaggatcagcaaatttgggtaggggagaattctgccctcagaaccaaaattattgcagctttgcatgattcatcattgggtggtcattctggaatcactgctacttaccacagaattaaaaagttgttctgttggtcaggcctgaaaactgatgtggaattatttgtgaaacaatgtgcggtttgtcagcaggccaaaagtcccaagcagtatccttctg

SEQ ID NO: 75830 - DNA, 682 bp, Zea Mays
gggaaagccatgcagatttaacatatagacaaggtgttatgggccttagcccattagctatgtcattatggctaggttagctgcggccactgttcacgtgcggttactgtagcgcgtgaacagtgccggacagatagggtttgttatgttgcttagctattaagttagggttacctatctatataaggaggggcagggtgttagtagagggaggaagaagaatagatctggtttactcctagggcctcctacgggagggctgagtaccgggactatcttgcgagtgcatcgcagttcacaacaaattggtaccggagccactacgcgcgcatcgccaccatggccggcgcgcacgacgatcttgtgacctactccgccaagatggacctcatcctcgagcaacttgccgccatcaatgcccgtttggattcccacgacgctcgtctggccaagctagagcaggcgtgggtcagcccctctgcttctaccgcgggctgcctgggcgcgagcgagggcggcctgggcacgggaggaggcggccgagtcgaggacgatggggtcaatgggctgcaacccaacacacccagggaggtggaggcggcgttctacgttgaggtggctgtgccactgctgcagcccgcctccgtgctcatggaggtccaggcgtggcccgactatggct

SEQ ID NO: 75831 - DNA, 959 bp, Zea Mays
ctcctgtctggccacgacaaccccgctgcatcaccatcattcataggctgccttcctgcctgctgatctcgcacctcaaacccacacacagcagcataggttgagatagatggccagtctgtggaagaccaaggttctgcctggcctcaacaagatcttcgacaaggatggcaagaaggctgcagctgcaggcttcttcaagtccttcaacaaggaggagattggcaaggagattgaggagaagaaggcagaactggagcccaaggttgcggaggcttatgaagcatctcctcctgaggtcaaggctctgttcaaggataagaagccagtcaagatcagcaagaagaactcgactgcagttaccaagttcctcgatgagctggctaagattgacttccctggagccaaggtggtgagcgaggcggtggccaagtccggcgcctcgcccctgtctccggcgatcaccttcatcttggacaaggtcgcaccgtacatccccaaggaggagcccaaggcggaggacgcggtggctgaggccacttcccgggaagtcgccgtggaggtggaggatgccgagccggctatagctgatgcagcggccgagacaccatcggaggcgaagaagggagaggaggaaaagccggctgccgaggaggcggcgccaccggcagcggctgctactgaggagaagtaatactccgatccacagccatgcctctccctacgtagctgcagcagagtgaaaagtgattcagtcagtcagacatacacacttgcattggcacgcattattcatggacatgtacgttgctgcgccgtgtgtgcgtgtgcgtgtgcgtgtgtgtgggggttctttgttttttattttggggcgattgttacaaatgtgtaattatttatatcgatatgtttgtttcattgatggaccgcatttaataagacaattctttcttgtgtat

SEQ ID NO: 75832 - DNA, 2075 bp, Zea Mays
gtcgggaaggagcccaagccttccgcttcctcaccccgctagtcccataccctagccagggggggatcgcacctcttccgacgatgtcgacccacgccgcctcccgccgctcctcctcctcgtccgcggtcgccaagcgccccgcgatagcggagggagctaccaaggcggcgggaccgggccccaccgccgcgcaggcgaagaagcgcaccgcgctcgtcaacatcaccaacgtcgccgctccgggggcgagggtcgccgccgttgggaaggtcgcgccaccggtcaccggcgcgaagttgaatccagctacctcaggtgcacccttaaagaagccatctttggcaaatgctcgcaccatccggggttctgctgcgaagtcggcttccatcaagccagctccaccagtatcacgccatgacagcagctcagagcagaagcataatgttcttgtgcctaccactgtccatgtgccaagtcgtgctcctgccttggtaccctacagcagtttcgtgtctcctggacgttcaagagattcagtttctactgatgagacgatgtcgacttgtgactccatgaaaagcccggacttcgagtacatagacaatgggggttgctcgatgctggcttcgttgcagcgacgggcggatgaacatctgcgtacatcagaggacagagacgttgaagaaaataagtggaagaaaaatggccctgccccaatggaaatcgacagcatctgtgaagttgacagtaacctcgaggatccacagttgtgcgccgctctggcttctgacatctacatgcatctgcgagaagctgagatgaagaaaagaccatcgactgatttcatgaagacgattcaaaaggatgtcaaccctagcatgagggcaattttgatagactggctcgtggaagttgctgaagaatatcgtcttgctcctgataccttgtacctgacagtcaactacatcgaccgttatctttctggcaacgagatcaatcgccaaaggctgcaattacttggtgttgcttgcatgcttatagcggcaaaatacgaggagatatgtgcaccccaggttgaagaattctgctacataacagacaatacatacttcagagacgagaaatggaagcttctgtgctgaactacttgaagtttgaaatgacagcgcctacggcaaagtgtttcttgaggagatttgctcgttctgcacaggcgtgtgatgaggatcctgctctgcatctggagttcctggccaattacatcgctgagctatccctgctggagtacagtcttctgtcttaccctccatcactaatcgctgcctcagctattttcttggcgagatttgtactccagccaacgaagtatccttggaactccacgcttgctcactacacgcagtacaagccgtccgaattgagcgagtgtgtaaagacactgcaccgcctttccagtgttggtcctgggagcaacctcccagcaatcagagaaaagtacagccagcacaaatacaaatttgtcgcgaagaagcagtgcccgccacaaatccctgccgaattcttcagggatgcggcatgctagacaatagaaagaagcccagcggttgcttacttgattgattcttctccctgatgtggccagttcctgtttgtggtcatgtatgttacaaatccagagagttcaatagcagcactccacggcatgcatatgtatctggaaccatgtttagctactacgctgatggaatctgcaagtcaagtgctgtgccttgagatagatatatgtaacgaacagctagttcgaccttggtacagaaaagcattcttccagcgccctgtacgtatatgcagctgggtctgatctgttgtatgcctgaactgcacaacaacagatgaagaaccaaatcatgatgactaaccaatttaatttaatttattagctgtttctgacctagctaatctgcgctttggagttggaaacacacagcatcatgctggctgctgactctataatagttttgttcttttttgttggtatatgcctgttcgtttcatctcagtatggctgtcta

SEQ ID NO: 75833 - DNA, 2239 bp, Zea Mays
gcatgaactgcctgtctcaacggcctactcaccacactggtgggcggcggcggcacagcacaaacggcaaacgattcgaaagttgaggggtcctttcctaaaaatccactccctctcttctcttgtcgccctctttttcttgtgctctgctcgtctggtcgggaaggagcccaagccttccgcttcctcaccccgctagtcccataccctagccagggggggatcgcacctcttccgacgatgtcgacccacgccgcctcccgccgctcctcctcctcgtccgcggtcgccaagcgccccgcgatagcggagggagctaccaaggcggcgggaccgggccccaccgccgcgcaggcgaagaagcgcaccgcgctcgtcaacatcaccaacgtcgccgctccgggggcgagggtcgccgccgttgggaaggtcgcgccaccggtcaccggcgcgaagttgaatccagctacctcaggtgcacccttaaagaagccatctttggcaaatgctcgcaccatccggggttctgctgcgaagtcggcttccatcaagccagctccaccagtatcacgccatgacagcagctcagagcagaagcataatgttcttgtgcctaccactgtccatgtgccaagtcgtgctcctgccttggtaccctacagcagtttcgtgtctcctggacgttcaagagattcagtttctactgatgagacgatgtcgacttgtgactccatgaaaagcccggacttcgagtacatagacaatgggggttgctcgatgctggcttcgttgcagcgacgggcggatgaacatctgcgtacatcagaggacagagacgttgaagaaaataagtggaagaaaaatggccctgccccaatggaaatcgacagcatctgtgaagttgacagtaacctcgaggatccacagttgtgcgccgctctggcttctgacatctacatgcatctgcgagaagctgagatgaagaaaagaccatcgactgatttcatgaagacgattcaaaaggatgtcaaccctagcatgagggcaattttgatagactggctcgtggaagttgctgaagaatatcgtcttgctcctgataccttgtacctgacagtcaactacatcgaccgttatctttctggcaacgagatcaatcgccaaaggctgcaattacttggtgttgcttgcatgcttatagcggcaaaatacgaggagatatgtgcaccccaggttgaagaattctgctacataacagacaatacatacttcagagacgaggttctagaaatggaagcttctgtgctgaactacttgaagtttgaaatgacagcgcctacggcaaagtgtttcttgaggagatttgctcgttctgcacaggcgtgtgatgaggatcctgctctgcatctggagttcctggccaattacatcgctgagctatccctgctggagtacagtcttctgtcttaccctccatcactaatcgctgcctcagctattttcttggcgagatttgtactccagccaacgaagtatccttggaactccacgcttgctcactacacgcagtacaagccgtccgaattgagcgagtgtgtaaagacactgcaccgcctttccagtgttggtcctgggagcaacctcccagcaatcagagaaaagtacagccagcacaaatacaaatttgtcgcgaagaagcagtgcccgccacaaatccctgccgaattcttcagggatgcggcatgctagacaatagaaagaagcccagcggttgcttacttgattgattcttctccctgatgtggccagttcctgtttgtggtcatgtatgttacaaatccagagagttcaatagcagcactccacggcatgcatatgtatctggaaccatgtttagctactacgctgatggaatctgcaagtcaagtgctgtgccttgagatagatatatgtaacgaacagctagttcgaccttggtacagaaaagcattcttccagcgccctgtacgtatatgcagctgggtctgatctgttgtatgcctgaactgcacaacaacagatgaagaaccaaatcatgatgactaaccaatttaatttaatttattagctgtttctgacctagctaatctgcgctttggagttggaaacacacagcatcatgctggctgctgactctataatagttttgttcttttttgttggtatatgcctgttcgtttcatctcagtatggctgtcta

SEQ ID NO: 75834 - DNA, 1866 bp, Zea Mays
catttatattaagcatttaagtttcaatcttgtattcatgcttatatagtgtaggttgaaacttagacattgcggtagagatagcaacacttagacaaaacctagtttgcacattctagtttgattattggcatatgatttgctctagggatttaattgtgggcctagtttagtaaaagttttagaagtcctaattcaccccccctcttaggcgtcacccgtttcctacactcacaaacaacaataacaacatcaaagcctttagcctggtacaagctagagttgaaatctaacagaaatcataagtcaaggtttatgtacatgaataatagtttttcatgcactcttattcaatgataatttttttgatatatcacatcattttaagtctcttttctatcacttcctatgttatcttcactctttttctgcctattttctattactatcacgctttaggatcccactacacactggtgcttctgaatgtctctattagacatgttcggaccaccttagcggtgctggacaaggttttcttcaattgatgctagtttatcatggatatcattatttcaaactcgatctattcttgcatggccacaaatcaaatgtaacatacacaaaatttggtaatacttatctattgagcatattccggactcaatccattcttacacaccaataaatccaatgcaacatatatatttttattacttatctgttggacatgttatttttatagtccaatattttgcaccatacaccatagctagaggtggtaatggatcatgatacaaatgcttcttcacaatttttagggccctaaattatttctagttcaaaaatcaatagaaatagggcccgatcctaatctgatctgatccttaaattttatagtgtaaaatttagagcatattgtcactcctaaccatagcatgtttaatcgctgttaaaactttcctttttaacttctgaggtacccttttgtcatatagaacgtaagatgttttgcgccaatttatccaccttgctttagtcacatttctatatattaaaccagggaccatagctggcaagttagcgtagccacgtcgtcccaaaatccttcgtcgtccgattgttcactgtagaaaagatcttgccgtccatctaccttcaactgtgccacctaataaaataaaatatactacatccatggacggccggacggcaccgcgacgcttcgcgtgtctttggcagcaacgcgaactttcttctgctagccgcgcgttcacgcaaggggaaagtgagagggagaagtcaggcacgaagacctctccggacgactacgacgaccgtcctaggcgcattcatttccgactctttcttccttcgacttgaactggtacccgttcgaaatcctacttctcaaggaaatctgccaatttgaacacaagtcttttccaatctgagaaggccgctactttgtcaagaagttgaatccagctacctcaggtgcacccttaaagaagccatctttggcaaatgctcgcaccatccggggttctgctgcgaagtcggcttccatcaagccagctccaccagtatcacgccatgacagcagctcagagcagaagcataatgttcttgtgcctaccactgtccatgtgccaagtcgtgctcctgccttggtaccctacagcagtttcgtgtctcctggacgttcaagagattcagtttctactgatgagacgatgtcgacttgtgactccatgaaaagcccggacttcgagtacatagacaatgggggttgctcgatgctggcttcgttgcagcgacgggcggatgaacatctgcgtacatcagaggacagagacgttgaag

SEQ ID NO: 75835 - DNA, 3321 bp, Zea Mays
cagagtttcaactctggaaagaggaaagtgaaggcggccgaaaccgaaaaccaaccacaccacccagtagaagtcgctgatcgtggcggagagggacaaccacacacagttccctcagcctctggcggcagaggctgagccggggaggcgcctccctctcccctccctcgcctcctactctcctgtctttctccaatggcggcgattaccgcgccgccggcccctcatccggcctccacctcatgccgccgccgcgcgccactcatccgcttcgccgcctcctcgtccccgtcctcccgcttccgcccatcctcctcctcctccttcccgggcgcagccggcagcagcagcggcggcgggggcgagatcctccacgtctcgccgcttcccccgcccgccgcgcccccgggggcccccgtctacgtcacgctcccagccgacgtcgtcggcccggggggccgcgtcgcgcgccgccgagccatgggggcctcgctcgccgcccttgccgccgccggcgtcgcgggcatcgccgtcgagctctggtggggcgtcatcgagcgccaccgccccggggagtacgactgggccggctacctcgagctcgccgccatggcccgacgccacggcctccgcgtgcgcgccatcctcgccttccaccagtgcggcgccggaccacatgacccgccctggattcctttgccacaatgggttcttgaggagatggataaggttccggacctgtcatataccaatagataccagaagagaaacagagaatacatatcactgggatgtgatattcttcctgttctgaaaggaagatcacctatgcaagcttactccgacttcatgagaagcttccgcaatactttcgaagattaccttggggccatagtaacagaagttcaagttggaatgggcccaggaggtgagcttaggtatccatcatgcccaactgagaagctaaatcagccaggcagttcgtctgaacttggagagtttcaatgttatgataaggtatggtgagaaataaaattctttctctaaaatctctacaaaatggaatgtttttggtagagtgggactgtgggagacatgtcagtcccaacgttgtttactctacttgtgcaattcgatatgcaatgtctatttgtatcttgaacttgtaattagtactaataatatgggttagctgtctaccatttgggtttataattatactgagtcttttatatgtgaatttgcatttgtagaaatgacttgtatgttctgttctaaattgtcgttttggccatgcagcaaggacaacgtctgcatttctgaaatgatttctattcatgcatcttatgctatgttaccatcacaatatttttaaaaaactcgacctacagggtaagacagccctcggatattgcattaagaaaaatactttgtgacaccatagctcatgagagaacgaccatgaccagagccaaaacctatgctttagcgtaggacagacgagatttttttaatcttagcttgaaatccgctctcacgggaagttgaattcaaaacttgagaagtgctacttagaccatctaaccaactcaactcagctagaggcccttttgcccatcacaaaatttaactactgacagatgtgctctgttgacagtttatgcaagcatcattaagtgctcgtgcacaaatttttgggttacaagaatggggtaatgatggttcaactggcacagatggttcgcagaagaaccttgaagaagcaagtttttttaggcttgatggaggatattgggatacaccttatggtcactttttccttgagtggtattcaggaatgcttcttctccatggagagaggctatgcatgatagctgatgcaatcttctctggtactggtgtgaccatctcagggaaggttgctggcatacattggcactactatacttgttcacatccatctgaactgacagctggctactacaatacactactaagagatggctatcttcctatagctcaaatgtttgccaaatacaaagctgcattgtgctgcagttgtttcgacctgagggacacagaaagaacagattctgagagcagcccagaaggtactctccggcagcttgcgggtgctgctaaaatgtgcggccttcctcttaatggtgagaattctatgacaaggctggatgatgcatcactgaatcaagtcataagaagctcaaggctatactcaggccgtacttcaggaacatccttttcctttaactatgttaggatgaacaaaagcttgtttgaatttcacaattggaatcgatttacaaagtttgttaggcagatgtcagatgctaggacctttctagcaagactgtatgtcaggagagggcagcaatgcttgtcttcaatgtcggttgtttgggtggttagtcgggcttgtgtatatacatgaaagttgtcgaaagctactggggaaatcatgtgcttgtaatctcagcaatcaatgattcgaccactgtggaagtaaatgttttgctcagtacatggcttgttcgctgcggcttgctgcggctgcaatccggctgcggctgcggcttctacagtatttttctctctatggattgcagctgcagcagtccaaacagctgcaacagtgtcggcttgcagcctgccgaacacgcccatggctcatttagttgccagaagggcaggcaggcttatgctctcaaggctgtactgatttcatgcgtatgcatatattagtttcatgcatatgccattgctgaacaaaatttatatttatttgttgtaaagtggcagtgtagttgctgccaacaatattgaatcttgaaaaatatgctcctgttaaaggtcccacgagggtcctgtttagccattgtagaaatacttagttggagccttctgttttctccttccaatatgaatgcttttaaactatatgcttatggtaatatgtatacttgtcacaaatgtcaaatataagttcatctaagtttacccgaagtcaatttttttctaactttgactaacaatattataaaattgattgacaacgaatggagtacgatccattactgagcaatgctggattcacaagaggtctactggtatccatttcttttttttataaaacacattaatatatatatatatatacagtttctataaaatcaacgccatggtaaaagacgtgagatatgtgaattttattgatatgatttttagacactaagcatgaagctaatttaacacatttaaccattttgtcaaaactttgaagttcaattttttttaatatattac

SEQ ID NO: 75836 - DNA, 2739 bp, Zea Mays
cgcaaggcaaaggcagccgcagccccgcagcagcagcaccagcagcggcacggccccgaggtcgggtcgtctccccacacccgaaatcccctcgcgcaccacacaaaatcctccagccacctccccaccccaccgccggcgctctgctcgccggaccttcgcacgcggccggagacacagaaagaaagagagatccgggccccgccggctccgatatccgcccctcccctgcccgccgccgctggattccgcgccctcctcctcgatcctaccgcagggccctcactctgtaggtatcatggtcatgaagatggagcacgaggacaatggtgccatcggaggaactgatggcacgtggacagaggacgaccgagctctcggcgctgctgtgcttggagcagatgcctttgcatatctaacaaaaggaggtggtgccatatccgagggccttgttgccacatctttgccgggtgacttgcagaacaaactccaggagcttgttgaatccgagagccccggtaccagttggaactatgctatcttctggcagctctcacgcacaaagtctggtgatctcgtccttggatggggggatggctgctgccgtgaaccccgcgatggagagctgggagctgctgcttctgcaggcagcgaagatagcaagcagaggattattcccctggtattgatcaggtcacagatactgagatgttcttcctggcatctatgtactttgcgtttccccgtcacgctggtggccctggccaagcatttgcagcaggcatccccatctgggttcccaatagtgagcgcaaggttgtaccagccaactactgttaccgtgggttccttgcaaatgcggcaggatttaggactattgttttggtgccatttgagagtggcgtccttgaactgggctcaacgcagcacatagctgagagttctggtactgtccagacagtaaggtctgtatttgcaggaacaagtggtaataagtctgcagtgcagagacacgaggctgaaaggtcacccggtttggcgaagatctttgggaaggatttgaaccttggccggccttcagtcgggctggcggtcggtgtatctaattctaaggtggatgagaggacatgggagcagaggagtgctgttggtgggacctcattgctaccgagtgtccagaaaggtttgcagaatttcagttggagtcaggctcgtgggctgaattcccatcagcagaagtttggcaacggtgtgttgattgtgagcaataatgagggtgcacaccgcaacaacggagcagtggacagccctagcgcagcgcagtttcagcttcaaaaggcgcctcagcttcagaaactgtcggttgttcagaaaacgcctcagctagtgaaccagcagccaatgcaggcacaggtacctaggcaaattgacttcagcgccgggagcagttccaagcctggtgtgttggttacaagggcaggtgtcctggatggtgagagtgcagaggtggatggcttgtgcaaagaggaagggccaccacctgttatggaggaccgacggccaaggaagaggggaagaaaaccagcaaatgggagggaagaaccacttaaccacgtcgaggcggagcgccagaggagggagaagctcaaccagcggttctatgcgcttagagctgttgtgccaaacatatcgaaaatggacaaggcgtccctgctgggcgatgcgataacgtacatcactgacctccagaagaagctcaaagagatggagacggagagggaaaggctgttggagtcgggtatggtggacccaagggagcgggcgcctaggccagaggtggacatccaggtggtgcaggacgaggttcttgttcgtgtgatgtctccaatggagaaccatccagtcaagaaggtcttccaagcgttcgaagaggcagaggtccgtgtaggcgagtcaaaggtgacgagcaataacaacgggacggcggtgcattctttcatcatcaagtgtcctggcactgagcagcaaacgagggagaaggtgatagcggcaatgtctcgcgcgatgagcagttgagcatagcagctgtaggatcagactggcacggtagaaggtggccggtttatccaggttgcgaacaagaggcggcggcggcggctgaagcagcccgtcgattgttgataggagagttgtaggtggagagaagcaagataagattcttctgacttaagcaatgcagcagcaaccaaaaaaaaagaattggggctctagttaagcagccattctacggtaggtttcttttggttgtggtccgaccccgaccgtttagttctgatgtttttgctttggaaggatggataccgtgttcgttgtgtaagcctgatgatgcagcagaaccataaacagcaatacatgtttttcttattcttcttcttcttctcatgcgtgatttggaaattaaattcattgcagattgtcttttacatttcctttttatggcgatgatagtttagtatgttaaagagaaacgatgggttaagaggacagagtaatgcatcaaggattgtactcgtttttttttgtttttttttaaaagggttgtactcggttttagctgtgatgcattggcttggcctggccatctatctggaattctgggacttttgctggggagaatgaaaggggttcttgaagatatgaaaaagggaggaagatttggtctatgaagttggactgaaa

SEQ ID NO: 75837 - DNA, 3516 bp, Zea Mays
ctaaagctcgagccgagccgatgaatggcggaagcaagaggagaggagtgaacagtgaagaagcgaagccgagcgggtggaccggtgacgaactgccggctgtcggctgggctcggatccggtagaaaagggcgtgcccttcctcctccgcccatccattttctcgcaaggcaaaggcagccgcagccccgcagcagcagcaccagcagcggcacggccccgaggtcgggtcgtctccccacacccgaaatcccctcgcgcaccacacaaaatcctccagccacctccccaccccaccgccggcgctctgctcgccggaccttcgcacgcggccggagacacagaaagaaagagagatccgggccccgccggctccgatatccgcccctcccctgcccgccgccgctggattccgcgccctcctcctcgatcctaccgcagggccctcactctggtgaccacgcctcttctcttttccttcccttccatttaatttcgtcgccgcacctccgtccactgcatgttcgccactacactactactagcccgccggacgatacccggatgctcctgtctcgtgtccggaatgcgatggtgattggtcgctgtgctgctgggttcggttgatgcgccccgaggcggccaggccagtgaccgagtggtttgggctgtttggctgcggatgctttaggggcttgattgggctggaatatgatggccgtgatcggaatcagtctacgattatctctctccgtgccattggcatcgatacagcccccttctgattgggattgctacaattcgaccatgcacatgcactcgccttcacatgctaattacataattaccaacatcccatttttacgtagtcttccaatgtaacttgcactcaaagctgctggctagtggctcgtcgaatcatcaaccgcctgcgcttgggagggggtactgacgctcaaatttgcccgcgtacttcttcttaccgctttggatgcagtgcagtacacttatgtagctagattaggtggtgcatgtttactgattcttttattatattcacaaatacgatcaaatctattgtctttatttgcccaaaacttgatattccattgtttgcttttctcagctcccttgtgacttcagctctgtcccttttcgagtagtaggtatcatggtcatgaagatggagcacgaggacaatggtgccatcggaggaactgatggcacgtggacagaggacgaccgagctctcggcgctgctgtgcttggagcagatgcctttgcatatctaacaaaaggaggtggtgccatatccgagggccttgttgccacatctttgccgggtgacttgcagaacaaactccaggagcttgttgaatccgagagccccggtaccagttggaactatgctatcttctggcagctctcacgcacaaagtctggtgatctcgtccttggatggggggatggctgctgccgtgaaccccgcgatggagagctgggagctgctgcttctgcaggcagcgaagatagcaagcagaggattattcccctgcaggcatccccatctgggttcccaatagtgagcgcaaggttgtaccagccaactactgttaccgtgggttccttgcaaatgcggcaggatttaggactattgttttggtgccatttgagagtggcgtccttgaactgggctcaacgcagcacatagctgagagttctggtactgtccagacagtaaggtctgtatttgcaggaacaagtggtaataagtctgcagtgcagagacacgaggctgaaaggtcacccggtttggcgaagatctttgggaaggatttgaaccttggccggccttcagtcgggctggcggtcggtgtatctaattctaaggtggatgagaggacatgggagcagaggagtgctgttggtgggacctcattgctaccgagtgtccagaaaggtttgcagaatttcagttggagtcaggctcgtgggctgaattcccatcagcagaagtttggcaacggtgtgttgattgtgagcaataatgagggtgcacaccgcaacaacggagcagtggacagccctagcgcagcgcagtttcagcttcaaaaggcgcctcagcttcagaaactgtcggttgttcagaaaacgcctcagctagtgaaccagcagccaatgcaggcacaggtacctaggcaaattgacttcagcgccgggagcagttccaagcctggtgtgttggttacaagggcaggtgtcctggatggtgagagtgcagaggtggatggcttgtgcaaagaggaagggccaccacctgttatggaggaccgacggccaaggaagaggggaagaaaaccagcaaatgggagggaagaaccacttaaccacgtcgaggcggagcgccagaggagggagaagctcaaccagcggttctatgcgcttagagctgttgtgccaaacatatcgaaaatggacaaggcgtccctgctgggcgatgcgataacgtacatcactgacctccagaagaagctcaaagagatggagacggagagggaaaggctgttggagtcgggtatggtggacccaagggagcgggcgcctaggccagaggtggacatccaggtggtgcaggacgaggttcttgttcgtgtgatgtctccaatggagaaccatccagtcaagaaggtcttccaagcgttcgaagaggcagaggtccgtgtaggcgagtcaaaggtgacgagcaataacaacgggacggcggtgcattctttcatcatcaagtgtcctggcactgagcagcaaacgagggagaaggtgatagcggcaatgtctcgcgcgatgagcagttgagcatagcagctgtaggatcagactggcacggtagaaggtggccggtttatccaggttgcgaacaagaggcggcggcggcggctgaagcagcccgtcgattgttgataggagagttgtaggtggagagaagcaagataagattcttctgacttaagcaatgcagcagcaaccaaaaaaaaagaattggggctctagttaagcagccattctacggtaggtttcttttggttgtggtccgaccccgaccgtttagttctgatgtttttgctttggaaggatggataccgtgttcgttgtgtaagcctgatgatgcagcagaaccataaacagcaatacatgtttttcttattcttcttcttcttctcatgcgtgatttggaaattaaattcattgcagattgtcttttacatttcctttttatggcgatgatagtttagtatgttaaagagaaacgatgggttaagaggacagagtaatgcatcaaggattgtactcgtttttttttgtttttttttaaaagggttgtactcggttttagctgtgatgcattggcttggcctggccatctatctggaattctgggacttttgctggggagaatgaaaggggttcttgaagatatgaaaaagggaggaagatttggtctatgaagttggactgaaa

SEQ ID NO: 75838 - DNA, 1171 bp, Zea Mays
tcttgcctctgctgcagcaggcaaactgagggtcttctccatcagagcagctcacagtggcctgagcgatgcatctgtagagtcttcttccccttcctgataatgaagccccagtcaccggtgctgcttacagcttcacaggagcaacggcatcactcaccaataggatcctaacatcttccaagaagattactcttgtcaggcatggcctaagctcatggaatgcagaaagcaatgtccaggcaaccgctgaaattatatggaaaaataaggatgaagcccttgtttttctcgattcattgaaagaggcacatctcttcttcttagagggcatgaccaatgcggatgctaagaagcaatatccggagctgtacaccaaatggagggaggaccctgcaaattttcatgtcaatggcatatacccgattaggaagttgtgggggatgatagcgagacaaacctgcgagcaaatcttgctcactccgggagagaacttcttggtggttacacacaaatccattttgcgcgcgctcatctgcacagcgctgggtatacctcctgagaggtttcgtgccattgatgtaaacaacggtggcatgtgtgtcttcagtcttcacggtgaacaagcaaggagaagctatgcttcaagccctcaacatgacagcacacatgtatagtgatcacacctatcagtactagttttgcccctctcttggcatgacattacattacctatcttgtatattattacactcccattagagaggacaagtcattactgaaatggctttggtaaatattaatgtgaccgtagtgtgcatagcaacaggttacagttagtcagttacacagattgcccctgtcggatgtgattgtccaagtgaatgcaaactgaatcatgtgaagccgtttgatctttgagagactgttcatctccatctataatgtgcttgctcaaattaaatacttactgaaaggtgcttctgacttcgagagggagggatgtctccattccccccccaagaaggcacagttcagttcagatgctattagccgaagcaggtggtataccattgctaaggctgtttccatctttggtatactttttttttctcgaaagcgcaggagaactgcgcgatattatattaaagaagaaggacaattacagaag

SEQ ID NO: 75839 - DNA, 2288 bp, Zea Mays
gctgcagatccaggtttcccgaaatcatgcaattcttctctacttgtgatatatccggaatgttttccgaaaatatactgacgggacaaccattcgatttatgcaccaggtgtcacagttgggtttgaaacttgtgtcaccagttcttagcttatcaaccattagtccaccacctagctaacttgtaaaatggtgttctacgttcatatttttcattttttgcgtagtgactgataagctagctgcagatccaggtttcccgaaatcatgcaattcttctctacttgtgatatatccggaatgttttccgaaaatatactgacgggacaaccatttgatttatgcacctggtgtcacagttgggtttgaaacttgtgtcaccagttcttagcttatcaaccattagtccaccacctagctaactgtaaaatggtgttctacgttcatatttttcattttttgttttggcatctatgagactcttggaatcagttgtggaacctcttcagggcttgttcatttcaccgttaatccatgtggattgggcggtattgagtcggtttaaatccatagcaagtcaaaatacatctcaattcattccaatacacttcaatccacatggaattggaataaccgaacaaggcctcagtttttttattatgtcgtcgactaagtcaagccaacaacatgattgcgctgcacacatgtattgcttcctgctccatatattccaatcaccatgcaattactcactggaatatggtgaaatatcctgagcaatcatattattagtaaaagagacacatctttgcctttcaggacctgtgtgctgaattgatctattcacagcccttttgggatgctcttataaactttataatcttactggctgaatactgatgatgcgccattgttttctctccatggaattactgctctgacgaccatatattatgcttagtcaggattcaggagtaccttctcataccgctccaaaggagagtggagtgttatcgcttcagcatgtttagaacagaacaggttcttgtgctgtcgacgctgattacttgttgttcttgcctctgctgcagcaggcaaactgagggtcttctccatcagagcagctcacagtggcctgagcgatgcatctgtagagtcttcttccccttcctgataatgaagccccagtcaccggtgctgcttacagcttcacaggagcaacggcatcactcaccaataggatcctaacatcttccaagaagattactcttgtcaggcatggcctaagctcatggaatgcagaaagcaatgtccagggaagttcaaatctgtctgttaacggaaaccggcgccaagcaggcaaccgctgaaattatatggaaaaataaggatgaagcccttgtttttctcgattcattgaaagaggcacatctcttcttcttagagggcatgaccaatgcggatgctaagaagcaatatccggagctgtacaccaaatggagggaggaccctgcaaattttcatgtcaatggcatatacccgattaggaagttgtgggggatgatagcgagacaaacctgcgagcaaatcttgctcactccgggagagaacttcttggtggttacacacaaatccattttgcgcgcgctcatctgcacagcgctgggtatacctcctgagaggtttcgtgccattgatgtaaacaacggtggcatgtgtgtcttcagtcttcacggtgaacaagcaaggagaagctatgcttcaagccctcaacatgacagcacacatgtatagtgatcacacctatcagtactagttttgcccctctcttggcatgacattacattacctatcttgtatattattacactcccattagagaggacaagtcattactgaaatggctttggtaaatattaatgtgaccgtagtgtgcatagcaacaggttacagttagtcagttacacagattgcccctgtcggatgtgattgtccaagtgaatgcaaactgaatcatgtgaagccgtttgatctttgagagactgttcatctccatctataatgtgcttgctcaaattaaatacttactgaaaggtgcttctgacttcgagagggagggatgtctccattccccccccaagaaggcacagttcagttcagatgctattagccgaagcaggtggtataccattgctaaggctgtttccatctttggtatactttttttttctcgaaagcgcaggagaactgcgcgatattatattaaagaagaaggacaattacagaag

SEQ ID NO: 75840 - DNA, 1191 bp, Zea Mays
gcgatgagtgagcctccatccactcactcccacgatgagcagaatagtcaatagtagcaggatggccgccagtcacgtgcgaggcacgatgcctgcaaaatcgcgaccgcgtcgtgtggggtccccacccacttccgctctgctcacgtgccgtgcccgtgtgcatcggggaaaaaacagcagcaggggccgaatcggagctccgccgccggcagatctgcgccggccggtctgctccgcccagcggacatggaccgcgacggccgcccggggtggctaccgtcgctgggcttcgccttcctcagcttcaactgcgggatggccgtctaccgctcctgggacgacccctacgccgtcgccttcgtcctcgccgcgtacgccgccctcgtcctcctcttccgctgcctccaccttctggagcgccgccgggaccagcgcctcaagctcgccgtctggggcctctccacgctcctcacactcatgttctcgtacaagatcgccgccgtgatgccgccctgggcccagctgctcgtctggggcatggggatcctcaccgtcgttgcgggattctacgccttcttcgtcgcccgcccggaggagccctgacccttcgatacctgatgagcatcactcaccgcatcggtctcagttatcttgtgtagtacgtatgtctttttgcagcatgccgaagaagttgacgaacgtaccgagaggcgcgtagcaagactcatcactcttttgaatgcaagagttggtagtagaataaagtaggggttccgtgtgtgtgtgcgtgtgggagagagatcgtgaaaaacggtttgcatctagcggtgacctctttacattggtttttccagtgcctgttgcggttagctatgtgttactaattggaatggatgcaagtaagtgaggatagagtcgttctaaacccactctccaaatcacccatgcatcatcatttgaacaaggtgctccataaaaaattgtttggggccttaatacatgttttagtttcttagatttcgcattttttgaatctttcaagatgtcatcagatggagatatgctctatgacaaaattgcagtggcccaccagagatctaaaggtccatagctgaattttgattttgttttgtacatataattgatggttaaagttgggaataattgatttagaacgataaagctaat

SEQ ID NO: 75841 - DNA, 627 bp, Zea Mays
cctcatcttcctccgcagaatcgttttgcagtcagatcacagtcgcaggatacctgatgagcatcactcaccgcatcggtctcagttatcttgtgtagtacgtatgtctttttgcagcatgccgaagaagttgacgaacgtaccgagaggcgcgtagcaagactcatcactcttttgaatgcaagagttggtagtagaataaagtaggggttccgtgtgtgtgtgcgtgtgggagagagatcgtgaaaaacggtttgcatctagcggtgacctctttacattggtttttccagtgcctgttgcggttagctatgtgttactaattggaatggatgcaagtaagtgaggatagagtcgttctaaacccactctccaaatcacccatgcatcatcatttgaacaaggtgctccataaaaaattgtttggggccttaatacatgttttagtttcttagatttcgcattttttgaatctttcaagatgtcatcagatggagatatgctctatgacaaaattgcagtggcccaccagagatctaaaggtccatagctgaattttgattttgttttgtacatataattgatggttaaagttgggaataattgatttagaacgataaagctaat

SEQ ID NO: 75842 - DNA, 1687 bp, Zea Mays
accccgcgcggcgttgcgtgtgctctatctatccgccccgcgcgcttctccgccaaccaactccccggcgcctccctcctccaccagaccaccacccacaaacccttcttattgataccatccacagtcccagcccgcgccagcctctgcctctgccccccagactaccccctgcctgcaggctcctgcaactgcaatgtcggcgctcgggacgctctccggcggggccgccggtgtctccggcctcatccgcctccgccgtcgggtggcccccgcgctcgcggcgccgtcgcaccacgccgctgggacgttgaactgcgccgccttgcccgatgccgccccgctcgtctggggacgccagctccgcccgtcgctcctcctccccgccacactgctcccgtcgtcgtcgcagggcgccaggaggcacacgccacggcggcccgccgcagccgcaggggaggccaagtctgtgggtttcctggagaagtacccggccctggtcactggcttcttcttcttcatgtggtacttcctcaacgtcatattcaacatcctcaacaagaagatctacaactacttcccctatccatactttgtgtccttgatccatctagtagtgggtgtcgtatactgcctcatcagctggagtgtcggtctccccaagcgagcgcctatcaatggcacgctcctgaagcttctctttccagtcgccctgtgccatggtattggtcacatcactagcaatgtgtccttcgctgctgttgcagtctcatttgcccacactatcaaagctctggagcccttcttcagcgcagctgctactcagtttatccttggacagcaagttcccttctctctgtggctttctcttgcccctgttgtcatcggtgtttcaatggcatcccttactgagctctcattcaactggactggcttcatcaatgccatgatatcaaacatctcattcacctacaggagcatttattccaagaaagccatggtctgttgtttacgatttgctctcttgtcttaaccatccttctaatcgtttctggcattgcagactgacatggatagcaccaacgtgtatgcttacatttcaataattgctctcattgtttgcattccgcctgcagtgatctttgaagggccccggctaatgcagcatggattcagtgatgccattgcaaaagtaggcttgacaaagtttgttagtgacctattcttggttggactgttctaccatctgtacaaccagattgctacgaacaccttggagcgagtggctcctctgacacatgctgtgggcaatgtgttgaagcgtgtgtttgtcattggcttctcaatcgttgtttttggcaacaaaattagcacacaaactggaattggcacgtccattgccatagctggtgttgctatgtactcttacattaaggctaagattgaagaggagaaaaggaaaaagagcgcatgatgagctgactgctgtgaatattttaccttctgcgtctgggacacaacaacaacatcgtcgacaatcaagattatgccttgttttgtagtattcgtcttgagtcgctttgtttattaccaatctattatctggtgttgaacagcagcacattgcagaacagatgatcgtcgagtgaccttcatatacgcctctgccttgcgtggtggctgctgc

SEQ ID NO: 75843 - DNA, 1471 bp, Zea Mays
accccgcgcggcgttgcgtgtgctctatctatccgccccgcgcgcttctccgccaaccaactccccggcgcctccctcctccaccagaccaccacccacaaacccttcttattgataccatccacagtcccagcccgcgccagcctctgcctctgccccccagactaccccctgcctgcaggctcctgcaactgcaatgtcggcgctcgggacgctctccggcggggccgccggtgtctccggcctcatccgcctccgccgtcgggtggcccccgcgctcgcggcgccgtcgcaccacgccgctgggacgttgaactgcgccgccttgcccgatgccgccccgctcgtctggggacgccagctccgcccgtcgctcctcctccccgccacactgctcccgtcgtcgtcgcagggcgccaggaggcacacgccacggcggcccgccgcagccgcaggggaggccaagtctgtgggtttcctggagaagtacccggccctggtcactggcttcttcttcttcatgtggtacttcctcaacgtcatattcaacatcctcaacaagaagatctacaactacttcccctatccatactttgtgtccttgatccatctagtagtgggtgtcgtatactgcctcatcagctggagtgtcggtctccccaagcgagcgcctatcaatggcacgctcctgaagcttctctttccagtcgccctgtgccatggtattggtcacatcactagcaatgtgtccttcgctgctgttgcagtctcatttgcccacactatcaaagctctggagcccttcttcagcgcagctgctactcagtttatccttggacagcaagttcccttctctctgtggctttctcttgcccctgttgtcatcggtgtttcaatggcatcccttactgagctctcattcaactggactggcttcatcaatgccatgatatcaaacatctcattcacctacaggagcatttattccaagaaagccatgactgacatggatagcaccaacgtgtatgcttacattaaggctaagattgaagaggagaaaaggaaaaagagcgcatgatgagctgactgctgtgaatattttaccttctgcgtctgggacacaacaacaacatcgtcgacaatcaagattatgccttgttttgtagtattcgtcttgagtcgctttgtttattaccaatctattatctggtgttgaacagcagcacattgcagaacagatgatcgtcgagtgaccttcatatacgcctgtaactctctctctctccctctctctcagctcagcagtttagatcgactatactcattggacatggacctatctatatatcttctttgtaaacaggacagagtcggactcctgctgcagtattatcaactcatctattttaaactctttaagttggatttattttcaattttttttgtgcttcaataaattactagattttat

SEQ ID NO: 75844 - DNA, 1174 bp, Zea Mays
tctctgcttgctgagacttgaagaaaactttgggcatgatgaaatcagtgtttgctatttagcctccttcacaactaagatcatcctacataatagatttagacaacaaaaacttatggagtttgctgaaatgccctttcaggcatgccccatctgtgctacaagggtcggaatggacttgataggacatttgactatgcaacacggaagttatttcaagatatccttttttaactatgctgccgttgctgatcatttgcatttttacatttttcacattatactacagttgaagatacataggtgtcatggtcgggcgcacgtcacggtcatgttgaattgtaacttttctctggttcttgagccagcaacatgaccggtttaatggtgtttttgagaattctgttgattccttctaaatgttaaaattatgttcactaccaggatgcttttggcgctgagaggaggaaagctataagatgctaaatctctccattgcatacggaaaaacgtaggaagggcactgcagctgatgttgctatgtgtgcaatgcttgagatagacagaaatactcgtcttaaggagcttggttgggcgctactcatgtgggtagtttatgcataaagttatgcctgttcgctgcttaaatgttgccatattttgtttttctctttgaaactgtgaagggcacaactttttaacgacttctgtaacttgtgtatctaacatctgtattcggtattctgagttaaaatgggcacatttaattatattttacataatttgttttaaagaatagatggatgattattctgcatgtttttgttatgctctttatgatacattcaacgactttcccatacttcacgcttgtatttgttgtggggacaaacagtaggtggttacttttgcatcccttttcttactttcttgcttcttcgctgcaataccagtctccccctgcttattcaacttccttcttaagaaagtattgccaatgtaaattgtctgtcttcaccctaacaaatcgtcacagaacattgtaatcattgtgaactaacattttatcgaacaatttatttgtcgtcgccgtcgcaacgcacgggcactataccagtacaggattatcttgggaactgcctcgtgggctgcgccaccacggctgtatgctgag

SEQ ID NO: 75845 - DNA, 1522 bp, Zea Mays
cttctcaggccaagagggagggagggcagcaaagaaagcaagcaagaaagaagccgattccactggtggttaaggttttggattaaaggagagaggtgcagagaaaaaaaggttgcaactccctgggccaagcagtagcgcagcaagttcagcaccaatggcagccatatgaaatataaggcaaagcagataaaaagcttaattttttttcaagaaggtaaaggcaatgacagaaaagtgaggagggtcagaggtgtacagatatggatgagggctgaaaagaggagcaggaaggcatgccccatctgtgctacaagggtcggaatggacttgataggacatttgactatgcaacacggaagttatttcaagatatccttttttaactatgctgccgttgctgatcatttgcatttttacatttttcacattatactacagttgaagatacataggtgtcatggtcgggcgcacgtcacggtcatgttgaattgtaacttttctctggttcttgagccagcaacatgaccggtttaatggtgtttttgagaattctgttgattccttctaaatgttaaaattatgttcactaccaggttattagcttttgtactgcacttccacacacatacatattttttcttttttcttataccttccatgtcgtctggtccagaacttgtacactgtggggttaattatggatatggatctatgaaatattattagcatgaaaatatacatggcgtgtatggaacaaaatggactctaatgctttttcttgtgatgtaggatgcttttggcgctgagaggaggaaagctataagatgctaaatctctccattgcatacggaaaaacgtaggaagggcactgcagctgatgttgctatgtgtgcaatgcttgagatagacagaaatactcgtcttaaggagcttggttgggcgctactcatgtgggtagtttatgcataaagttatgcctgttcgctgcttaaatgttgccatattttgtttttctctttgaaactgtgaagggcacaactttttaacgacttctgtaacttgtgtatctaacatctgtattcggtattctgagttaaaatgggcacatttaattatattttacataatttgttttaaagaatagatggatgattattctgcatgtttttgttatgctctttatgatacattcaacgactttcccatacttcacgcttgtatttgttgtggggacaaacagtaggtggttacttttgcatcccttttcttactttcttgcttcttcgctgcaataccagtctccccctgcttattcaacttccttcttaagaaagtattgccaatgtaaattgtctgtcttcaccctaacaaatcgtcacagaacattgtaatcattgtgaactaacattttatcgaacaatttatttgtcgtcgccgtcgcaacgcacgggcactataccagtacaggattatcttgggaactgcctcgtgggctgcgccaccacggctgtatgctgag

SEQ ID NO: 75846 - DNA, 1644 bp, Zea Mays
cttctcaggccaagggagggagggcagcaaagaaagcaagcaagaaagaagccgattccactggtggttaaggttttggattaaaggagagaggtgcagagaaaaaaaggcaatcttactcttaatctctgtgtccacatcacttccgatcatgctgtgatcgacagaagtacgggtgccatggataagtgcctcctcctactcaccaaagtaataaggagcagctgctgcaggttgcaactccctgggccaagcagtagcgcagcaagttcagcaccaatggcagccatatgaaatataaggcaaagcagataaaaagcttaattttttttcaagaaggtaaaggcaatgacagaaaagtgaggagggtcagaggtgtacagatatggatgagggctgaaaagaggagcaggaaggcatgccccatctgtgctacaagggtcggaatggacttgataggacatttgactatgcaacacggaagttatttcaagatatccttttttaactatgctgccgttgctgatcatttgcatttttacatttttcacattatactacagttgaagatacataggtgtcatggtcgggcgcacgtcacggtcatgttgaattgtaacttttctctggttcttgagccagcaacatgaccggtttaatggtgtttttgagaattctgttgattccttctaaatgttaaaattatgttcactaccaggttattagcttttgtactgcacttccacacacatacatattttttcttttttcttataccttccatgtcgtctggtccagaacttgtacactgtggggttaattatggatatggatctatgaaatattattagcatgaaaatatacatggcgtgtatggaacaaaatggactctaatgctttttcttgtgatgtaggatgcttttggcgctgagaggaggaaagctataagatgctaaatctctccattgcatacggaaaaacgtaggaagggcactgcagctgatgttgctatgtgtgcaatgcttgagatagacagaaatactcgtcttaaggagcttggttgggcgctactcatgtgggtagtttatgcataaagttatgcctgttcgctgcttaaatgttgccatattttgtttttctctttgaaactgtgaagggcacaactttttaacgacttctgtaacttgtgtatctaacatctgtattcggtattctgagttaaaatgggcacatttaattatattttacataatttgttttaaagaatagatggatgattattctgcatgtttttgttatgctctttatgatacattcaacgactttcccatacttcacgcttgtatttgttgtggggacaaacagtaggtggttacttttgcatcccttttcttactttcttgcttcttcgctgcaataccagtctccccctgcttattcaacttccttcttaagaaagtattgccaatgtaaattgtctgtcttcaccctaacaaatcgtcacagaacattgtaatcattgtgaactaacattttatcgaacaatttatttgtcgtcgccgtcgcaacgcacgggcactataccagtacaggattatcttgggaactgcctcgtgggctgcgccaccacggctgtatgctgag

SEQ ID NO: 75847 - DNA, 1840 bp, Zea Mays
cttcaactcaatccgcatgtacccagaggattctttgcttgctcttctacttctgaaaattcgcaaaatggatagataattccagttaattttaatccattacagcctgttgtggcagcaaacagcgaccgggtgcggaagccggaagggagaggcgcttggttgacccggaacggacggcaagacaccgccgggggttcactgcaaccgcacgcgtggtggccggtgtgggaaggagcccactgctcaagcagcgacgacttccgcaacttctcaggccaagttgtagggagggagggcagcaaagaaagcaagcaagaaagaagccgattccactggtggttaaggttttggattaaaggagagaggtgcagagaaaaaaaggcaatcttactcttaatctctgtgtccacatcacttccgatcatgctgtgatcgacagaagtacgggtgccatggataagtgcctcctcctactcaccaaagtaataaggagcagctgctgcaggttgcaactccctgggccaagcagtagcgcagcaagttcagcaccaatggcagccatatgaaatataaggcaaagcagataaaaagcttaattttttttcaagaaggtaaaggcaatgacagaaaagtgaggagggtcagaggtgtacagatatggatgagggctgaaaagaggagcaggaaggcatgccccatctgtgctacaagggtcggaatggacttgataggacatttgactatgcaacacggaagttatttcaagataggtgtcatggtcgggcgcacgtcacggtcatgttgaattgtaacttttctctggttcttgagccagcaacatgaccggtttaatggtgtttttgagaattctgttgattccttctaaatgttaaaattatgttcactaccaggttattagcttttgtactgcacttccacacacatacatattttttcttttttcttataccttccatgtcgtctggtccagaacttgtacactgtggggttaattatggatatggatctatgaaatattattagcatgaaaatatacatggcgtgtatggaacaaaatggactctaatgctttttcttgtgatgtaggatgcttttggcgctgagaggaggaaagctataagatgctaaatctctccattgcatacggaaaaacgtaggaagggcactgcagctgatgttgctatgtgtgcaatgcttgagatagacagaaatactcgtcttaaggagcttggttgggcgctactcatgtgggtagtttatgcataaagttatgcctgttcgctgcttaaatgttgccatattttgtttttctctttgaaactgtgaagggcacaactttttaacgacttctgtaacttgtgtatctaacatctgtattcggtattctgagttaaaatgggcacatttaattatattttacataatttgttttaaagaatagatggatgattattctgcatgtttttgttatgctctttatgatacattcaacgactttcccatacttcacgcttgtatttgttgtggggacaaacagtaggtggttacttttgcatcccttttcttactttcttgcttcttcgctgcaataccagtctccccctgcttattcaacttccttcttaagaaagtattgccaatgtaaattgtctgtcttcaccctaacaaatcgtcacagaacattgtaatcattgtgaactaacattttatcgaacaatttatttgtcgtcgccgtcgcaacgcacgggcactataccagtacaggattatcttgggaactgcctcgtgggctgcgccaccacggctgtatgctgag

SEQ ID NO: 75848 - DNA, 2240 bp, Zea Mays
tttctttcagtcaccatgatttatcactagggtactttcaccacttctggtatggttctgtctgtaatgtgccagggattattatattgtttttggtttggatttggaatggtttggggtccacaacgatgatgcgtcagagctgttccaagggttggatgatttccattcccctgctgtcaatttgactaggctcgccgtctccgctctgcccaactggcaccaagcagccaatggaacttgagcatccaatggatgatttccattcccctgctgccaattctccaaactgctttgacccttcaactcaatccgcatgtacccagtaaatgttcaatctgaatttggatcattgctagcaggattctttgcttgctcttctacttctgaaaattcgcaaaatggatagataattccagttaattttaatccattacagcaaacagcgaccgggtgcggaagccggaagggagaggcgcttggttgacccggaacggacggcaagacaccgccgggggttcactgcaaccgcacgcgtggtggccggtgtgggaaggagcccactgctcaagcagcgacgacttccgcaacttctcaggccaagttgtagggagggagggcagcaaagaaagcaagcaagaaagaagccgattccactggtggttaaggttttggattaaaggagagaggtgcagagaaaaaaaggcaatcttactcttaatctctgtgtccacatcacttccgatcatgctgtgatcgacagaagtacgggtgccatggataagtgcctcctcctactcaccaaagtaataaggagcagctgctgcaggttgcaactccctgggccaagcagtagcgcagcaagttcagcaccaatggcagccatatgaaatataaggcaaagcagataaaaagcttaattttttttcaagaaggtaaaggcaatgacagaaaagtgaggagggtcagaggtgtacagatatggatgagggctgaaaagaggagcaggaaggcatgccccatctgtgctacaagggtcggaatggacttgataggacatttgactatgcaacacggaagttatttcaagatatccttttttaactatgctgccgttgctgatcatttgcatttttacatttttcacattatactacagttgaagatacataggtgtcatggtcgggcgcacgtcacggtcatgttgaattgtaacttttctctggttcttgagccagcaacatgaccggtttaatggtgtttttgagaattctgttgattccttctaaatgttaaaattatgttcactaccaggttattagcttttgtactgcacttccacacacatacatattttttcttttttcttataccttccatgtcgtctggtccagaacttgtacactgtggggttaattatggatatggatctatgaaatattattagcatgaaaatatacatggcgtgtatggaacaaaatggactctaatgctttttcttgtgatgtaggatgcttttggcgctgagaggaggaaagctataagatgctaaatctctccattgcatacggaaaaacgtaggaagggcactgcagctgatgttgctatgtgtgcaatgcttgagatagacagaaatactcgtcttaaggagcttggttgggcgctactcatgtgggtagtttatgcataaagttatgcctgttcgctgcttaaatgttgccatattttgtttttctctttgaaactgtgaagggcacaactttttaacgacttctgtaacttgtgtatctaacatctgtattcggtattctgagttaaaatgggcacatttaattatattttacataatttgttttaaagaatagatggatgattattctgcatgtttttgttatgctctttatgatacattcaacgactttcccatacttcacgcttgtatttgttgtggggacaaacagtaggtggttacttttgcatcccttttcttactttcttgcttcttcgctgcaataccagtctccccctgcttattcaacttccttcttaagaaagtattgccaatgtaaattgtctgtcttcaccctaacaaatcgtcacagaacattgtaatcattgtgaactaacattttatcgaacaatttatttgtcgtcgccgtcgcaacgcacgggcactataccagtacaggattatcttgggaactgcctcgtgggctgcgccaccacggctgtatgctgag

SEQ ID NO: 75849 - DNA, 2287 bp, Zea Mays
agcacattcaactccacatagattgtccatgtttctttcagtcaccatgatttatcactagggtactttcaccacttctggtatggttctgtctgtaatgtgccagggattattatattgtttttggtttggatttggaatggtttggggtccacaacgatgatgcgtcagagctgttccaagggttggatgatttccattcccctgctgtcaatttgactaggctcgccgtctccgctctgcccaactggcaccaagcagccaatggaacttgagcatccaatggatgatttccattcccctgctgccaattctccaaactgctttgacccttcaactcaatccgcatgtacccagtaaatgttcaatctgaatttggatcattgctagcaggattctttgcttgctcttctacttctgaaaattcgcaaaatggatagataattccagttaattttaatccattacagtagcctgttgtggcagcaaacagcgaccgggtgcggaagccggaagggagaggcgcttggttgacccggaacggacggcaagacaccgccgggggttcactgcaaccgcacgcgtggtggccggtgtgggaaggagcccactgctcaagcagcgacgacttccgcaacttctcaggccaagttgtagggagggagggcagcaaagaaagcaagcaagaaagaagccgattccactggtggttaaggttttggattaaaggagagaggtgcagagaaaaaaaggcaatcttactcttaatctctgtgtccacatcacttccgatcatgctgtgatcgacagaagtacgggtgccatggataagtgcctcctcctactcaccaaagtaataaggagcagctgctgcaggttgcaactccctgggccaagcagtagcgcagcaagttcagcaccaatggcagccatatgaaatataaggcaaagcagataaaaagcttaattttttttcaagaaggtaaaggcaatgacagaaaagtgaggagggtcagaggtgtacagatatggatgagggctgaaaagaggagcaggaaggcatgccccatctgtgctacaagggtcggaatggacttgataggacatttgactatgcaacacggaagttatttcaagatatccttttttaactatgctgccgttgctgatcatttgcatttttacatttttcacattatactacagttgaagatacataggtgtcatggtcgggcgcacgtcacggtcatgttgaattgtaacttttctctggttcttgagccagcaacatgaccggtttaatggtgtttttgagaattctgttgattccttctaaatgttaaaattatgttcactaccaggttattagcttttgtactgcacttccacacacatacatattttttcttttttcttataccttccatgtcgtctggtccagaacttgtacactgtggggttaattatggatatggatctatgaaatattattagcatgaaaatatacatggcgtgtatggaacaaaatggactctaatgctttttcttgtgatgtaggatgcttttggcgctgagaggaggaaagctataagatgctaaatctctccattgcatacggaaaaacgtaggaagggcactgcagctgatgttgctatgtgtgcaatgcttgagatagacagaaatactcgtcttaaggagcttggttgggcgctactcatgtgggtagtttatgcataaagttatgcctgttcgctgcttaaatgttgccatattttgtttttctctttgaaactgtgaagggcacaactttttaacgacttctgtaacttgtgtatctaacatctgtattcggtattctgagttaaaatgggcacatttaattatattttacataatttgttttaaagaatagatggatgattattctgcatgtttttgttatgctctttatgatacattcaacgactttcccatacttcacgcttgtatttgttgtggggacaaacagtaggtggttacttttgcatcccttttcttactttcttgcttcttcgctgcaataccagtctccccctgcttattcaacttccttcttaagaaagtattgccaatgtaaattgtctgtcttcaccctaacaaatcgtcacagaacattgtaatcattgtgaactaacattttatcgaacaatttatttgtcgtcgccgtcgcaacgcacgggcactataccagtacaggattatcttgggaactgcctcgtgggctgcgccaccacggctgtatgctgag

SEQ ID NO: 75850 - DNA, 1813 bp, Zea Mays
tcttgttccgctgccagtaccatgtgacaacaatgggacaggcagccacggccctgagctgctgagggagaagaaggaccagtttgaccttgtgatcagcaacgtccacatgccggacatggacggcttcaagctcctcgagcttgtgggcctcgagatggaccttccggggattacctctgcacaaaaccccattccaattgatatggttttgttactcgattatgctttggtcccagcccgccatcagtcagatttacctctgaaatgtggcatccaaatgttatgttttctgacatcatgcataatatttgaggaaatgccagtctatcctgatgggcgggtttgcatctctattcttcatccacccagtgaagatccaaacggttatgagctcgcaaagagaaaattaccttgtagtctcattgtttcagtttatggtccaatttacaatggcttcactgtaaatgggaaaacaactcgggattattatattgtttttggtttggatttggaatggtttggggtccacaacgatgatgcgtcagagctgttccaagggttggatgatttccattcccctgctgtcaatttgactaggctcgccgtctccgctctgcccaactggcaccaagcagccaatggaacttgagcatccaatggatgatttccattcccctgctgccaattctccaaactgctttgacccttcaactcaatccgcatgtacccagtaaatgttcaatctgaatttggatcattgctagcaggattctttgcttgctcttctacttctgaaaattcgcaaaatggatagataattccagttaattttaatccattacagcctgttgtggcagcaaacagcgaccgggtgcggaagccggaagggagaggcgcttggttgacccggaacggacggcaagacaccgccgggggttcactgcaaccgcacgcgtggtggccggtgtgggaaggagcccactgctcaagcagcgacgacttccgcaacttctcaggccaagttgtagggagggagggcagcaaagaaagcaagcaagaaagaagccgattccactggtggttaaggttttggattaaaggagagaggtgcagagaaaaaaaggttgcaactccctgggccaagcagtagcgcagcaagttcagcaccaatggcagccatatgaaatataaggcaaagcagataaaaagcttaattttttttcaagaaggtaaaggcaatgacagaaaagtgaggagggtcagaggtgtacagatatggatgagggctgaaaagaggagcaggaaggcatgccccatctgtgctacaagggtcggaatggacttgataggacatttgactatgcaacacggaagttatttcaagatatccttttttaactatgctgccgttgctgatcatttgcatttttacatttttcacattatactacagttgaagatacataggtgtcatggtcgggcgcacgtcacggtcatgttgaattgtaacttttctctggttcttgagccagcaacatgaccggtttaatggtgtttttgagaattctgttgattccttctaaatgttaaaattatgttcactaccaggatgcttttggcgctgagaggaggaaagctataagatgctaaatctctccattgcatacggaaaaacgtaggaagatttttgttaaggaagcaaaagatacactgaaactctggtatagcaatagaaagaaggttctggcttggcaagtgaaacagaaacagctagcacatgagaagtgtgaattttatactttgctttggc

SEQ ID NO: 75851 - DNA, 2127 bp, Zea Mays
gagaacctcttgttccgctgccagtaccatgtgacaacaatgggacaggcagccacggccctgagctgctgagggagaagaaggaccagtttgaccttgtgatcagcaacgtccacatgccggacatggacggcttcaagctcctcgagcttgtgggcctcgagatggaccttccggggattacctctgcacaaaaccccattccaattgatatggttttgttactcgattatgctttggtcccagcccgccatcagtcagatttacctctgaaatgtggcatccaaatgttatgttttctgacatcatgcataatatttgaggaaatgccagtctatcctgatgggcgggtttgcatctctattcttcatccacccagtgaagatccaaacggttatgagctcgcaaagagaaaattaccttgtagtctcattgtttcagtttatggtccaatttacaatggcttcactgtaaatgggaaaacaactcgggattattatattgtttttggtttggatttggaatggtttggggtccacaacgatgatgcgtcagagctgttccaagggttggatgatttccattcccctgctgtcaatttgactaggctcgccgtctccgctctgcccaactggcaccaagcagccaatggaacttgagcatccaatggatgatttccattcccctgctgccaattctccaaactgctttgacccttcaactcaatccgcatgtacccagtaaatgttcaatctgaatttggatcattgctagcaggattctttgcttgctcttctacttctgaaaattcgcaaaatggatagataattccagttaattttaatccattacagcaaacagcgaccgggtgcggaagccggaagggagaggcgcttggttgacccggaacggacggcaagacaccgccgggggttcactgcaaccgcacgcgtggtggccggtgtgggaaggagcccactgctcaagcagcgacgacttccgcaacttctcaggccaagttgtagggagggagggcagcaaagaaagcaagcaagaaagaagccgattccactggtggttaaggttttggattaaaggagagaggtgcagagaaaaaaaggcaatcttactcttaatctctgtgtccacatcacttccgatcatgctgtgatcgacagaagtacgggtgccatggataagtgcctcctcctactcaccaaagtaataaggagcagctgctgcaggttgcaactccctgggccaagcagtagcgcagcaagttcagcaccaatggcagccatatgaaatataaggcaaagcagataaaaagcttaattttttttcaagaaggtaaaggcaatgacagaaaagtgaggagggtcagaggtgtacagatatggatgagggctgaaaagaggagcaggaaggcatgccccatctgtgctacaagggtcggaatggacttgataggacatttgactatgcaacacggaagttatttcaagatatccttttttaactatgctgccgttgctgatcatttgcatttttacatttttcacattatactacagttgaagatacataggtgtcatggtcgggcgcacgtcacggtcatgttgaattgtaacttttctctggttcttgagccagcaacatgaccggtttaatggtgtttttgagaattctgttgattccttctaaatgttaaaattatgttcactaccaggttattagcttttgtactgcacttccacacacatacatattttttcttttttcttataccttccatgtcgtctggtccagaacttgtacactgtggggttaattatggatatggatctatgaaatattattagcatgaaaatatacatggcgtgtatggaacaaaatggactctaatgctttttcttgtgatgtaggatgcttttggcgctgagaggaggaaagctataagatgctaaatctctccattgcatacggaaaaacgtaggaagatttttgttaaggaagcaaaagatacactgaaactctggtatagcaatagaaagaaggttctggcttggcaagtgaaacagaaacagctagcacatgagaagtgtgaattttatactttgctttggc

SEQ ID NO: 75852 - DNA, 2403 bp, Zea Mays
atgcccccatcggaccccgtcgcgccgtgcgtggcggcgccggtgatggacgcggcgttgctagccgtcatcgtcccgcctcgacgttcgatccgtgctcaccacggttggtgctcgcacgcaatgtggcgtggcgaggttactgcgggcgtcgcggaggtggagggggaaggggaggacgagggcacgggcaagagagcgcatcgcggtggacggtctcgagggaccttgggtgatccgggtgcttggtttcttggttctgcggctttcgctgctgttggatttgccgagtcggagccaccggagatgaccgtcgacgagctgaagctgcaggcaagggccagcggcggccacggcctaaggaccagttccccgtcggcatgcgcgtgctcgccgtcgacgacgacccgacctgcctcaagtgacaacaatgggacaggcagccacggccctgagctgctgagggagaagaaggaccagtttgaccttgtgatcagcaacgtccacatgccggacatggacggcttcaagctcctcgagcttgtgggcctcgagatggaccttccggggattacctctgcacaaaaccccattccaattgatatggttttgttactcgattatgctttggtcccagcccgccatcagtcagatttacctctgaaatgtggcatccaaatgttatgttttctgacatcatgcataatatttgaggaaatgccagtctatcctgatgggcgggtttgcatctctattcttcatccacccagtgaagatccaaacggttatgagctcgcaagtgagcgatggacacctgtgcacacatttatggtccaatttacaatggcttcactgtaaatgggaaaacaactcgggattattatattgtttttggtttggatttggaatggtttggggtccacaacgatgatgcgtcagagctgttccaagggttggatgatttccattcccctgctgtcaatttgactaggctcgccgtctccgctctgcccaactggcaccaagcagccaatggaacttgagcatccaatggatgatttccattcccctgctgccaattctccaaactgctttgacccttcaactcaatccgcatgtacccagtaaatgttcaatctgaatttggatcattgctagcaggattctttgcttgctcttctacttctgaaaattcgcaaaatggatagataattccagttaattttaatccattacagtagcctgttgtggcagcaaacagcgaccgggtgcggaagccggaagggagaggcgcttggttgacccggaacggacggcaagacaccgccgggggttcactgcaaccgcacgcgtggtggccggtgtgggaaggagcccactgctcaagcagcgacgacttccgcaacttctcaggccaagttgtagggagggagggcagcaaagaaagcaagcaagaaagaagccgattccactggtggttaaggttttggattaaaggagagaggtgcagagaaaaaaaggttgcaactccctgggccaagcagtagcgcagcaagttcagcaccaatggcagccatatgaaatataaggcaaagcagataaaaagcttaattttttttcaagaaggtaaaggcaatgacagaaaagtgaggagggtcagaggtgtacagatatggatgagggctgaaaagaggagcaggaaggcatgccccatctgtgctacaagggtcggaatggacttgataggacatttgactatgcaacacggaagttatttcaagatatccttttttaactatgctgccgttgctgatcatttgcatttttacatttttcacattatactacagttgaagatacataggtgtcatggtcgggcgcacgtcacggtcatgttgaattgtaacttttctctggttcttgagccagcaacatgaccggtttaatggtgtttttgagaattctgttgattccttctaaatgttaaaattatgttcactaccaggttattagcttttgtactgcacttccacacacatacatattttttcttttttcttataccttccatgtcgtctggtccagaacttgtacactgtggggttaattatggatatggatctatgaaatattattagcatgaaaatatacatggcgtgtatggaacaaaatggactctaatgctttttcttgtgatgtaggatgcttttggcgctgagaggaggaaagctataagatgctaaatctctccattgcatacggaaaaacgtaggaagatttttgttaaggaagcaaaagatacactgaaactctggtatagcaatagaaagaaggttctggcttggcaagtgaaacagaaacagctagcacatgagaagtgtgaattttatactttgctttggc

SEQ ID NO: 75853 - DNA, 2297 bp, Zea Mays
atgcccccatcggaccccgtcgcgccgtgcgtggcggcgccggtgatggacgcggcgttgctagccgtcatcgtcccgcctcgacgttcgatccgtgctcaccacggttggtgctcgcacgcaatgtggcgtggcgaggttactgcgggcgtcgcggaggtggagggggaaggggaggacgagggcacgggcaagagagcgcatcgcggtggacggtctcgagggaccttgggtgatccgggtgcttggtttcttggttctgcggctttcgctgctgttggatttgccgagtcggagccaccggagatgaccgtcgacgagctgaagctgcaggcaagggccagcggcggccacggcctaaggaccagttccccgtcggcatgcgcgtgctcgccgtcgacgacgacccgacctgcctcaagtgacaacaatgggacaggcagccacggccctgagctgctgagggagaagaaggaccagtttgaccttgtgatcagcaacgtccacatgccggacatggacggcttcaagctcctcgagcttgtgggcctcgagatggaccttccggggattacctctgcacaaaaccccattccaattgatatggttttgttactcgattatgctttggtcccagcccgccatcagtcagatttacctctgaaatgtggcatccaaatgttatgttttctgacatcatgcataatatttgaggaaatgccagtctatcctgatgggcgggtttgcatctctattcttcatccacccagtgaagatccaaacggttatgagctcgcaaagagaaaattaccttgtagtctcattgtttcagtttatggtccaatttacaatggcttcactgtaaatgggaaaacaactcgggattattatattgtttttggtttggatttggaatggtttggggtccacaacgatgatgcgtcagagctgttccaagggttggatgatttccattcccctgctgtcaatttgactaggctcgccgtctccgctctgcccaactggcaccaagcagccaatggaacttgagcatccaatggatgatttccattcccctgctgccaattctccaaactgctttgacccttcaactcaatccgcatgtacccagtagcctgttgtggcagcaaacagcgaccgggtgcggaagccggaagggagaggcgcttggttgacccggaacggacggcaagacaccgccgggggttcactgcaaccgcacgcgtggtggccggtgtgggaaggagcccactgctcaagcagcgacgacttccgcaacttctcaggccaagttgtagggagggagggcagcaaagaaagcaagcaagaaagaagccgattccactggtggttaaggttttggattaaaggagagaggtgcagagaaaaaaaggttgcaactccctgggccaagcagtagcgcagcaagttcagcaccaatggcagccatatgaaatataaggcaaagcagataaaaagcttaattttttttcaagaaggtaaaggcaatgacagaaaagtgaggagggtcagaggtgtacagatatggatgagggctgaaaagaggagcaggaaggcatgccccatctgtgctacaagggtcggaatggacttgataggacatttgactatgcaacacggaagttatttcaagatatccttttttaactatgctgccgttgctgatcatttgcatttttacatttttcacattatactacagttgaagatacataggtgtcatggtcgggcgcacgtcacggtcatgttgaattgtaacttttctctggttcttgagccagcaacatgaccggtttaatggtgtttttgagaattctgttgattccttctaaatgttaaaattatgttcactaccaggttattagcttttgtactgcacttccacacacatacatattttttcttttttcttataccttccatgtcgtctggtccagaacttgtacactgtggggttaattatggatatggatctatgaaatattattagcatgaaaatatacatggcgtgtatggaacaaaatggactctaatgctttttcttgtgatgtaggatgcttttggcgctgagaggaggaaagctataagatgctaaatctctccattgcatacggaaaaacgtaggaagatttttgttaaggaagcaaaagatacactgaaactctggtatagcaatagaaagaaggttctggcttggcaagtgaaacagaaacagctagcacatgagaagtgtgaattttatactttgctttggc

SEQ ID NO: 75854 - DNA, 2606 bp, Zea Mays
cgtgacgccctctcccatgacgctttgtgcgcgtgagtctgcgactgccgacagtcgtcgccgtactggagcccaatctgctggctccccctcgacctcaccaccatgcccccatcggaccccgtcgcgccgtgcgtggcggcgccggtgatggacgcggcgttgctagccgtcatcgtcccgcctcgacgttcgatccgtgctcaccacggttggtgctcgcacgcaatgtggcgtggcgaggttactgcgggcgtcgcggaggtggagggggaaggggaggacgagggcacgggcaagagagcgcatcgcggtggacggtctcgagggaccttgggtgatccgggtgcttggtttcttggttctgcggctttcgctgctgttggatttgccgagtcggagccaccggagatgaccgtcgacgagctgaagctgcaggcaagggccagcggcggccacggcctaaggaccagttccccgtcggcatgcgcgtgctcgccgtcgacgacgacccgacctgcctcaagtgacaacaatgggacaggcagccacggccctgagctgctgagggagaagaaggaccagtttgaccttgtgatcagcaacgtccacatgccggacatggacggcttcaagctcctcgagcttgtgggcctcgagatggaccttccggggattacctctgcacaaaaccccattccaattgatatggttttgttactcgattatgctttggtcccagcccgccatcagtcagatttacctctgaaatgtggcatccaaatgttatgttttctgacatcatgcataatatttgaggaaatgccagtctatcctgatgggcgggtttgcatctctattcttcatccacccagtgaagatccaaacggttatgagctcgcaaagagaaaattaccttgtagtctcattgtttcagtttatggtccaatttacaatggcttcactgtaaatgggaaaacaactcgggattattatattgtttttggtttggatttggaatggtttggggtccacaacgatgatgcgtcagagctgttccaagggttggatgatttccattcccctgctgtcaatttgactaggctcgccgtctccgctctgcccaactggcaccaagcagccaatggaacttgagcatccaatggatgatttccattcccctgctgccaattctccaaactgctttgacccttcaactcaatccgcatgtacccagcaggattctttgcttgctcttctacttctgaaaattcgcaaaatggatagataattccagttaattttaatccattacagtagcctgttgtggcagcaaacagcgaccgggtgcggaagccggaagggagaggcgcttggttgacccggaacggacggcaagacaccgccgggggttcactgcaaccgcacgcgtggtggccggtgtgggaaggagcccactgctcaagcagcgacgacttccgcaacttctcaggccaagttgtagggagggagggcagcaaagaaagcaagcaagaaagaagccgattccactggtggttaaggttttggattaaaggagagaggtgcagagaaaaaaaggcaatcttactcttaatctctgtgtccacatcacttccgatcatgctgtgatcgacagaagtacgggtgccatggataagtgcctcctcctactcaccaaagtaataaggagcagctgctgcaggttgcaactccctgggccaagcagtagcgcagcaagttcagcaccaatggcagccatatgaaatataaggcaaagcagataaaaagcttaattttttttcaagaaggtaaaggcaatgacagaaaagtgaggagggtcagaggtgtacagatatggatgagggctgaaaagaggagcaggaaggcatgccccatctgtgctacaagggtcggaatggacttgataggacatttgactatgcaacacggaagttatttcaagatatccttttttaactatgctgccgttgctgatcatttgcatttttacatttttcacattatactacagttgaagatacataggtgtcatggtcgggcgcacgtcacggtcatgttgaattgtaacttttctctggttcttgagccagcaacatgaccggtttaatggtgtttttgagaattctgttgattccttctaaatgttaaaattatgttcactaccaggttattagcttttgtactgcacttccacacacatacatattttttcttttttcttataccttccatgtcgtctggtccagaacttgtacactgtggggttaattatggatatggatctatgaaatattattagcatgaaaatatacatggcgtgtatggaacaaaatggactctaatgctttttcttgtgatgtaggatgcttttggcgctgagaggaggaaagctataagatgctaaatctctccattgcatacggaaaaacgtaggaagatttttgttaaggaagcaaaagatacactgaaactctggtatagcaatagaaagaaggttctggcttggcaagtgaaacagaaacagctagcacatgagaagtgtgaattttatactttgctttggc

SEQ ID NO: 75855 - DNA, 2499 bp, Zea Mays
caccctcccccgtgacgccctctcccatgacgctttgtgcgcgtgagtctgcgactgccgacagtcgtcgccgtactggagcccaatctgctggctccccctcgacctcaccaccatgcccccatcggaccccgtcgcgccgtgcgtggcggcgccggtgatggacgcggcgttgctagccgtcatcgtcccgcctcgacgttcgatccgtgctcaccacggttggtgctcgcacgcaatgtggcgtggcgaggttactgcgggcgtcgcggaggtggagggggaaggggaggacgagggcacgggcaagagagcgcatcgcggtggacggtctcgagggaccttgggtgatccgggtgcttggtttcttggttctgcggctttcgctgctgttggatttgccgagtcggagccaccggagatgaccgtcgacgagctgaagctgcaggcaagggccagcggcggccacggcctaaggaccagttccccgtcggcatgcgcgtgctcgccgtcgacgacgacccgacctgcctcaagtgacaacaatgggacaggcagccacggccctgagctgctgagggagaagaaggaccagtttgaccttgtgatcagcaacgtccacatgccggacatggacggcttcaagctcctcgagcttgtgggcctcgagatggaccttccggggattacctctgcacaaaaccccattccaattgatatggttttgttactcgattatgctttggtcccagcccgccatcagtcagatttacctctgaaatgtggcatccaaatgttatgttttctgacatcatgcataatatttgaggaaatgccagtctatcctgatgggcgggtttgcatctctattcttcatccacccagtgaagatccaaacggttatgagctcgcaagtgagcgatggacacctgtgcacacatttatggtccaatttacaatggcttcactgtaaatgggaaaacaactcgggattattatattgtttttggtttggatttggaatggtttggggtccacaacgatgatgcgtcagagctgttccaagggttggatgatttccattcccctgctgtcaatttgactaggctcgccgtctccgctctgcccaactggcaccaagcagccaatggaacttgagcatccaatggatgatttccattcccctgctgccaattctccaaactgctttgacccttcaactcaatccgcatgtacccagtaaatgttcaatctgaatttggatcattgctagcaggattctttgcttgctcttctacttctgaaaattcgcaaaatggatagataattccagttaattttaatccattacagcctgttgtggcagcaaacagcgaccgggtgcggaagccggaagggagaggcgcttggttgacccggaacggacggcaagacaccgccgggggttcactgcaaccgcacgcgtggtggccggtgtgggaaggagcccactgctcaagcagcgacgacttccgcaacttctcaggccaagttgtagggagggagggcagcaaagaaagcaagcaagaaagaagccgattccactggtggttaaggttttggattaaaggagagaggttgcaactccctgggccaagcagtagcgcagcaagttcagcaccaatggcagccatatgaaatataaggcaaagcagataaaaagcttaattttttttcaagaaggtaaaggcaatgacagaaaagtgaggagggtcagaggtgtacagatatggatgagggctgaaaagaggagcaggaaggcatgccccatctgtgctacaagggtcggaatggacttgataggacatttgactatgcaacacggaagttatttcaagatatccttttttaactatgctgccgttgctgatcatttgcatttttacatttttcacattatactacagttgaagatacataggtgtcatggtcgggcgcacgtcacggtcatgttgaattgtaacttttctctggttcttgagccagcaacatgaccggtttaatggtgtttttgagaattctgttgattccttctaaatgttaaaattatgttcactaccaggttattagcttttgtactgcacttccacacacatacatattttttcttttttcttataccttccatgtcgtctggtccagaacttgtacactgtggggttaattatggatatggatctatgaaatattattagcatgaaaatatacatggcgtgtatggaacaaaatggactctaatgctttttcttgtgatgtaggatgcttttggcgctgagaggaggaaagctataagatgctaaatctctccattgcatacggaaaaacgtaggaagatttttgttaaggaagcaaaagatacactgaaactctggtatagcaatagaaagaaggttctggcttggcaagtgaaacagaaacagctagcacatgagaagtgtgaattttatactttgctttggc

SEQ ID NO: 75856 - DNA, 2294 bp, Zea Mays
cacacaccctcccccgtgacgccctctcccatgacgctttgtgcgcgtgagtctgcgactgccgacagtcgtcgccgtactggagcccaatctgctggctccccctcgacctcaccaccatgcccccatcggaccccgtcgcgccgtgcgtggcggcgccggtgatggacgcggcgttgctagccgtcatcgtcccgcctcgacgttcgatccgtgctcaccacggttggtgctcgcacgcaatgtggcgtggcgaggttactgcgggcgtcgcggaggtggagggggaaggggaggacgagggcacgggcaagagagcgcatcgcggtggacggtctcgagggaccttgggtgatccgggtgcttggtttcttggttctgcggctttcgctgctgttggatttgccgagtcggagccaccggagatgaccgtcgacgagctgaagctgcaggcaagggccagcggcggccacggcctaaggaccagttccccgtcggcatgcgcgtgctcgccgtcgacgacgacccgacctgcctcaagtgacaacaatgggacaggcagccacggccctgagctgctgagggagaagaaggaccagtttgaccttgtgatcagcaacgtccacatgccggacatggacggcttcaagctcctcgagcttgtgggcctcgagatggaccttccggggattacctctgcacaaaaccccattccaattgatatggttttgttactcgattatgctttggtcccagcccgccatcagtcagatttacctctgaaatgtggcatccaaatgttatgttttctgacatcatgcataatatttgaggaaatgccagtctatcctgatgggcgggtttgcatctctattcttcatccacccagtgaagatccaaacggttatgagctcgcaaagagaaaattaccttgtagtctcattgtttcagtttatggtccaatttacaatggcttcactgtaaatgggaaaacaactcgggattattatattgtttttggtttggatttggaatggtttggggtccacaacgatgatgcgtcagagctgttccaagggttggatgatttccattcccctgctgtcaatttgactaggctcgccgtctccgctctgcccaactggcaccaagcagccaatggaacttgagcatccaatggatgatttccattcccctgctgccaattctccaaactgctttgacccttcaactcaatccgcatgtacccaggattctttgcttgctcttctacttctgaaaattcgcaaaatggatagataattccagttaattttaatccattacagcctgttgtggcagcaaacagcgaccgggtgcggaagccggaagggagaggcgcttggttgacccggaacggacggcaagacaccgccgggggttcactgcaaccgcacgcgtggtggccggtgtgggaaggagcccactgctcaagcagcgacgacttccgcaacttctcaggccaagttgtagggagggagggcagcaaagaaagcaagcaagaaagaagccgattccactggtggttaaggttttggattaaaggagagaggtgcagagaaaaaaaggttgcaactccctgggccaagcagtagcgcagcaagttcagcaccaatggcagccatatgaaatataaggcaaagcagataaaaagcttaattttttttcaagaaggtaaaggcaatgacagaaaagtgaggagggtcagaggtgtacagatatggatgagggctgaaaagaggagcaggaaggcatgccccatctgtgctacaagggtcggaatggacttgataggacatttgactatgcaacacggaagttatttcaagatatccttttttaactatgctgccgttgctgatcatttgcatttttacatttttcacattatactacagttgaagatacataggtgtcatggtcgggcgcacgtcacggtcatgttgaattgtaacttttctctggttcttgagccagcaacatgaccggtttaatggtgtttttgagaattctgttgattccttctaaatgttaaaattatgttcactaccaggatgcttttggcgctgagaggaggaaagctataagatgctaaatctctccattgcatacggaaaaacgtaggaagatttttgttaaggaagcaaaagatacactgaaactctggtatagcaatagaaagaaggttctggcttggcaagtgaaacagaaacagctagcacatgagaagtgtgaattttatactttgctttggc

SEQ ID NO: 75857 - DNA, 2431 bp, Zea Mays
cccccacacaccctcccccgtgacgccctctcccatgacgctttgtgcgcgtgagtctgcgactgccgacagtcgtcgccgtactggagcccaatctgctggctccccctcgacctcaccaccatgcccccatcggaccccgtcgcgccgtgcgtggcggcgccggtgatggacgcggcgttgctagccgtcatcgtcccgcctcgacgttcgatccgtgctcaccacggttggtgctcgcacgcaatgtggcgtggcgaggttactgcgggcgtcgcggaggtggagggggaaggggaggacgagggcacgggcaagagagcgcatcgcggtggacggtctcgagggaccttgggtgatccgggtgcttggtttcttggttctgcggctttcgctgctgttggatttgccgagtcggagccaccggagatgaccgtcgacgagctgaagctgcaggcaagggccagcggcggccacggcctaaggaccagttccccgtcggcatgcgcgtgctcgccgtcgacgacgacccgacctgcctcaagtgacaacaatgggacaggcagccacggccctgagctgctgagggagaagaaggaccagtttgaccttgtgatcagcaacgtccacatgccggacatggacggcttcaagctcctcgagcttgtgggcctcgagatggaccttccggggattacctctgcacaaaaccccattccaattgatatggttttgttactcgattatgctttggtcccagcccgccatcagtcagatttacctctgaaatgtggcatccaaatgtctatcctgatgggcgggtttgcatctctattcttcatccacccagtgaagatccaaacggttatgagctcgcaaagagaaaattaccttgtagtctcattgtttcagtttatggtccaatttacaatggcttcactgtaaatgggaaaacaactcgggattattatattgtttttggtttggatttggaatggtttggggtccacaacgatgatgcgtcagagctgttccaagggttggatgatttccattcccctgctgtcaatttgactaggctcgccgtctccgctctgcccaactggcaccaagcagccaatggaacttgagcatccaatggatgatttccattcccctgctgccaattctccaaactgctttgacccttcaactcaatccgcatgtacccaggattctttgcttgctcttctacttctgaaaattcgcaaaatggatagataattccagttaattttaatccattacagcgaccgggtgcggaagccggaagggagaggcgcttggttgacccggaacggacggcaagacaccgccgggggttcactgcaaccgcacgcgtggtggccggtgtgggaaggagcccactgctcaagcagcgacgacttccgcaacttctcaggccaagttgtagggagggagggcagcaaagaaagcaagcaagaaagaagccgattccactggtggttaaggttttggattaaaggagagaggtgcagagaaaaaaaggttgcaactccctgggccaagcagtagcgcagcaagttcagcaccaatggcagccatatgaaatataaggcaaagcagataaaaagcttaattttttttcaagaaggtaaaggcaatgacagaaaagtgaggagggtcagaggtgtacagatatggatgagggctgaaaagaggagcaggaaggcatgccccatctgtgctacaagggtcggaatggacttgataggacatttgactatgcaacacggaagttatttcaagatatccttttttaactatgctgccgttgctgatcatttgcatttttacatttttcacattatactacagttgaagatacataggtgtcatggtcgggcgcacgtcacggtcatgttgaattgtaacttttctctggttcttgagccagcaacatgaccggtttaatggtgtttttgagaattctgttgattccttctaaatgttaaaattatgttcactaccaggttattagcttttgtactgcacttccacacacatacatattttttcttttttcttataccttccatgtcgtctggtccagaacttgtacactgtggggttaattatggatatggatctatgaaatattattagcatgaaaatatacatggcgtgtatggaacaaaatggactctaatgctttttcttgtgatgtaggatgcttttggcgctgagaggaggaaagctataagatgctaaatctctccattgcatacggaaaaacgtaggaagatttttgttaaggaagcaaaagatacactgaaactctggtatagcaatagaaagaaggttctggcttggcaagtgaaacagaaacagctagcacatgagaagtgtgaattttatactttgctttggc

SEQ ID NO: 75858 - DNA, 2017 bp, Zea Mays
ccccccacacaccctcccccgtgacgccctctcccatgacgctttgtgcgcgtgagtctgcgactgccgacagtcgtcgccgtactggagcccaatctgctggctccccctcgacctcaccaccatgcccccatcggaccccgtcgcgccgtgcgtggcggcgccggtgatggacgcggcgttgctagccgtcatcgtcccgcctcgacgttcgatccgtgctcaccacggttggtgctcgcacgcaatgtggcgtggcgaggttactgcgggcgtcgcggaggtggagggggaaggggaggacgagggcacgggcaagagagcgcatcgcggtggacggtctcgagggaccttgggtgatccgggtgcttggtttcttggttctgcggctttcgctgctgttggatttgccgagtcggagccaccggagatgaccgtcgacgagctgaagctgcaggcaagggccagcggcggccacggcctaaggaccagttccccgtcggcatgcgcgtgctcgccgtcgacgacgacccgacctgcctcaagtgacaacaatgggacaggcagccacggccctgagctgctgagggagaagaaggaccagtttgaccttgtgatcagcaacgtccacatgccggacatggacggcttcaagctcctcgagcttgtgggcctcgagatggaccttccggggattacctctgcacaaaaccccattccaattgatatggttttgttactcgattatgctttggtcccagcccgccatcagtcagatttacctctgaaatgtggcatccaaatgttatgttttctgacatcatgcataatatttgaggaaatgccagtctatcctgatgggcgggtttgcatctctattcttcatccacccagtgaagatccaaacggttatgagctcgcaaagagaaaattaccttgtagtctcattgtttcagtttatggtccaatttacaatggcttcactgtaaatgggaaaacaactcgggattattatattgtttttggtttggatttggaatggtttggggtccacaacgatgatgcgtcagagctgttccaagggttggatgatttccattcccctgctgtcaatttgactaggctcgccgtctccgctctgcccaactggcaccaagcagccaatggaacttgagcatccaatggatgatttccattcccctgctgccaattctccaaactgctttgacccttcaactcaatccgcatgtacccagtaaatgttcaatctgaatttggatcattgctagcaggattctttgcttgctcttctacttctgaaaattcgcaaaatggatagataattccagttaattttaatccattacagcctgttgtggcagcaaacagcgaccgggtgcggaagccggaagggagaggcgcttggttgacccggaacggacggcaagacaccgccgggggttcactgcaaccgcacgcgtggtggccggtgtgggaaggagcccactgctcaagcagcgacgacttccgcaacttctcaggccaagttgtagggagggagggcagcaaagaaagcaagcaagaaagaagccgattccactggtggttaaggttttggattaaaggagagaggttgcaactccctgggccaagcagtagcgcagcaagttcagcaccaatggcagccatatgaaatataaggcaaagcagataaaaagcttaattttttttcaagaaggtaaaggcaatgacagaaaagtgaggagggtcagaggtgtacagatatggatgagggctgaaaagaggagcaggaaggatgcttttggcgctgagaggaggaaagctataagatgctaaatctctccattgcatacggaaaaacgtaggaagatttttgttaaggaagcaaaagatacactgaaactctggtatagcaatagaaagaaggttctggcttggcaagtgaaacagaaacagctagcacatgagaagtgtgaattttatactttgctttggc

SEQ ID NO: 75859 - DNA, 2518 bp, Zea Mays
ccccccacacaccctcccccgtgacgccctctcccatgacgctttgtgcgcgtgagtctgcgactgccgacagtcgtcgccgtactggagcccaatctgctggctccccctcgacctcaccaccatgcccccatcggaccccgtcgcgccgtgcgtggcggcgccggtgatggacgcggcgttgctagccgtcatcgtcccgcctcgacgttcgatccgtgctcaccacggttggtgctcgcacgcaatgtggcgtggcgaggttactgcgggcgtcgcggaggtggagggggaaggggaggacgagggcacgggcaagagagcgcatcgcggtggacggtctcgagggaccttgggtgatccgggtgcttggtttcttggttctgcggctttcgctgctgttggatttgccgagtcggagccaccggagatgaccgtcgacgagctgaagctgcaggcaagggccagcggcggccacggcctaaggaccagttccccgtcggcatgcgcgtgctcgccgtcgacgacgacccgacctgcctcaagtgacaacaatgggacaggcagccacggccctgagctgctgagggagaagaaggaccagtttgaccttgtgatcagcaacgtccacatgccggacatggacggcttcaagctcctcgagcttgtgggcctcgagatggaccttccggggattacctctgcacaaaaccccattccaattgatatggttttgttactcgattatgctttggtcccagcccgccatcagtcagatttacctctgaaatgtggcatccaaatgttatgttttctgacatcatgcataatatttgaggaaatgccagtctatcctgatgggcgggtttgcatctctattcttcatccacccagtgaagatccaaacggttatgagctcgcaaagagaaaattaccttgtagtctcattgtttcagtttatggtccaatttacaatggcttcactgtaaatgggaaaacaactcgggattattatattgtttttggtttggatttggaatggtttggggtccacaacgatgatgcgtcagagctgttccaagggttggatgatttccattcccctgctgtcaatttgactaggctcgccgtctccgctctgcccaactggcaccaagcagccaatggaacttgagcatccaatggatgatttccattcccctgctgccaattctccaaactgctttgacccttcaactcaatccgcatgtacccagtaaatgttcaatctgaatttggatcattgctagcaggattctttgcttgctcttctacttctgaaaattcgcaaaatggatagataattccagttaattttaatccattacagcaaacagcgaccgggtgcggaagccggaagggagaggcgcttggttgacccggaacggacggcaagacaccgccgggggttcactgcaaccgcacgcgtggtggccggtgtgggaaggagcccactgctcaagcagcgacgacttccgcaacttctcaggccaagttgtagggagggagggcagcaaagaaagcaagcaagaaagaagccgattccactggtggttaaggttttggattaaaggagagaggtgcagagaaaaaaaggttgcaactccctgggccaagcagtagcgcagcaagttcagcaccaatggcagccatatgaaatataaggcaaagcagataaaaagcttaattttttttcaagaaggtaaaggcaatgacagaaaagtgaggagggtcagaggtgtacagatatggatgagggctgaaaagaggagcaggaaggcatgccccatctgtgctacaagggtcggaatggacttgataggacatttgactatgcaacacggaagttatttcaagatatccttttttaactatgctgccgttgctgatcatttgcatttttacatttttcacattatactacagttgaagatacataggtgtcatggtcgggcgcacgtcacggtcatgttgaattgtaacttttctctggttcttgagccagcaacatgaccggtttaatggtgtttttgagaattctgttgattccttctaaatgttaaaattatgttcactaccaggttattagcttttgtactgcacttccacacacatacatattttttcttttttcttataccttccatgtcgtctggtccagaacttgtacactgtggggttaattatggatatggatctatgaaatattattagcatgaaaatatacatggcgtgtatggaacaaaatggactctaatgctttttcttgtgatgtaggatgcttttggcgctgagaggaggaaagctataagatgctaaatctctccattgcatacggaaaaacgtaggaagatttttgttaaggaagcaaaagatacactgaaactctggtatagcaatagaaagaaggttctggcttggcaagtgaaacagaaacagctagcacatgagaagtgtgaattttatactttgctttggc

SEQ ID NO: 75860 - DNA, 1292 bp, Zea Mays
gagtcctctccctgctcgccatggccctggtcctcgcatcgctgtgtgtagcggaagcatggtgagttttggtcgcgggcatggtcgtgcgacttgggatctgggcacgctgttgtggactccccatcgatgcccctcctgtcctaactcgaccatcctagcctgcgcatgtcgtcgaatcgtcggattccatcccccatggcgcttccatttcctcgccattccacgtcaccagcttcgttccaattcactggccatctttctctccacgtcatagttctattaagggaaacgatgttgcttgagtattggtcaggatgtgtgtagagatgagcttgaagatgggactgtggatagggaagatagtgaagttccgtatgtcactcatcagatgttcgacgaaaaccccaaaccaaaaatcatcggtgttcttgcaaatttgagccgagtatagttcgggagaagtctatggatgtcaattggtgaagaagtgaggcccatgtgcatcgcttatcaagtgctcggtcgaagacttcaatcgaaggtcgtcatcgttcgtgtgatgatcgagtcaaattgcaatatggtacgataattaatcacgtgatgcggaggatcataactgagtcgaccacaagatgctggaaagcgtgagccattcgcaagatgatgctgatgaacgaaactgaagatggacacacaaagcaagtatcggaacaaaagctgatcgccaagtggacgtcacctaacaaacactaatgtagtgtttattctaggcaagccccgatgcatttgccacctccttgctgttttaaaatttttatcaccttgaatgatgcattaggtaataggagttgtgtgattaaacaattgatgcatttccttccttgattaaacaaccctaatacctattttatgaaaatttagtgatgcttagccctgcttattaatttaggatggtttttaaaagatgatgtgtaacacgggatatgggagtttgtgaaataaaaggacttgtgatgatgaacccattgtcgccatgatggtttcatcattcaagtagggtatctctctcaggtatcaagttttgggaaataatatgtaatgtagaccagacgttgagcaagaaagtttgcccgtctgtgtctattaaggaccgttcgatgtaggcctgttgtggtggagactttgcaattatccacatgctccgataagcctgaacccggctattccatacgtgaaaagacaaccgcgcactgggcatgggagatggtgggagtagcgtgtaccct

SEQ ID NO: 75861 - DNA, 1331 bp, Zea Mays
gagtcctctccctgctcgccatggccctggtcctcgcatcgctgtgtgtagcggaagcatggtgagttttggtcgcgggcatggtcgtgcgacttgggatctgggcacgctgttgtggactccccatcgatgcccctcctgtcctaactcgaccatcctagcctgcgcatgtcgtcgaatcgtcggattccatcccccatggcgcttccatttcctcgccattccacgtcaccagcttcgttccaattcactggccatctttctctccacgtcatagttctattaagggaaacgatgttgcttgagtattggtcaggatgtgtgtagagatgagcttgaagatgggactgtggatagggaagatagtgaagttccgtatgtcactcatcagatgttcgacgaaaaccccaaaccaaaaatcatcggtgttcttgcaaatttgagccgagtatagttcgggagaagtctatggatgtcaattggtgaagaagtgaggcccatgtgcatcgcttatcaagtgctcggtcgaagacttcaatcgaaggtcgtcatcgttcgtgtgatgatcgagtcaaattgcaatatggcgtgctgtgtgatgagctccatattcttactattttaggtacgataattaatcacgtgatgcggaggatcataactgagtcgaccacaagatgctggaaagcgtgagccattcgcaagatgatgctgatgaacgaaactgaagatggacacacaaagcaagtatcggaacaaaagctgatcgccaagtggacgtcacctaacaaacactaatgtagtgtttattctaggcaagccccgatgcatttgccacctccttgctgttttaaaatttttatcaccttgaatgatgcattaggtaataggagttgtgtgattaaacaattgatgcatttccttccttgattaaacaaccctaatacctattttatgaaaatttagtgatgcttagccctgcttattaatttaggatggtttttaaaagatgatgtgtaacacgggatatgggagtttgtgaaataaaaggacttgtgatgatgaacccattgtcgccatgatggtttcatcattcaagtagggtatctctctcaggtatcaagttttgggaaataatatgtaatgtagaccagacgttgagcaagaaagtttgcccgtctgtgtctattaaggaccgttcgatgtaggcctgttgtggtggagactttgcaattatccacatgctccgataagcctgaacccggctattccatacgtgaaaagacaaccgcgcactgggcatgggagatggtgggagtagcgtgtaccct

SEQ ID NO: 75862 - DNA, 1759 bp, Zea Mays
tccgattgcccaaggacatcggataaaccacttaaaaccagaaccgcgggattaagtaacacaaatcacacacacaacatttttgcagcggaaatcttattaccaaattttacaggttacaaaaattttacattattgataccagttgtggtagaacctcccaagttattgggcccacatgcacctgtccttgtctcaaagacctcagacaactatgcatgtgcaccagataacttaacacgatctgtccgattgcccaaggacatcggataaaccacttacaaccagaactgcaggattaagtaacacaaatcacacacacaacttttttgcagcggaaatcttattaccaaattttacaggttacaaaaattttacattattttatcggagtgattacaaaagtataagtttgaaatatatgctagctcaagtgaccatcctcattaagaagtatagaagaagtacttagacttataagaaggccgagcccaccggcacttaacaccatcatcagcagcacaaaactataccctgaaaaacaacagggaataaaaccctgagtatggaattactcagcaagacttacccgactaaagaaaagactctcaagggtatgctggaattgggaatcaaggagaggctttagcaagaatcaacttagatacttttgtagaaatagcttactaaagtgaatccttgctttcaatgttttaacaccagattaaatattaatagactctgtttgcatctggtctaatttcaccatctcatcaatacaacatcatttttattcttgaggttcacatcgtgacttaggttgtagggaagtgatcaagtcttcataaccgcgaaggtacgacgatctgaatcgattatactcagctgaggatctccgatcacacgacatatgtagcacttaacccttgcatatgtcaacccaccaccggggttcttaagaccagatcaggttcacgtgaaccgagagcacagatacaccaccgtccagcctcttgccacggaaggtacacgctactctcaccaccgctccacgcccattctgtgttatcttattctggccttagtctgcccgagataaggcttacccatgacgaggcatgtgaccagttaaagggtcctcgatcagcatgcctacatacgcattcaatccttaatcaacctgggtagaacatcacctgttcctagcccaagttccgatttaagtacttccatccttaggattgtttgtgttccttaggacgaaaagagcatcacaggaaactttgcagtaagatcccaccatgctcccaatgaaaatatattcttgcaggtagaagtcatccttcctcaggataacccctgagctaggcagtattgcaaaagacaacctctatccacaagatctaagcaggctaagcatttttgcaaatcatatttttgatacttcaccagaagtatctataaaggtatggatatcaaggaaggcaatgcatcaaagggtttccaaacaactcctataaacctaatgcacatttcactagacttaaagtgtgcaaaaattatttaaaaacacaaggaaggggttgcatgcaccgggcttgcctgggtaacactatgttagtgtttgttagacgacgtccacttgacgatcatccttgtcctaacacttgatcaggcatgttcgttcataaacatctccatgcggagtagcccgcgcttggggtcgacttgagtcatctttccgcatcacgtgattaat

SEQ ID NO: 75863 - DNA, 3626 bp, Zea Mays
aaattatcagtgcagaaaacagtttatttctgtctgttgttctcgcccggatccaaatcttcggatgtaaccaattattaaacaattcggttcccactcgtccatcgtaaaatcgcgtacgaggatctataattgagcctcgattcactggtaaatcattcgtggccgtggaaccatatacttagaccacagataaatttattagatttttgaatcgaatcaactatcgcaattaccgtcgactcttttgttatagctagaaatcccggttcaaaaatatatgtgcttctttattaaaaaaaagaaataataaaaaaaagaaaatatcctaccgttctaatctccagccgcctagccgccctaccctgctgattttttcagcaccgccccggctccattcttatctgtgcgcgcgtctcatctctcccctcgtcttctccctttgctcagctgtggagcttgccacccggccgcctagctccgttcccagacgcgcgcagctcctgcgcgacctccctcccagctcccacgcgcgtccgaactcgtccccatggtgccggccgagtcccagcccggagctctccctgccgagctcgcccccatgacgcccagccggagttccgctcggtgctcctccttcctcctcatctgccgcgccctgctcggcttctccggtgctggccgctgctccaagtcttcatcccagccatggcgcgcccaagttcctccattgctcgcgccctgcttttctccattgctgcgcgggcgcgcccctggagcttcctcgccgcgcggcctgctcctctgccccagctcgtgttgctcccttccatagcagctgagctctctggctcggattccgctcggctgaccgcgcagctcctgcgcgtgcttcctctctgcttctctctccctctcggcgctctgctcccatgccgcgcgcccctgtcctatttccctgcgcgccgccgtgccctcagctcgccggctgcgacccctgctcagggtttcctggtgccgtgcttctgcgcgcgctcgctccagctcgaatttcctctgcccagccggattcctctacgccgaggccctattcgaccgcgcgtccttgggttccagctcgccgtcgaagctctcctgccgcgcacggctcccatgtttgccgaactcgtggtcacggtctcgccttgctgccgcagccgcgcctactgccgcgcacggcctgctccgttgtgagcgctctgcttcctcgccgagctcgtccctgcacgccgaggtcgcgcgcagctctcccagctcgtcggtgttcccagctcgccctgtctgcgcgtcgcgcacccttgtcgtggttttctgcttccttgtcgcgcgcgacgcgtttagttgtccctcgtcgtgccgagttctcctctgcacgcagtcgtgtcctgttttctgcctgccagtgtgccctctcagctcgctcggctttaattcccaatcgagtcgtcgaacccgtcatcccttgctcaacccccacctcgccagctcgctctaaacacgatctcgtcgtccgcaagtcaccaaaaaacccaagaatcgggtgaagacgaagctaacagcgtgagattcaccaagtgctcgacaacagctcgaacaagtcgtcgatcgtcatcctcgtctacgccaagctctgagaagattaggcgcagaagaaaatcaatcggtacgcggccggagaattctcgatgcggataaagatgtagcgcgattcgacgcagcactcaccctattttcggtgaaatgctgagctgaaaggcgtcgtcgatttcgtgatttcacgtcgaatttaataagggtaagttaattcgtattccagtcaattaagtctataaatagattaaatagaattattggtcacaataaatgttattaatttagcatgtgtatattgtgatgatcgatttagataaatcgataaatcaagtaattaagatacacaatttaaagagttaataaaaagataggaataaaaatagatattccagtgttattatgtcaatttgattaatggatgtagtcgatgccctgctgtgatatccatggtgcttaaagcttggttttaagtgtttcatcctttttagtgtagattatctatattatacttgttatacatgtgctcatacatgtgcatcgtgcatctcatgaggtacgataaataatcgcgtgatgcggaagacgagccaagtcgaccccaagcgtgggctaacccgcaggatgatgcagatggataacccgatcaagtaccaagacaaaggctgctcgtcaagcgaacgtcgtctaacaacactaacctagtgttactcaggcaagccccgatgcatttgccaccctccttgatgtttttaaaatctttctcacttgcttgatgcattaggtgatagaagttgattgataaaacaattcctgcattaccttccttgaatttgattaccttccttgatcacccattttacaaaagattttgatgcttagccttgctttagaaaaacaaaatgttttgtttttacaaaagatgatgtggcaaaagtgggtgggatgttttcgaaaataaaatttgatggtggatccatcaaggccttgatgggttcaacatcggaaaagatgtacctctgccaggtaccaaactttgggtttgaaatgattaagctgagaccgggcgggtgacttgaacgagaaaggagtctcgatgtagtgtctccgtctgagtcgattaaggaccgtctcgatgtaggcctgctgaccggggaccctttaactggtcacatgcctcgtcatgggtaagccttgcctcgggcagactaaggccagaataagataacacggaatgggcctggagcggtggcaagagtagtgtgtaccctccgtgacaagaggctggacggtggtgtatctgtgctctcggttcgcgtgaacctgatctggtcttaagaaccccggtggcgggttgacatatgcaagggttaagtgctacatatgtcgtgtgattggagatcctcagctgagtataatcgattcggattgccgtaccttcgtggttatgaagacttggtcactgacttacacgtagcaatccagtaaagatgatgggtttgttaagaaattggctagtacaggtccagtgattgaactagggtagaaagaactctagtgcaggtaattttacttaacttgacaaataaaactggatttttaaggatccacttttagtaagcatttctgcaaaacagagtctttgattattgagaagccttaccttgactcccttaaccaacatacctttgagagtcttttctttagtcgggtaagacttgctgtgtaattccatactcagggttttattccctgttgtttttcaggttctaactttgtgctgttgttgatggtgttaagtgccggtgggctcggccttcttataagcctaagtaacccttctatacttcttattgaggatgatcccttgagctagcatatatatttcaaacttatacttttgtaatcacttcgataaactaatgtaaaatttttgtaacttgtaaactttggtaataagatttccgctgcaacactattggtgtgtgtgatttgtg

SEQ ID NO: 75864 - DNA, 1358 bp, Zea Mays
  misc_feature (1)..(2): n is a, c, g, or t
nntttacctcaatttggtgcttgaatatgtgccagaaactgttcaccgtgttattaaacattacaataagatgaaccaacggatgccattgatttatgttaaactttatatgtatcagatttgtagagctttggcttaccttcacaactgcgtaggagtgtgccacagagatataaagccacaaaatattctggtgaacccacatacccatcagctgaagttgtgtgacttcggcagtgccaaagtcttggtacaaggggaaccaaatatttcatatatttgttctagatactacagagccccagagctcatatttggggctactgagtatacaacagctattgacgtgtggtctgctggttgtgtacttgctgagcttcttctaggtcagcctgtttttcctggggacagtggtgtcgatcagcttgttgaaattattaaggttctaggtactccaacacgggatgaaattaagcgcatgaatccaaactacaccgaatttaagtttccgcaaatcaaagctcacccatggcacaaaatcttccacaaaagaatgccatctgaagctgtagattttgtgtctcggcttctgcagtactcaccaaacctccggtgcacagcattggaggcgttaatccatccattctttgatgaactgcggtacccaaactcacgtctaccaaatggccgttcccttccccatctcttcaattttaaacctaatgagttgagaggagtaccagaggagtttgttgtgcaattgatccctcagcatgctaagaagcaatgtgctttcttaggagtttgagaaagcagttcaattttattccagaaaagaaaaaagagagaggatgcagcagttgagaggttacctgagtattgattacttacgttctgtttaaccgcacagtagcattagcctacagtattatcgactaggcaacgtgtgctgttatctttcacgacggcttttacatcgcaatgttctaccacggtggtgggatctttttcaccacattctgtaaagcagaagaagacgtaaatcgactggtcacccgttcttgtggtctgtatattggtctcccccaatcttgagaacacgttcttttgtttttggagatggattcatttcgtatctgtatcactatcaccaaatgaaacaagaactcatgtattcttgaactggattcagttacatgagagtcaaaccatgtcctttctctaagggaaaccgtgcaactcaacgatttgatgctccagttggatgggaatgagttttgccatgaattaggaggggtagcactattggttaatgtatattgataatataaaaaagttgtgtacaagcaacataattc

SEQ ID NO: 75865 - DNA, 1312 bp, Zea Mays
  misc_feature (1)..(1): n is a, c, g, or t
ntttacctcaatttggtgcttgaatatgtgccagaaactgttcaccgtgttattaaacattacaataagatgaaccaacggatgccattgatttatgttaaactttatatgtatcagatttgtagagctttggcttaccttcacaactgcgtaggagtgtgccacagagatataaagccacaaaatattctggtgaacccacatacccatcagctgaagttgtgtgacttcggcagtgccaaagtcttggggaaccaaatatttcatatatttgttctagatactacagagccccagagctcatatttggggctactgagtatacaacagctattgacgtgtggtctgctggttgtgtacttgctgagcttcttctaggtcaggtaatagatcaaccaagttattgtgatatatcagccaactttgaagcaacttcttcataagatacctgttgttggatagcctgtttttcctggggacagtggtgtcgatcagcttgttgaaattattaaggttctaggtactccaacacgggatgaaattaagcgcatgaatccaaactacaccgaatttaagtttccgcaaatcaaagctcacccatggcacaaaatcttccacaaaagaatgccatctgaagctgtagattttgtgtctcggcttctgcagtactcaccaaacctccggtgcacagcattggaggcgttaatccatccattctttgatgaactgcggtacccaaactcacgtctaccaaatggccgttcccttccccatctcttcaattttaaacctaatgagttgagaggagtaccagaggagtttgttgtgcaattgatccctcagcatgctaagaagcaatgtgctttcttaggagtttgagaaagcagttcaattttattccagaaaagaaaaaagagagaggatgcagcagttgagaggttacctgagtattgattacttacgttctgtttaaccgcacagtagcattagcctacagtattatcgactaggcaacgtgtgctgttatctttcacgacggcttttacatcgcaatgttctaccacggtggtgggatctttttcaccacattctgtaaagcagaagaagacgtaaatcgactggtcacccgttcttgtggtctgtatattggtctcccccaatcttgagaacacgttcttttgtttttggagatggattcatttcgtatctgtatcactatcaccaaatgaaacaagaactcatgtattcttgaactggattcagttacatgagagtcaaaccatgtcctttctctaaggtcatccacatgtct

SEQ ID NO: 75866 - DNA, 1189 bp, Zea Mays
  misc_feature (1)..(1): n is a, c, g, or t
ntttacctcaatttggtgcttgaatatgtgccagaaactgttcaccgtgttattaaacattacaataagatgaaccaacggatgccattgatttatgttaaactttatatgtatcagatttgtagagctttggcttaccttcacaactgcgtaggagtgtgccacagagatataaagccacaaaatattctggtgaacccacatacccatcagctgaagttgtgtgacttcggcagtgccaaagtcttggtacaaggggaaccaaatatttcatatatttgttctagatactacagagccccagagctcatatttggggctactgagtatacaacagctattgacgtgtggtctgctggttgtgtacttgctgagcttcttctaggtcaggttctaggtactccaacacgggatgaaattaagcgcatgaatccaaactacaccgaatttaagtttccgcaaatcaaagctcacccatggcacaaaatcttccacaaaagaatgccatctgaagctgtagattttgtgtctcggcttctgcagtactcaccaaacctccggtgcacagcattggaggcgttaatccatccattctttgatgaactgcggtacccaaactcacgtctaccaaatggccgttcccttccccatctcttcaattttaaacctaatgagttgagaggagtaccagaggagtttgttgtgcaattgatccctcagcatgctaagaagcaatgtgctttcttaggagtttgagaaagcagttcaattttattccagaaaagaaaaaagagagaggatgcagcagttgagaggttacctgagtattgattacttacgttctgtttaaccgcacagtagcattagcctacagtattatcgactaggcaacgtgtgctgttatctttcacgacggcttttacatcgcaatgttctaccacggtggtgggatctttttcaccacattctgtaaagcagaagaagacgtaaatcgactggtcacccgttcttgtggtctgtatattggtctcccccaatcttgagaacacgttcttttgtttttggagatggattcatttcgtatctgtatcactatcaccaaatgaaacaagaactcatgtattcttgaactggattcagttacatgagagtcaaaccatgtcctttctctaaggtcatccacatgtct

SEQ ID NO: 75867 - DNA, 1509 bp, Zea Mays
  misc_feature (1)..(1): n is a, c, g, or t
ntttacctcaatttggtgcttgaatatgtgccagaaactgttcaccgtgttattaaacattacaataagatgaaccaacggatgccattgatttatgttaaactttatatgtatcagatttgtagagctttggcttaccttcacaactgcgtaggagtgtgccacagagatataaagccacaaaatattctggtgaacccacatacccatcagctgaagttgtgtgacttcggcagtgccaaagtcttggtacaaggggaaccaaatatttcatatatttgttctagatactacagagccccagagctcatatttggggctactgagtatacaacagctattgacgtgtggtctgctggttgtgtacttgctgagcttcttctaggtcagcctgtttttcctggggacagtggtgtcgatcagcttgttgaaattattaaggttctaggtactccaacacgggatgaaattaagcgcatgaatccaaactacaccgaatttaagtttccgcaaatcaaagctcacccatggcacaaaatcttccacaaaagaatgccatctgaagctgtagattttgtgtctcggcttctgcagtactcaccaaacctccggtgcacagcattggaggcgttaatccatccattctttgatgaactgcggtacccaaactcacgtctaccaaatggccgttcccttccccatctcttcaattttaaacctaatggtaagttcatgctatttcgacatttgcacgggctgaaactttaaggtagtgtttggttccggagtcggttgggatggagcagctccgtccgagagattttagggaggctgatagttcaacatttaaacacttgttagagtcactctatcctacatggaaccaatccaaacaataacaattgagagcggagcagctccgtcccaccatgcttcagtaccaaacactatctaagtaaatcctgatgtaccacatcttcattgcttgaacagagttgagaggagtaccagaggagtttgttgtgcaattgatccctcagcatgctaagaagcaatgtgctttcttaggagtttgagaaagcagttcaattttattccagaaaagaaaaaagagagaggatgcagcagttgagaggttacctgagtattgattacttacgttctgtttaaccgcacagtagcattagcctacagtattatcgactaggcaacgtgtgctgttatctttcacgacggcttttacatcgcaatgttctaccacggtggtgggatctttttcaccacattctgtaaagcagaagaagacgtaaatcgactggtcacccgttcttgtggtctgtatattggtctcccccaatcttgagaacacgttcttttgtttttggagatggattcatttcgtatctgtatcactatcaccaaatgaaacaagaactcatgtattcttgaactggattcagttacatgagagtcaaaccatgtcctttctctaaggtcatccacatgtct

SEQ ID NO: 75868 - DNA, 1260 bp, Zea Mays
  misc_feature (1)..(2): n is a, c, g, or t
nntttacctcaatttggtgcttgaatatgtgccagaaactgttcaccgtgttattaaacattacaataagatgaaccaacggatgccattgatttatgttaaactttatatgtatcagatttgtagagctttggcttaccttcacaactgcgtaggagtgtgccacagagatataaagccacaaaatattctggtgaacccacatacccatcagctgaagttgtgtgacttcggcagtgccaaagtcttggtacaaggggaaccaaatatttcatatatttgttctagatactacagagccccagagctcatatttggggctactgagtatacaacagctattgacgtgtggtctgctggttgtgtacttgctgagcttcttctaggtcagcctgtttttcctggggacagtggtgtcgatcagcttgttgaaattattaaggttctaggtactccaacacgggatgaaattaagcgcatgaatccaaactacaccgaatttaagtttccgcaaatcaaagctcacccatggcacaaaatcttccacaaaagaatgccatctgaagctgtagattttgtgtctcggcttctgcagtactcaccaaacctccggtgcacagcatttcttctctctctaacagttggaggcgttaatccatccattctttgatgaactgcggtacccaaactcacgtctaccaaatggccgttcccttccccatctcttcaattttaaacctaatgagttgagaggagtaccagaggagtttgttgtgcaattgatccctcagcatgctaagaagcaatgtgctttcttaggagtttgagaaagcagttcaattttattccagaaaagaaaaaagagagaggatgcagcagttgagaggttacctgagtattgattacttacgttctgtttaaccgcacagtagcattagcctacagtattatcgactaggcaacgtgtgctgttatctttcacgacggcttttacatcgcaatgttctaccacggtggtgggatctttttcaccacattctgtaaagcagaagaagacgtaaatcgactggtcacccgttcttgtggtctgtatattggtctcccccaatcttgagaacacgttcttttgtttttggagatggattcatttcgtatctgtatcactatcaccaaatgaaacaagaactcatgtattcttgaactggattcagttacatgagagtcaaaccatgtcctttctctaaggtcatccacatgtct

SEQ ID NO: 75869 - DNA, 1080 bp, Zea Mays
  misc_feature (1)..(2): n is a, c, g, or t
nntttacctcaatttggtgcttgaatatgtgccagaaactgttcaccgtgttattaaacattacaataagatgaaccaacggatgccattgatttatgttaaactttatatgtatcagatttgtagagctttggcttaccttcacaactgcgtaggagtgtgccacagagatataaagccacaaaatattctggtgaacccacatacccatcagctgaagttgtgtgacttcggcagtgccaaagtcttgtggtgtcgatcagcttgttgaaattattaaggttctaggtactccaacacgggatgaaattaagcgcatgaatccaaactacaccgaatttaagtttccgcaaatcaaagctcacccatggcacaaaatcttccacaaaagaatgccatctgaagctgtagattttgtgtctcggcttctgcagtactcaccaaacctccggtgcacagcattggaggcgttaatccatccattctttgatgaactgcggtacccaaactcacgtctaccaaatggccgttcccttccccatctcttcaattttaaacctaatgagttgagaggagtaccagaggagtttgttgtgcaattgatccctcagcatgctaagaagcaatgtgctttcttaggagtttgagaaagcagttcaattttattccagaaaagaaaaaagagagaggatgcagcagttgagaggttacctgagtattgattacttacgttctgtttaaccgcacagtagcattagcctacagtattatcgactaggcaacgtgtgctgttatctttcacgacggcttttacatcgcaatgttctaccacggtggtgggatctttttcaccacattctgtaaagcagaagaagacgtaaatcgactggtcacccgttcttgtggtctgtatattggtctcccccaatcttgagaacacgttcttttgtttttggagatggattcatttcgtatctgtatcactatcaccaaatgaaacaagaactcatgtattcttgaactggattcagttacatgagagtcaaaccatgtcctttctctaaggtcatccacatgtct

SEQ ID NO: 75870 - DNA, 1930 bp, Zea Mays
gtgcctccctccccacgaaacccccttccccaaactaccttcgccgctctccttgatccgcaattttctcccacatctctcttctgcccacttgcctccatcttggcctccccctccactccccacccccgaacatccggcgccgtccacacccttgcaccccgactcccctcgtccttcgtggccacgatgggggcgtccatggcatcgccttaggggcgatcgatctgggagaaagtgctggagcacgtggcgtcgtaccaccagcagcaacggaggcagaagctacgcaagagcctcacctacaccggcagtgagttctcgttcgctgtccggggtcgtggggacgaccccgcctccacgtccgttggggcacagaacgaggacatgcctcttgagcacgtctttaaaatcattagatccgatggcaaaagtgtgtgtttatggttcctgagtcagatgatctttcttcagttttagatgtgatagatattagtatgaaagataaaactagaatgctatgtctgtcaaaggagctttcttcagtttcaggtactgctctgctttattagccatccagccgatggataatttctatacgtgtatcgccctgcactttcaaacacttatgttcattgtttccaatcacatattttttcttcttctcttagatttactatgtggttgtggtctcagtttggcttgtaggttaatttgtatactcatgtcattttagtttttctgtgtattttatgttgatttagtatgtcttaatttagttactttcaattcttgatgctaataatatggatagattgtgacactactttctggcttgagcagaaatgagtttgttgcatatagcagaatatagtttttgtagctggcaacaatgaccgctctttggatgatctaaaaactattctgtagtcaggtagttaaatatagctgaatatacattattatgttttattaatcttatttgttttttctgtcaaaagaacacacctctccatctttcggtgctaggtggatcaccgtctaaacaatccaccaccagaaccgccctaccccaagatagccgtagtctcctccatccaacatttcctacgcatgcagctccatctcagtcgttgtacccattcaatggcgagctggtggcagcgatgtaggagatgatccatgacgaggtgcacaagtacatgttagtggacgacacctgccaaagatacacaatttctactggtacacattttattttttcatggtgagaattaatttcttagcttgcgcaaaaccaaaggtttagtgatttgtcaaggcagaaatcagtataatgataggtgtgcttgagcttttgataattggtttatttgaacttttatctttttatgatcatgatatattgagacataaatatcttacatgtacctttgcagtttttcagttggagaaaacatttaagacaatattttctcgtttgttctccatatggggcttgttccacgccacttgaaggaagaagggaatggtggtgttaagttcggacaatacatctacacatcttggagcatcggcatcaatgttttcaatcttctcaaatttcaaattattctggtctcttcgtgcaaccataaaagtttattaagtcacttatctgagtggtctaaaagtctagcatatttttgttcctctgcctgtcgagacggatcaactgacatgaataatatccagtgaatactgcaagagctattcatgatctgccgtgaactagctagtatgatataactcagtttgtggagtgctaatgcacaaacaggaaataggatgatacttcatgtatatttttttatttcatgaaaatgaactataggatactgttcacaatccataccaagcttctgcagttatcaacatgttttctatgttc

SEQ ID NO: 75871 - DNA, 1770 bp, Zea Mays
gtgcctccctccccacgaaacccccttccccaaactaccttcgccgctctccttgatccgcaattttctcccacatctctcttctgcccacttgcctccatcttggcctccccctccactccccacccccgaacatccggcgccgtccacacccttgcaccccgactcccctcgtccttcgtggccacgatgggggcgtccatggcatcgccttaggggcgatcgatctgggagaaagtgctggagcacgtggcgtcgtaccaccagcagcaacggaggcagaagctacgcaagagcctcacctacaccggcagtgagttctcgttcgctgtccggggtcgtggggacgaccccgcctccacgtccgttggggcacagaacgaggacatgcctcttgagcacgtctttaaaatcattaggccaaagtttgtgcgaccgttgatgtgaatttcctctgggcccaactttgatccgatggcaaaagtgtgtgtttatggttcctgagtcagatgatctttcttcagttttagatgtgatagatattagtatgaaagataaaactagaatgctatgtctgtcaaaggagctttcttcagtttcaggtactgctctgctttattagccatccagccgatggataatttctatacgtgtatcgccctgcactttcaaacacttatgttcattgtttccaatcacatattttttcttcttctcttagatttactatgtggttgtggtctcagtttggcttgtaggttaatttgtatactcatgtcattttagtttttctgtgtattttatgttgatttagtatgtcttaatttagttactttcaattcttgatgctaataatatggatagattgtgacactactttctggcttgagcagaaatgagtttgttgcatatagcagaatatagtttttgtagctggcaacaatgaccgctctttggatgatctaaaaactattctgtagtcaggtagttaaatatagctgaatatacattattatgttttattaatcttatttgttttttctgtcaaaagaacacacctctccatctttcggtgctaggtggatcaccgtctaaacaatccaccaccagaaccgccctaccccaagatagctccatctcagtcgttgtacccattcaatggcgagctggtggcagcgatgtaggagatgatccatgacgaggtgcacaagtacatgttagtggacgacacctgccaaagatacacaatttctactggtacacattttattttttcatgtttttcagttggagaaaacatttaagacaatattttctcgtttgttctccatatggggcttgttccacgccacttgaaggaagaagggaatggtggtgttaagttcggacaatacatctacacatcttggagcatcggcatcaatgttttcaatcttctcaaatttcaaattattctggtctcttcgtgcaaccataaaagtttattaagtcacttatctgagtggtctaaaagtctagcatatttttgttcctctgcctgtcgagacggatcaactgacatgaataatatccagtgaatactgcaagagctattcatgatctgccgtgaactagctagtatgatataactcagtttgtggagtgctaatgcacaaacaggaaataggatgatacttcatgtatatttttttatttcatgaaaatgaactataggatactgttcacaatccataccaagcttctgcagttatcaacatgttttctatgttc

SEQ ID NO: 75872 - DNA, 1271 bp, Zea Mays
gtgcctccctccccacgaaacccccttccccaaactaccttcgccgctctccttgatccgcaattttctcccacatctctcttctgcccacttgcctccatcttggcctccccctccactccccacccccgaacatccggcgccgtccacacccttgcaccccgactcccctcgtccttcgtggccacgatgggggcgtccatggcatcgccttaggggcgatcgatctgggagaaagtgctggagcacgtggcgtcgtaccaccagcagcaacggaggcagaagctacgcaagagcctcacctacaccggcagtgagttctcgttcgctgtccggggtcgtggggacgaccccgcctccacgtccgttggggcacagaacgaggacatgcctcttgagcacgtctttaaaatcattagatccgatggcaaaagtgtgtgtttatggttcctgagtcagatgatctttcttcagttttagatgtgatagatattagtatgaaagataaaactagaatgctatgtctgtcaaaggagctttcttcagtttcagaacacacctctccatctttcggtgctaggtggatcaccgtctaaacaatccaccaccagaaccgccctaccccaagatagctccatctcagtcgttgtacccattcaatggcgagctggtggcagcgatgtaggagatgatccatgacgaggtgcacaagtacatgttagtggacgacacctgccaaagatacacaatttctactggtacacattttattttttcatgtttttcagttggagaaaacatttaagacaatattttctcgtttgttctccatatggggcttgttccacgccacttgaaggaagaagggaatggtggtgttaagttcggacaatacatctacacatcttggagcatcggcatcaatgttttcaatcttctcaaatttcaaattattctggtctcttcgtgcaaccataaaagtttattaagtcacttatctgagtggtctaaaagtctagcatatttttgttcctctgcctgtcgagacggatcaactgacatgaataatatccagtgaatactgcaagagctattcatgatctgccgtgaactagctagtatgatataactcagtttgtggagtgctaatgcacaaacaggaaataggatgatacttcatgtatatttttttatttcatgaaaatgaactataggatactgttcacaatccataccaagcttctgcagttatcaacatgttttctatgttc

SEQ ID NO: 75873 - DNA, 1698 bp, Zea Mays
gtgcctccctccccacgaaacccccttccccaaactaccttcgccgctctccttgatccgcaattttctcccacatctctcttctgcccacttgcctccatcttggcctccccctccactccccacccccgaacatccggcgccgtccacacccttgcaccccgactcccctcgtccttcgtggccacgatgggggcgtccatggcatcgccttaggggcgatcgatctgggagaaagtgctggagcacgtggcgtcgtaccaccagcagcaacggaggcagaagctacgcaagagcctcacctacaccggcagtgagttctcgttcgctgtccggggtcgtggggacgaccccgcctccacgtccgttggggcacagaacgaggacatgcctcttgagcacgtctttaaaatcattagatccgatggcaaaagtgtgtgtttatggttcctgagtcagatgatctttcttcagttttagatgtgatagatattagtatgaaagataaaactagaatgctatgtctgtcaaaggagctttcttcagtttcaggtactgctctgctttattagccatccagccgatggataatttctatacgtgtatcgccctgcactttcaaacacttatgttcattgtttccaatcacatattttttcttcttctcttagatttactatgtggttgtggtctcagtttggcttgtaggttaatttgtatactcatgtcattttagtttttctgtgtattttatgttgatttagtatgtcttaatttagttactttcaattcttgatgctaataatatggatagattgtgacactactttctggcttgagcagaaatgagtttgttgcatatagcagaatatagtttttgtagctggcaacaatgaccgctctttggatgatctaaaaactattctgtagtcaggtagttaaatatagctgaatatacattattatgttttattaatcttatttgttttttctgtcaaaagaacacacctctccatctttcggtgctaggtggatcaccgtctaaacaatccaccaccagaaccgccctaccccaagatagctccatctcagtcgttgtacccattcaatggcgagctggtggcagcgatgtaggagatgatccatgacgaggtgcacaagtacatgttagtggacgacacctgccaaagatacacaatttctactgtttttcagttggagaaaacatttaagacaatattttctcgtttgttctccatatggggcttgttccacgccacttgaaggaagaagggaatggtggtgttaagttcggacaatacatctacacatcttggagcatcggcatcaatgttttcaatcttctcaaatttcaaattattctggtctcttcgtgcaaccataaaagtttattaagtcacttatctgagtggtctaaaagtctagcatatttttgttcctctgcctgtcgagacggatcaactgacatgaataatatccagtgaatactgcaagagctattcatgatctgccgtgaactagctagtatgatataactcagtttgtggagtgctaatgcacaaacaggaaataggatgatacttcatgtatatttttttatttcatgaaaatgaactataggatactgttcacaatccataccaagcttctgcagttatcaacatgttttctatgttc

SEQ ID NO: 75874 - DNA, 1572 bp, Zea Mays
gtgcctccctccccacgaaacccccttccccaaactaccttcgccgctctccttgatccgcaattttctcccacatctctcttctgcccacttgcctccatcttggcctccccctccactccccacccccgaacatccggcgccgtccacacccttgcaccccgactcccctcgtccttcgtggccacgatgggggcgtccatggcatcgccttaggggcgatcgatctgggagaaagtgctggagcacgtggcgtcgtaccaccagcagcaacggaggcagaagctacgcaagagcctcacctacaccggcagtgagttctcgttcgctgtccggggtcgtggggacgaccccgcctccacgtccgttggggcacagaacgaggacatgcctcttgagcacgtctttaaaatcattagatccgatggcaaaagtgtgtgtttatggttcctgagtcagatgatctttcttcagttttagatgtgatagatattagtatgaaagataaaactagaatgctatgtctgtcaaaggagctttcttcagtttcaggtactgctctgctttattagccatccagccgatggataatttctatacgtgtatcgccctgcactttcaaacacttatgttcattgtttccaatcacatattttttcttcttctcttagatttactatgtggttgtggtctcagtttggcttgtaggttaatttgtatactcatgtcattttagtttttctgtgtattttatgttgatttagtatgtcttaatttagttactttcaattcttgatgctaataatatggatagattgtgacactactttctggcttgagcagaaatgagtttgttgcatatagcagaatatagtttttgtagctggcaacaatgaccgctctttggatgatctaaaaactattctgtagtcaggtagttaaatatagctgaatatacattattatgttttattaatcttatttgttttttctgtcaaaagaacacacctctccatctttcggtgctaggtggatcaccgtctaaacaatccaccaccagaaccgccctaccccaagatagtttttcagttggagaaaacatttaagacaatattttctcgtttgttctccatatggggcttgttccacgccacttgaaggaagaagggaatggtggtgttaagttcggacaatacatctacacatcttggagcatcggcatcaatgttttcaatcttctcaaatttcaaattattctggtctcttcgtgcaaccataaaagtttattaagtcacttatctgagtggtctaaaagtctagcatatttttgttcctctgcctgtcgagacggatcaactgacatgaataatatccagtgaatactgcaagagctattcatgatctgccgtgaactagctagtatgatataactcagtttgtggagtgctaatgcacaaacaggaaataggatgatacttcatgtatatttttttatttcatgaaaatgaactataggatactgttcacaatccataccaagcttctgcagttatcaacatgttttctatgttc

SEQ ID NO: 75875 - DNA, 1199 bp, Zea Mays
gtgcctccctccccacgaaacccccttccccaaactaccttcgccgctctccttgatccgcaattttctcccacatctctcttctgcccacttgcctccatcttggcctccccctccactccccacccccgaacatccggcgccgtccacacccttgcaccccgactcccctcgtccttcgtggccacgatgggggcgtccatggcatcgccttaggggcgatcgatctgggagaaagtgctggagcacgtggcgtcgtaccaccagcagcaacggaggcagaagctacgcaagagcctcacctacaccggcagtgagttctcgttcgctgtccggggtcgtggggacgaccccgcctccacgtccgttggggcacagaacgaggacatgcctcttgagcacgtctttaaaatcattagatccgatggcaaaagtgtgtgtttatggttcctgagtcagatgatctttcttcagttttagaacacacctctccatctttcggtgctaggtggatcaccgtctaaacaatccaccaccagaaccgccctaccccaagatagctccatctcagtcgttgtacccattcaatggcgagctggtggcagcgatgtaggagatgatccatgacgaggtgcacaagtacatgttagtggacgacacctgccaaagatacacaatttctactggtacacattttattttttcatgtttttcagttggagaaaacatttaagacaatattttctcgtttgttctccatatggggcttgttccacgccacttgaaggaagaagggaatggtggtgttaagttcggacaatacatctacacatcttggagcatcggcatcaatgttttcaatcttctcaaatttcaaattattctggtctcttcgtgcaaccataaaagtttattaagtcacttatctgagtggtctaaaagtctagcatatttttgttcctctgcctgtcgagacggatcaactgacatgaataatatccagtgaatactgcaagagctattcatgatctgccgtgaactagctagtatgatataactcagtttgtggagtgctaatgcacaaacaggaaataggatgatacttcatgtatatttttttatttcatgaaaatgaactataggatactgttcacaatccataccaagcttctgcagttatcaacatgttttctatgttc

SEQ ID NO: 75876 - DNA, 1531 bp, Zea Mays
gtgcctccctccccacgaaacccccttccccaaactaccttcgccgctctccttgatccgcaattttctcccacatctctcttctgcccacttgcctccatcttggcctccccctccactccccacccccgaacatccggcgccgtccacacccttgcaccccgactcccctcgtccttcgtggccacgatgggggcgtccatggcatcgccttaggggcgatcgatctgggagaaagtgctggagcacgtggcgtcgtaccaccagcagcaacggaggcagaagctacgcaagagcctcacctacaccggcagtgagttctcgttcgctgtccggggtcgtggggacgaccccgcctccacgtccgttggggcacagaacgaggacatgcctcttgagcacgtctttaaaatcattaggccaaagtttgtgcgaccgttgatgtgaatttcctctgggcccaactttgatccgatggcaaaagtgtgtgtttatggttcctgagtcagatgatctttcttcagttttagatgtgatagatattagtatgaaagataaaactagaatgctatgtctgtcaaaggagctttcttcagtttcagaacacacctctccatctttcggtgctaggtggatcaccgtctaaacaatccaccaccagaaccgccctaccccaagatagccgtagtctcctccatccaacatttcctacgcatgcagctccatctcagtcgttgtacccattcaatggcgagctggtggcagcgatgtaggagatgatccatgacgaggtgcacaagtacatgttagtggacgacacctgccaaagatacacaatttctactggtacacattttattttttcatggtgagaattaatttcttagcttgcgcaaaaccaaaggtttagtgatttgtcaaggcagaaatcagtataatgataggtgtgcttgagcttttgataattggtttatttgaacttttatctttttatgatcatgatatattgagacataaatatcttacatgtacctttgcagtttttcagttggagaaaacatttaagacaatattttctcgtttgttctccatatggggcttgttccacgccacttgaaggaagaagggaatggtggtgttaagttcggacaatacatctacacatcttggagcatcggcatcaatgttttcaatcttctcaaatttcaaattattctggtctcttcgtgcaaccataaaagtttattaagtcacttatctgagtggtctaaaagtctagcatatttttgttcctctgcctgtcgagacggatcaactgacatgaataatatccagtgaatactgcaagagctattcatgatctgccgtgaactagctagtatgatataactcagtttgtggagtgctaatgcacaaacaggaaataggatgatacttcatgtatatttttttatttcatgaaaatgaactataggatactgttcacaatccataccaagcttctgcagttatcaacatgttttctatgttc

SEQ ID NO: 75877 - DNA, 1249 bp, Zea Mays
gtgcctccctccccacgaaacccccttccccaaactaccttcgccgctctccttgatccgcaattttctcccacatctctcttctgcccacttgcctccatcttggcctccccctccactccccacccccgaacatccggcgccgtccacacccttgcaccccgactcccctcgtccttcgtggccacgatgggggcgtccatggcatcgccttaggggcgatcgatctgggagaaagtgctggagcacgtggcgtcgtaccaccagcagcaacggaggcagaagctacgcaagagcctcacctacaccggcagtgagttctcgttcgctgtccggggtcgtggggacgaccccgcctccacgtccgttggggcacagaacgaggacatgcctcttgagcacgtctttaaaatcattagatccgatggcaaaagtgtgtgtttatggttcctgagtcagatgatctttcttcagttttagatgtgatagatattagtatgaaagataaaactagaatgctatgtctgtcaaaggagctttcttcagtttcagaacacacctctccatctttcggtgctaggtggatcaccgtctaaacaatccaccaccagaaccgccctaccccaagatagctccatctcagtcgttgtacccattcaatggcgagctggtggcagcgatgtaggagatgatccatgacgaggtgcacaagtacatgttagtggacgacacctgccaaagatacacaatttctactgtttttcagttggagaaaacatttaagacaatattttctcgtttgttctccatatggggcttgttccacgccacttgaaggaagaagggaatggtggtgttaagttcggacaatacatctacacatcttggagcatcggcatcaatgttttcaatcttctcaaatttcaaattattctggtctcttcgtgcaaccataaaagtttattaagtcacttatctgagtggtctaaaagtctagcatatttttgttcctctgcctgtcgagacggatcaactgacatgaataatatccagtgaatactgcaagagctattcatgatctgccgtgaactagctagtatgatataactcagtttgtggagtgctaatgcacaaacaggaaataggatgatacttcatgtatatttttttatttcatgaaaatgaactataggatactgttcacaatccataccaagcttctgcagttatcaacatgttttctatgttc

SEQ ID NO: 75878 - DNA, 1249 bp, Zea Mays
gtgcctccctccccacgaaacccccttccccaaactaccttcgccgctctccttgatccgcaattttctcccacatctctcttctgcccacttgcctccatcttggcctccccctccactccccacccccgaacatccggcgccgtccacacccttgcaccccgactcccctcgtccttcgtggccacgatgggggcgtccatggcatcgccttaggggcgatcgatctgggagaaagtgctggagcacgtggcgtcgtaccaccagcagcaacggaggcagaagctacgcaagagcctcacctacaccggcagtgagttctcgttcgctgtccggggtcgtggggacgaccccgcctccacgtccgttggggcacagaacgaggacatgcctcttgagcacgtctttaaaatcattaggccaaagtttgtgcgaccgttgatgtgaatttcctctgggcccaactttgatccgatggcaaaagtgtgtgtttatggttcctgagtcagatgatctttcttcagttttagaacacacctctccatctttcggtgctaggtggatcaccgtctaaacaatccaccaccagaaccgccctaccccaagatagctccatctcagtcgttgtacccattcaatggcgagctggtggcagcgatgtaggagatgatccatgacgaggtgcacaagtacatgttagtggacgacacctgccaaagatacacaatttctactggtacacattttattttttcatgtttttcagttggagaaaacatttaagacaatattttctcgtttgttctccatatggggcttgttccacgccacttgaaggaagaagggaatggtggtgttaagttcggacaatacatctacacatcttggagcatcggcatcaatgttttcaatcttctcaaatttcaaattattctggtctcttcgtgcaaccataaaagtttattaagtcacttatctgagtggtctaaaagtctagcatatttttgttcctctgcctgtcgagacggatcaactgacatgaataatatccagtgaatactgcaagagctattcatgatctgccgtgaactagctagtatgatataactcagtttgtggagtgctaatgcacaaacaggaaataggatgatacttcatgtatatttttttatttcatgaaaatgaactataggatactgttcacaatccataccaagcttctgcagttatcaacatgttttctatgttc

SEQ ID NO: 75879 - DNA, 1635 bp, Zea Mays
gtgcctccctccccacgaaacccccttccccaaactaccttcgccgctctccttgatccgcaattttctcccacatctctcttctgcccacttgcctccatcttggcctccccctccactccccacccccgaacatccggcgccgtccacacccttgcaccccgactcccctcgtccttcgtggccacgatgggggcgtccatggcatcgccttaggggcgatcgatctgggagaaagtgctggagcacgtggcgtcgtaccaccagcagcaacggaggcagaagctacgcaagagcctcacctacaccggcagtgagttctcgttcgctgtccggggtcgtggggacgaccccgcctccacgtccgttggggcacagaacgaggacatgcctcttgagcacgtctttaaaatcattaggtaacttccagatctgcctagccccttgacgtttaacttgatgcccaatcggtagtttgttcattcagaccagcaaacacaactcatttgtttcttgtgaggctaggccaaagtttgtgcgaccgttgatgtgaatttcctctgggcccaactttggtatacataaattccattattgcctttaatttttttgtattctggtagatttgggcatgctaagagctaaggttgtttcatcttgcaacatattgacgtgctctatagctataaatgatatcaagttatttcatcttgcaacagatccgatggcaaaagtgtgtgtttatggttcctgagtcagatgatctttcttcagttttagaaatgagtttgttgcatatagcagaatatagtttttgtagctggcaacaatgaccgctctttggatgatctaaaaactattctgtagtcaggtagttaaatatagctgaatatacattattatgttttattaatcttatttgttttttctgtcaaaagaacacacctctccatctttcggtgctaggtggatcaccgtctaaacaatccaccaccagaaccgccctaccccaagatagctccatctcagtcgttgtacccattcaatggcgagctggtggcagcgatgtaggagatgatccatgacgaggtgcacaagtacatgttagtggacgacacctgccaaagatacacaatttctactgtttttcagttggagaaaacatttaagacaatattttctcgtttgttctccatatggggcttgttccacgccacttgaaggaagaagggaatggtggtgttaagttcggacaatacatctacacatcttggagcatcggcatcaatgttttcaatcttctcaaatttcaaattattctggtctcttcgtgcaaccataaaagtttattaagtcacttatctgagtggtctaaaagtctagcatatttttgttcctctgcctgtcgagacggatcaactgacatgaataatatccagtgaatactgcaagagctattcatgatctgccgtgaactagctagtatgatataactcagtttgtggagtgctaatgcacaaacaggaaataggatgatacttcatgtatatttttttatttcatgaaaatgaactataggatactgttcacaatccataccaagcttctgcagttatcaacatgttttctatgttc

SEQ ID NO: 75880 - DNA, 1837 bp, Zea Mays
gtgcctccctccccacgaaacccccttccccaaactaccttcgccgctctccttgatccgcaattttctcccacatctctcttctgcccacttgcctccatcttggcctccccctccactccccacccccgaacatccggcgccgtccacacccttgcaccccgactcccctcgtccttcgtggccacgatgggggcgtccatggcatcgccttaggggcgatcgatctgggagaaagtgctggagcacgtggcgtcgtaccaccagcagcaacggaggcagaagctacgcaagagcctcacctacaccggcagtgagttctcgttcgctgtccggggtcgtggggacgaccccgcctccacgtccgttggggcacagaacgaggacatgcctcttgagcacgtctttaaaatcattagatccgatggcaaaagtgtgtgtttatggttcctgagtcagatgatctttcttcagttttaggtacttttatgctttaatatagctcatgcaatatgatttattttaacacatatttggaatagaactggattgtgcatattttgtaaagtgtatgttctacattttgtaattcgtattattcattttttcctttagtttttctctttctacaactcctatatctttacaatcaaatttcagatgtgatagatattagtatgaaagataaaactagaatgctatgtctgtcaaaggagctttcttcagtttcaggtactgctctgctttattagccatccagccgatggataatttctatacgtgtatcgccctgcactttcaaacacttatgttcattgtttccaatcacatattttttcttcttctcttagatttactatgtggttgtggtctcagtttggcttgtaggttaatttgtatactcatgtcattttagtttttctgtgtattttatgttgatttagtatgtcttaatttagttactttcaattcttgatgctaataatatggatagattgtgacactactttctggcttgagcagaaatgagtttgttgcatatagcagaatatagtttttgtagctggcaacaatgaccgctctttggatgatctaaaaactattctgtagtcaggtagttaaatatagctgaatatacattattatgttttattaatcttatttgttttttctgtcaaaagaacacacctctccatctttcggtgctaggtggatcaccgtctaaacaatccaccaccagaaccgccctaccccaagatagctccatctcagtcgttgtacccattcaatggcgagctggtggcagcgatgtaggagatgatccatgacgaggtgcacaagtacattttttcagttggagaaaacatttaagacaatattttctcgtttgttctccatatggggcttgttccacgccacttgaaggaagaagggaatggtggtgttaagttcggacaatacatctacacatcttggagcatcggcatcaatgttttcaatcttctcaaatttcaaattattctggtctcttcgtgcaaccataaaagtttattaagtcacttatctgagtggtctaaaagtctagcatatttttgttcctctgcctgtcgagacggatcaactgacatgaataatatccagtgaatactgcaagagctattcatgatctgccgtgaactagctagtatgatataactcagtttgtggagtgctaatgcacaaacaggaaataggatgatacttcatgtatatttttttatttcatgaaaatgaactataggatactgttcacaatccataccaagcttctgcagttatcaacatgttttctatgttc

SEQ ID NO: 75881 - DNA, 1720 bp, Zea Mays
gtgcctccctccccacgaaacccccttccccaaactaccttcgccgctctccttgatccgcaattttctcccacatctctcttctgcccacttgcctccatcttggcctccccctccactccccacccccgaacatccggcgccgtccacacccttgcaccccgactcccctcgtccttcgtggccacgatgggggcgtccatggcatcgccttaggggcgatcgatctgggagaaagtgctggagcacgtggcgtcgtaccaccagcagcaacggaggcagaagctacgcaagagcctcacctacaccggcagtgagttctcgttcgctgtccggggtcgtggggacgaccccgcctccacgtccgttggggcacagaacgaggacatgcctcttgagcacgtctttaaaatcattagatccgatggcaaaagtgtgtgtttatggttcctgagtcagatgatctttcttcagttttagatgtgatagatattagtatgaaagataaaactagaatgctatgtctgtcaaaggagctttcttcagtttcaggtactgctctgctttattagccatccagccgatggataatttctatacgtgtatcgccctgcactttcaaacacttatgttcattgtttccaatcacatattttttcttcttctcttagatttactatgtggttgtggtctcagtttggcttgtaggttaatttgtatactcatgtcattttagtttttctgtgtattttatgttgatttagtatgtcttaatttagttactttcaattcttgatgctaataatatggatagattgtgacactactttctggcttgagcagaaatgagtttgttgcatatagcagaatatagtttttgtagctggcaacaatgaccgctctttggatgatctaaaaactattctgtagtcaggtagttaaatatagctgaatatacattattatgttttattaatcttatttgttttttctgtcaaaagaacacacctctccatctttcggtgctaggtggatcaccgtctaaacaatccaccaccagaaccgccctaccccaagatagctccatctcagtcgttgtacccattcaatggcgagctggtggcagcgatgtaggagatgatccatgacgaggtgcacaagtacatgttagtggacgacacctgccaaagatacacaatttctactggtacacattttattttttcatgtttttcagttggagaaaacatttaagacaatattttctcgtttgttctccatatggggcttgttccacgccacttgaaggaagaagggaatggtggtgttaagttcggacaatacatctacacatcttggagcatcggcatcaatgttttcaatcttctcaaatttcaaattattctggtctcttcgtgcaaccataaaagtttattaagtcacttatctgagtggtctaaaagtctagcatatttttgttcctctgcctgtcgagacggatcaactgacatgaataatatccagtgaatactgcaagagctattcatgatctgccgtgaactagctagtatgatataactcagtttgtggagtgctaatgcacaaacaggaaataggatgatacttcatgtatatttttttatttcatgaaaatgaactataggatactgttcacaatccataccaagcttctgcagttatcaacatgttttctatgttc

SEQ ID NO: 75882 - DNA, 1799 bp, Zea Mays
gtgcctccctccccacgaaacccccttccccaaactaccttcgccgctctccttgatccgcaattttctcccacatctctcttctgcccacttgcctccatcttggcctccccctccactccccacccccgaacatccggcgccgtccacacccttgcaccccgactcccctcgtccttcgtggccacgatgggggcgtccatggcatcgccttaggggcgatcgatctgggagaaagtgctggagcacgtggcgtcgtaccaccagcagcaacggaggcagaagctacgcaagagcctcacctacaccggcagtgagttctcgttcgctgtccggggtcgtggggacgaccccgcctccacgtccgttggggcacagaacgaggacatgcctcttgagcacgtctttaaaatcattagatccgatggcaaaagtgtgtgtttatggttcctgagtcagatgatctttcttcagttttaggtacttttatgctttaatatagctcatgcaatatgatttattttaacacatatttggaatagaactggattgtgcatattttgtaaagtgtatgttctacattttgtaattcgtattattcattttttcctttagtttttctctttctacaactcctatatctttacaatcaaatttcagatgtgatagatattagtatgaaagataaaactagaatgctatgtctgtcaaaggagctttcttcagtttcaggtactgctctgctttattagccatccagccgatggataatttctatacgtgtatcgccctgcactttcaaacacttatgttcattgtttccaatcacatattttttcttcttctcttagatttactatgtggttgtggtctcagtttggcttgtaggttaatttgtatactcatgtcattttagtttttctgtgtattttatgttgatttagtatgtcttaatttagttactttcaattcttgatgctaataatatggatagattgtgacactactttctggcttgagcagaaatgagtttgttgcatatagcagaatatagtttttgtagctggcaacaatgaccgctctttggatgatctaaaaactattctgtagtcaggtagttaaatatagctgaatatacattattatgttttattaatcttatttgttttttctgtcaaaagaacacacctctccatctttcggtgctaggtggatcaccgtctaaacaatccaccaccagaaccgccctaccccaagatagctccatctcagtcgttgtacccattcaatggcgagctggtggcagcgatgtaggagatgatccatgacgaggtgcacaagtacatgttagtggacgacacctgccaaagatacacaatttctactggaagaagggaatggtggtgttaagttcggacaatacatctacacatcttggagcatcggcatcaatgttttcaatcttctcaaatttcaaattattctggtctcttcgtgcaaccataaaagtttattaagtcacttatctgagtggtctaaaagtctagcatatttttgttcctctgcctgtcgagacggatcaactgacatgaataatatccagtgaatactgcaagagctattcatgatctgccgtgaactagctagtatgatataactcagtttgtggagtgctaatgcacaaacaggaaataggatgatacttcatgtatatttttttatttcatgaaaatgaactataggatactgttcacaatccataccaagcttctgcagttatcaacatgttttctatgttc

SEQ ID NO: 75883 - DNA, 1173 bp, Zea Mays
gtgcctccctccccacgaaacccccttccccaaactaccttcgccgctctccttgatccgcaattttctcccacatctctcttctgcccacttgcctccatcttggcctccccctccactccccacccccgaacatccggcgccgtccacacccttgcaccccgactcccctcgtccttcgtggccacgatgggggcgtccatggcatcgccttaggggcgatcgatctgggagaaagtgctggagcacgtggcgtcgtaccaccagcagcaacggaggcagaagctacgcaagagcctcacctacaccggcagtgagttctcgttcgctgtccggggtcgtggggacgaccccgcctccacgtccgttggggcacagaacgaggacatgcctcttgagcacgtctttaaaatcattaggccaaagtttgtgcgaccgttgatgtgaatttcctctgggcccaactttgatccgatggcaaaagtgtgtgtttatggttcctgagtcagatgatctttcttcagttttagatgtgatagatattagtatgaaagataaaactagaatgctatgtctgtcaaaggagctttcttcagtttcagaacacacctctccatctttcggtgctaggtggatcaccgtctaaacaatccaccaccagaaccgccctaccccaagatagtttttcagttggagaaaacatttaagacaatattttctcgtttgttctccatatggggcttgttccacgccacttgaaggaagaagggaatggtggtgttaagttcggacaatacatctacacatcttggagcatcggcatcaatgttttcaatcttctcaaatttcaaattattctggtctcttcgtgcaaccataaaagtttattaagtcacttatctgagtggtctaaaagtctagcatatttttgttcctctgcctgtcgagacggatcaactgacatgaataatatccagtgaatactgcaagagctattcatgatctgccgtgaactagctagtatgatataactcagtttgtggagtgctaatgcacaaacaggaaataggatgatacttcatgtatatttttttatttcatgaaaatgaactataggatactgttcacaatccataccaagcttctgcagttatcaacatgttttctatgttc

SEQ ID NO: 75884 - DNA, 1123 bp, Zea Mays
gtgcctccctccccacgaaacccccttccccaaactaccttcgccgctctccttgatccgcaattttctcccacatctctcttctgcccacttgcctccatcttggcctccccctccactccccacccccgaacatccggcgccgtccacacccttgcaccccgactcccctcgtccttcgtggccacgatgggggcgtccatggcatcgccttaggggcgatcgatctgggagaaagtgctggagcacgtggcgtcgtaccaccagcagcaacggaggcagaagctacgcaagagcctcacctacaccggcagtgagttctcgttcgctgtccggggtcgtggggacgaccccgcctccacgtccgttggggcacagaacgaggacatgcctcttgagcacgtctttaaaatcattagatccgatggcaaaagtgtgtgtttatggttcctgagtcagatgatctttcttcagttttagatgtgatagatattagtatgaaagataaaactagaatgctatgtctgtcaaaggagctttcttcagtttcagaacacacctctccatctttcggtgctaggtggatcaccgtctaaacaatccaccaccagaaccgccctaccccaagatagtttttcagttggagaaaacatttaagacaatattttctcgtttgttctccatatggggcttgttccacgccacttgaaggaagaagggaatggtggtgttaagttcggacaatacatctacacatcttggagcatcggcatcaatgttttcaatcttctcaaatttcaaattattctggtctcttcgtgcaaccataaaagtttattaagtcacttatctgagtggtctaaaagtctagcatatttttgttcctctgcctgtcgagacggatcaactgacatgaataatatccagtgaatactgcaagagctattcatgatctgccgtgaactagctagtatgatataactcagtttgtggagtgctaatgcacaaacaggaaataggatgatacttcatgtatatttttttatttcatgaaaatgaactataggatactgttcacaatccataccaagcttctgcagttatcaacatgttttctatgttc

SEQ ID NO: 75885 - DNA, 1227 bp, Zea Mays
gtgcctccctccccacgaaacccccttccccaaactaccttcgccgctctccttgatccgcaattttctcccacatctctcttctgcccacttgcctccatcttggcctccccctccactccccacccccgaacatccggcgccgtccacacccttgcaccccgactcccctcgtccttcgtggccacgatgggggcgtccatggcatcgccttaggggcgatcgatctgggagaaagtgctggagcacgtggcgtcgtaccaccagcagcaacggaggcagaagctacgcaagagcctcacctacaccggcagtgagttctcgttcgctgtccggggtcgtggggacgaccccgcctccacgtccgttggggcacagaacgaggacatgcctcttgagcacgtctttaaaatcattaggccaaagtttgtgcgaccgttgatgtgaatttcctctgggcccaactttgatccgatggcaaaagtgtgtgtttatggttcctgagtcagatgatctttcttcagttttagaacacacctctccatctttcggtgctaggtggatcaccgtctaaacaatccaccaccagaaccgccctaccccaagatagctccatctcagtcgttgtacccattcaatggcgagctggtggcagcgatgtaggagatgatccatgacgaggtgcacaagtacatgttagtggacgacacctgccaaagatacacaatttctactgtttttcagttggagaaaacatttaagacaatattttctcgtttgttctccatatggggcttgttccacgccacttgaaggaagaagggaatggtggtgttaagttcggacaatacatctacacatcttggagcatcggcatcaatgttttcaatcttctcaaatttcaaattattctggtctcttcgtgcaaccataaaagtttattaagtcacttatctgagtggtctaaaagtctagcatatttttgttcctctgcctgtcgagacggatcaactgacatgaataatatccagtgaatactgcaagagctattcatgatctgccgtgaactagctagtatgatataactcagtttgtggagtgctaatgcacaaacaggaaataggatgatacttcatgtatatttttttatttcatgaaaatgaactataggatactgttcacaatccataccaagcttctgcagttatcaacatgttttctatgttc

SEQ ID NO: 75886 - DNA, 1321 bp, Zea Mays
gtgcctccctccccacgaaacccccttccccaaactaccttcgccgctctccttgatccgcaattttctcccacatctctcttctgcccacttgcctccatcttggcctccccctccactccccacccccgaacatccggcgccgtccacacccttgcaccccgactcccctcgtccttcgtggccacgatgggggcgtccatggcatcgccttaggggcgatcgatctgggagaaagtgctggagcacgtggcgtcgtaccaccagcagcaacggaggcagaagctacgcaagagcctcacctacaccggcagtgagttctcgttcgctgtccggggtcgtggggacgaccccgcctccacgtccgttggggcacagaacgaggacatgcctcttgagcacgtctttaaaatcattaggccaaagtttgtgcgaccgttgatgtgaatttcctctgggcccaactttgatccgatggcaaaagtgtgtgtttatggttcctgagtcagatgatctttcttcagttttagatgtgatagatattagtatgaaagataaaactagaatgctatgtctgtcaaaggagctttcttcagtttcagaacacacctctccatctttcggtgctaggtggatcaccgtctaaacaatccaccaccagaaccgccctaccccaagatagctccatctcagtcgttgtacccattcaatggcgagctggtggcagcgatgtaggagatgatccatgacgaggtgcacaagtacatgttagtggacgacacctgccaaagatacacaatttctactggtacacattttattttttcatgtttttcagttggagaaaacatttaagacaatattttctcgtttgttctccatatggggcttgttccacgccacttgaaggaagaagggaatggtggtgttaagttcggacaatacatctacacatcttggagcatcggcatcaatgttttcaatcttctcaaatttcaaattattctggtctcttcgtgcaaccataaaagtttattaagtcacttatctgagtggtctaaaagtctagcatatttttgttcctctgcctgtcgagacggatcaactgacatgaataatatccagtgaatactgcaagagctattcatgatctgccgtgaactagctagtatgatataactcagtttgtggagtgctaatgcacaaacaggaaataggatgatacttcatgtatatttttttatttcatgaaaatgaactataggatactgttcacaatccataccaagcttctgcagttatcaacatgttttctatgttc

SEQ ID NO: 75887 - DNA, 302 bp, Zea Mays
gaggtgcccatttaacccagaaactccatccctctttagttgctggtcatgaagaaatagggcgcaaaactgcacttcctatatcacagttgattccctgatcatctcaccgcatcacaccaatcccacacatctagtttaagttctcaacctcccacatccctctgatcccactgagaaaccttgaactcgcggtgggtactgagagctgcctggaacgccgccttgacagacggtgaacacccccatggacagggccaacgtcgtctgacccaactgtagttcattcaagaagattttgg

SEQ ID NO: 75888 - DNA, 862 bp, Zea Mays
cctattgtttgatgaaggaggaataaatacagagcgaagataggtacgctagatgattatgcgatatgaagggcatgaaccaaactgaaccacaagatggatgatctgacccagtgccaggatgagagatgctcaccgagtggtcgtcgtttgacaacactagcttagtgttattcgaggcaactctttcacatggatttttaaaatctgtagtgtttaaagaaccagaaatggatttgcttgtttctaattcattttgcttgttggatgtcgatatgcacatgcattttcagtcagcttatgatcaagggtacaaataagatcatgccaactctactccatgtactgctggtgtcacagactcacctctgcggcagtatgccctgcctttgctgtgtacttaaatctgctggaggatgatgcatgggcatgcacgacattagattctattgctgtttgtttgactcacgataatgatcacagaaaagtggaaaaaacactgttgaaaaaagaggccattcagaatttagtgaagttcttccaagattgcccagaacagttttttggccatatattggacgctttcttgaagataataacgaaatcttctaggctaaatacaacaatggctaccaatggtttaacaacattgctcattgcaagacttgaccattcaaatttggtggtcgcaaaagtgtggagacttgaattcatataatgtgaggcttaacattagtgcaaacagttgtattttagtttagatttagagcacacttatgtatgcgttgtttgacaatgcttatttatgatatattgaatggtacttatttatattatattaattataatgttgttcaatata

SEQ ID NO: 75889 - DNA, 1179 bp, Zea Mays
aaaggttacacacaatttactagttttattatctgaatagttgaattggtctcgtactattgtaaataatgacaagaattgtcatgtccaacaatagagctacatgcatgcattaagtttttgtgtttgaatacagtaaggtttctttgtgttttaggttgtatacaatagaatgaccaggcagagctgtggatttggaattatgacaatgtctttagctgaaaaagtcagggttgtggtcgagcaatttaatgattatacatttcatggaggaccactgagggtgaactatgggccaccgccacccatggctctgttgaggaggtcaacaatgccatatcaaacctgatggcatcataggtacgctagatgattatgcgatatgaagggcatgaaccaaactgaaccacaagatggatgatctgacccagtgccaggatgagagatgctcaccgagtggtcgtcgtttgacaacactagcttagtgttattcgaggcaactctttcacatggatttttaaaatctgtagtgtttaaagaaccagaaatggatttgcttgtttctaattcattttgcttgttggatgtcgatatgcacatgcattttcagtcagcttatgatcaagggtacaaataagatcatgccaactctactccatgtactgctggtgtcacagactcacctctgcggcagtatgccctgcctttgctgtgtacttaaatctgctggaggatgatgcatgggcatgcacgacattagattctattgctgtttgtttgactcacgataatgatcacagaaaagtggaaaaaacactgttgaaaaaagaggccattcagaatttagtgaagttcttccaagattgcccagaacagttttttggccatatattggacgctttcttgaagataataacgaaatcttctaggctaaatacaacaatggctaccaatggtttaacaacattgctcattgcaagacttgaccattcaaatttggtggtcgcaaaagtgtggagacttgaattcatataatgtgaggcttaacattagtgcaaacagttgtattttagtttagatttagagcacacttatgtatgcgttgtttgacaatgcttatttatgatatattgaatggtacttatttatattatattaattataatgttgttcaatata

SEQ ID NO: 75890 - DNA, 1050 bp, Zea Mays
ttcacctcctgctcgcccgcatccgacttgcccgccgaccacctcatccctcctaccgtgtagccctagccccaaccccttggtggcctagctccgtcggtcggcggccaaccgtagcagtcgctcgtcagcaacatcacccagccctagcctcacactgctctcaccagcagtcgccaacaacagcagccagtggcagtgagcatccgcgcacagcacagctcccgccttgattccccgccctccgctcgcggcctcgcgctccagtcactaacaggtagcatcagcaagcagtggcatcgaaggcgtggagaccggccagccgccaacgccctctgtagatcgctcggcctctccaaacgaccagggccagaagtagtgctaacatttcatggaggaccactgagggtgaactatgggccaccgccacccatggctctgttgaggaggtcaacaatgccatatcaaacctgatggcatctcagcttatgatcaagggtacaaataagatcatgccaactctactccatgtactgctggtgtcacagactcacctctgcggcagtatgccctgcctttgctgtgtacttaaatctgctggaggatgatgcatgggcatgcacgacattagattctattgctgtttgtttgactcacgataatgatcacagaaaagtggaaaaaacactgttgaaaaaagaggccattcagaatttagtgaagttcttccaagattgcccagaacagttttttggccatatattggacgctttcttgaagataataacgaaatcttctaggctaaatacaacaatggctaccaatggtttaacaacattgctcattgcaagacttgaccattcaaatttggtggtcgcaaaagtgtggagacttgaattcatataatgtgaggcttaacattagtgcaaacagttgtattttagtttagatttagagcacacttatgtatgcgttgtttgacaatgcttatttatgatatattgaatggtacttatttatattatattaattataatgttgttcaatata

SEQ ID NO: 75891 - DNA, 1176 bp, Zea Mays
ttcacctcctgctcgcccgcatccgacttgcccgccgaccacctcatccctcctaccgtgtagccctagccccaaccccttggtggcctagctccgtcggtcggcggccaaccgtagcagtcgctcgtcagcaacatcacccagccctagcctcacactgctctcaccagcagtcgccaacaacagcagccagtggcagtgagcatccgcgcacagcacagctcccgccttgattccccgccctccgctcgcggcctcgcgctccagtcactaacaggtagcatcagcaagcagtggcatcgaaggcgtggagaccggccagccgccaacgccctctgtagatcgctcggcctctccaaacgaccagggccagaagtagtgctaacatttcatggaggaccactgagggtgaactatgggccaccgccacccatggctctgttgaggaggtcaacaatgccatatcaaacctgatggcatcataggtacgctagatgattatgcgatatgaagggcatgaaccaaactgaaccacaagatggatgatctgacccagtgccaggatgagagatgctcaccgagtggtcgtcgtttgacaacactagcttagtgttattcgaggcaactctttcacatggatttttaaaatctgtagtgtttaaagaaccagaaatggatttgcttgtttctaattcattttgcttgttggatgtcgatatgcacatgcattttcagtcagcttatgatcaagggtacaaataagatcatgccaactctactccatgtactgctggtgtcacagtggaaaaaacactgttgaaaaaagaggccattcagaatttagtgaagttcttccaagattgcccagaacagttttttggccatatattggacgctttcttgaagataataacgaaatcttctaggctaaatacaacaatggctaccaatggtttaacaacattgctcattgcaagacttgaccattcaaatttggtggtcgcaaaagtgtggagacttgaattcatataatgtgaggcttaacattagtgcaaacagttgtattttagtttagatttagagcacacttatgtatgcgttgtttgacaatgcttatttatgatatattgaatggtacttatttatattatattaattataatgttgttcaatata

SEQ ID NO: 75892 - DNA, 1071 bp, Zea Mays
ttcacctcctgctcgcccgcatccgacttgcccgccgaccacctcatccctcctaccgtgtagccctagccccaaccccttggtggcctagctccgtcggtcggcggccaaccgtagcagtcgctcgtcagcaacatcacccagccctagcctcacactgctctcaccagcagtcgccaacaacagcagccagtggcagtgagcatccgcgcacagcacagctcccgccttgattccccgccctccgctcgcggcctcgcgctccagtcactaacaggtagcatcagcaagcagtggcatcgaaggcgtggagaccggccagccgccaacgccctctgtagatcgctcggcctctccaaacgaccagggccagaagtagtgctagtcaacatttcatggaggaccactgagggtgaactatgggccaccgccacccatggctctgttgaggaggtcaacaatgccatatcaaacctgatggcatcataggtacgctagatgattatgcgatatgaagggcatgaaccaaactgaaccacaagatggatgatctgacccagtgccaggatgagagatgctcaccgagtggtcgtcgtttgacaacactagcttagtgttattcgagtcagcttatgatcaagggtacaaataagatcatgccaactctactccatgtactgctggtgtcacagaaaagtggaaaaaacactgttgaaaaaagaggccattcagaatttagtgaagttcttccaagattgcccagaacagttttttggccatatattggacgctttcttgaagataataacgaaatcttctaggctaaatacaacaatggctaccaatggtttaacaacattgctcattgcaagacttgaccattcaaatttggtggtcgcaaaagtgtggagacttgaattcatataatgtgaggcttaacattagtgcaaacagttgtattttagtttagatttagagcacacttatgtatgcgttgtttgacaatgcttatttatgatatattgaatggtacttatttatattatattaattataatgttgttcaatata

SEQ ID NO: 75893 - DNA, 1295 bp, Zea Mays
ttcacctcctgctcgcccgcatccgacttgcccgccgaccacctcatccctcctaccgtgtagccctagccccaaccccttggtggcctagctccgtcggtcggcggccaaccgtagcagtcgctcgtcagcaacatcacccagccctagcctcacactgctctcaccagcagtcgccaacaacagcagccagtggcagtgagcatccgcgcacagcacagctcccgccttgattccccgccctccgctcgcggcctcgcgctccagtcactaacaggtagcatcagcaagcagtggcatcgaaggcgtggagaccggccagccgccaacgccctctgtagatcgctcggcctctccaaacgaccagggccagaaacatttcatggaggaccactgagggtgaactatgggccaccgccacccatggctctgttgaggaggtcaacaatgccatatcaaacctgatggcatcataggtacgctagatgattatgcgatatgaagggcatgaaccaaactgaaccacaagatggatgatctgacccagtgccaggatgagagatgctcaccgagtggtcgtcgtttgacaacactagcttagtgttattcgaggcaactctttcacatggatttttaaaatctgtagtgtttaaagaaccagaaatggatttgcttgtttctaattcattttgcttgttggatgtcgatatgcacatgcattttcagtcagcttatgatcaagggtacaaataagatcatgccaactctactccatgtactgctggtgtcacagactcacctctgcggcagtatgccctgcctttgctgtgtacttaaatctgctggaggatgatgcatgggcatgcacgacattagattctattgctgtttgtttgactcacgataatgatcacagaaaagtggaaaaaacactgttgaaaaaagaggccattcagaatttagtgaagttcttccaagattgcccagaacagttttttggccatatattggacgctttcttgaagataataacgaaatcttctaggctaaatacaacaatggctaccaatggtttaacaacattgctcattgcaagacttgaccattcaaatttggtggtcgcaaaagtgtggagacttgaattcatataatgtgaggcttaacattagtgcaaacagttgtattttagtttagatttagagcacacttatgtatgcgttgtttgacaatgcttatttatgatatattgaatggtacttatttatattatattaattataatgttgttcaatata

SEQ ID NO: 75894 - DNA, 2004 bp, Zea Mays
ttcacctcctgctcgcccgcatccgacttgcccgccgaccacctcatccctcctaccgtgtagccctagccccaaccccttggtggcctagctccgtcggtcggcggccaaccgtagcagtcgctcgtcagcaacatcacccagccctagcctcacactgctctcaccagcagtcgccaacaacagcagccagtggcagtgagcatccgcgcacagcacagctcccgccttgattccccgccctccgctcgcggcctcgcgctccagtcactaacaggtagcatcagcaagcagtggcatcgaaggcgtggagaccggccagccgccaacgccctctgtagatcgctcggcctctccaaacgaccagggccagaagtagtgctagtcagttgagattacttgaaattcaagttgtatttgaagttttttaaaaaattcggcctaatgtgctatggccactagtttgaatttaagttagatttaaaggttacacacaatttactagttttattatctgaatagttgaattggtctcgtactattgtaaataatgacaagaattgtcatgtccaacaatagagctacatgcatgcattaagtttttgtgtttgaatacagtaaggtttctttgtgttttaggttgtatacaatagaatgaccaggcagagctgtggatttggaattatgacaatgtctttagctgaaaaagtcagggttgtggtcgagcaatttaatgattatgtgaggatactttcactcctttgagccaaccgactcttggcatgcttctgaatctgatgatcagctattcaaccgaaggaaaatatgcagcagtgctgataaacagtggtctatactagattgtaatgctggtgttttgtaccacttaagatttttagattcaggatttgcaccaaagtttgcattacacaataacctgaaatcagaatcatacattataaccaatcatttcttatagtttcggctagctgtttggaactgaatttcttctactgagcgcatagtgcgtcagattgctgatagtactcatgactaattataattaatctttccttgcaaatagacatttcatggaggaccactgagggtgaactatgggccaccgccacccatggctctgttgaggaggtcaacaatgccatatcaaacctgatggcatcataggtacgctagatgattatgcgatatgaagggcatgaaccaaactgaaccacaagatggatgatctgacccagtgccaggatgagagatgctcaccgagtggtcgtcgtttgacaacactagcttagtgttattcgaggcaactctttcacatggatttttaaaatctgtagtgtttaaagaaccagaaatggatttgcttgtttctaattcattttgcttgttggatgtcgatatgcacatgcattttcagtcagcttatgatcaagggtacaaataagatcatgccaactctactccatgtactgctggtgtcacagactcacctctgcggcagtatgccctgcctttgctgtgtacttaaatctgctggaggatgatgcatgggcatgcacgacattagattctattgctgtttgtttgactcacgataatgatcacagaaaagtggaaaaaacactgttgaaaaaagaggccattcagaatttagtgaagttcttccaagattgcccagaacagttttttggccatatattggacgctttcttgaagataataacgaaatcttctaggctaaatacaacaatggctaccaatggtttaacaacattgctcattgcaagacttgaccattcaaatttggtggtcgcaaaagtgtggagacttgaattcatataatgtgaggcttaacattagtgcaaacagttgtattttagtttagatttagagcacacttatgtatgcgttgtttgacaatgcttatttatgatatattgaatggtacttatttatattatattaattataatgttgttcaatata

SEQ ID NO: 75895 - DNA, 1205 bp, Zea Mays
aaccctagcgcacagtagccgtcattcacctcctgctcgcccgcatccgacttgcccgccgaccacctcatccctcctaccgtgtagccctagccccaaccccttggtggcctagctccgtcggtcggcggccaaccgtagcagtcgctcgtcagcaacatcacccagccctagcctcacactgctctcaccagcagtcgccaacaacagcagccagtggcagtgagcatccgcgcacagcacagctcccgccttgattccccgccctccgctcgcggcctcgcgctccagtcactaacaggtagcatcagcaagcagtggcatcgaaggcgtggagaccggccagccgccaacgccctctgtagatcgctcggcctctccaaacgaccagggccagaagtagtgctaacatttcatggaggaccactgagggtgaactatgggccaccgccacccatggctctgttgaggaggtcaacaatgccatatcaaacctgatggcatcataggtacgctagatgattatgcgatatgaagggcatgaaccaaactgaaccacaagatggatgatctgacccagtgccaggatgagagatgctcaccgagtggtcgtcgtttgacaacactagcttagtgttattcgaggcaactctttcacatggatttttaaaatctgtagtgtttaaagaaccagaaatggatttgcttgtttctaattcattttgcttgttggatgtcgatatgcacatgcattttcagtcagcttatgatcaagggtacaaataagatcatgccaactctactccatgtactgctggtgtcacagaaaagtggaaaaaacactgttgaaaaaagaggccattcagaatttagtgaagttcttccaagattgcccagaacagttttttggccatatattggacgctttcttgaagataataacgaaatcttctaggctaaatacaacaatggctaccaatggtttaacaacattgctcattgcaagacttgaccattcaaatttggtggtcgcaaaagtgtggagacttgaattcatataatgtgaggcttaacattagtgcaaacagttgtattttagtttagatttagagcacacttatgtatgcgttgtttgacaatgcttatttatgatatattgaatggtacttatttatattatattaattataatgttgttcaatata

SEQ ID NO: 75896 - DNA, 1651 bp, Zea Mays
aaccctagcgcacagtagccgtcattcacctcctgctcgcccgcatccgacttgcccgccgaccacctcatccctcctaccgtgtagccctagccccaaccccttggtggcctagctccgtcggtcggcggccaaccgtagcagtcgctcgtcagcaacatcacccagccctagcctcacactgctctcaccagcagtcgccaacaacagcagccagtggcagtgagcatccgcgcacagcacagctcccgccttgattccccgccctccgctcgcggcctcgcgctccagtcactaacaggtagcatcagcaagcagtggcatcgaaggcgtggagaccggccagccgccaacgccctctgtagatcgctcggcctctccaaacgaccagggccagaagtagtgctagtcagttgagattacttgaaattcaagttgtatttgaagttttttaaaaaattcggcctaatgtgctatggccactagtttgaatttaagttagatttaaaggttacacacaatttactagttttattatctgaatagttgaattggtctcgtactattgtaaataatgacaagaattgtcatgtccaacaatagagctacatgcatgcattaagtttttgtgtttgaatacagtaaggtttctttgtgttttaggttgtatacaatagaatgaccaggcagagctgtggatttggaattatgacaatgtctttagctgaaaaagtcagggttgtggtcgagcaatttaatgattatgtgaggatactttcactcctttgagccaaccgactcttggcatgcttctgaatctgatgatcagctattcaaccgaaggaaaatatgcagcagtgctgataaacagtggtctatactagattgtaatgctggtgttttgtaccacttaagatttttagattcaggatttgcaccaaagtttgcattacacaataacctgaaatcagaatcatacattataaccaatcatttcttatagtttcggctagctgtttggaactgaatttcttctactgagcgcatagtgcgtcagattgctgatagtactcatgactaattataattaatctttccttgcaaatagacatttcatggaggaccactgagggtgaactatgggccaccgccacccatggctctgttgaggaggtcaacaatgccatatcaaacctgatggcatctcagcttatgatcaagggtacaaataagatcatgccaactctactccatgtactgctggtgtcacagaaaagtggaaaaaacactgttgaaaaaagaggccattcagaatttagtgaagttcttccaagattgcccagaacagttttttggccatatattggacgctttcttgaagataataacgaaatcttctaggctaaatacaacaatggctaccaatggtttaacaacattgctcattgcaagacttgaccattcaaatttggtggtcgcaaaagtgtggagacttgaattcatataatgtgaggcttaacattagtgcaaacagttgtattttagtttagatttagagcacacttatgtatgcgttgtttgacaatgcttatttatgatatattgaatggtacttatttatattatattaattataatgttgttcaatata

SEQ ID NO: 75897 - DNA, 1336 bp, Zea Mays
cccaaaccctagcgcacagtagccgtcattcacctcctgctcgcccgcatccgacttgcccgccgaccacctcatccctcctaccgtgtagccctagccccaaccccttggtggcctagctccgtcggtcggcggccaaccgtagcagtcgctcgtcagcaacatcacccagccctagcctcacactgctctcaccagcagtcgccaacaacagcagccagtggcagtgagcatccgcgcacagcacagctcccgccttgattccccgccctccgctcgcggcctcgcgctccagtcactaacaggtagcatcagcaagcagtggcatcgaaggcgtggagaccggccagccgccaacgccctctgtagatcgctcggcctctccaaacgaccagggccagaagtagtgctagtcaacatttcatggaggaccactgagggtgaactatgggccaccgccacccatggctctgttgaggaggtcaacaatgccatatcaaacctgatggcatcataggtacgctagatgattatgcgatatgaagggcatgaaccaaactgaaccacaagatggatgatctgacccagtgccaggatgagagatgctcaccgagtggtcgtcgtttgacaacactagcttagtgttattcgaggcaactctttcacatggatttttaaaatctgtagtgtttaaagaaccagaaatggatttgcttgtttctaattcattttgcttgttggatgtcgatatgcacatgcattttcagtcagcttatgatcaagggtacaaataagatcatgccaactctactccatgtactgctggtgtcacagactcacctctgcggcagtatgccctgcctttgctgtgtacttaaatctgctggaggatgatgcatgggcatgcacgacattagattctattgctgtttgtttgactcacgataatgatcacagaaaagtggaaaaaacactgttgaaaaaagaggccattcagaatttagtgaagttcttccaagattgcccagaacagttttttggccatatattggacgctttcttgaagataataacgaaatcttctaggctaaatacaacaatggctaccaatggtttaacaacattgctcattgcaagacttgaccattcaaatttggtggtcgcaaaagtgtggagacttgaattcatataatgtgaggcttaacattagtgcaaacagttgtattttagtttagatttagagcacacttatgtatgcgttgtttgacaatgcttatttatgatatattgaatggtacttatttatattatattaattataatgttgttcaatata

SEQ ID NO: 75898 - DNA, 1932 bp, Zea Mays
ggcagtccatgtgtcacagcccgcccaaaccctagcgcacagtagccgtcattcacctcctgctcgcccgcatccgacttgcccgccgaccacctcatccctcctaccgtgtagccctagccccaaccccttggtggcctagctccgtcggtcggcggccaaccgtagcagtcgctcgtcagcaacatcacccagccctagcctcacactgctctcaccagcagtcgccaacaacagcagccagtggcagtgagcatccgcgcacagcacagctcccgccttgattccccgccctccgctcgcggcctcgcgctccagtcactaacaggtagcatcagcaagcagtggcatcgaaggcgtggagaccggccagccgccaacgccctctgtagatcgctcggcctctccaaacgaccagggccagaagtagtgctagtcagttgagattacttgaaattcaagttgtatttgaagttttttaaaaaattcggcctaatgtgctatggccactagtttgaatttaagttagatttaaaggttacacacaatttactagttttattatctgaatagttgaattggtctcgtactattgtaaataatgacaagaattgtcatgtccaacaatagagctacatgcatgcattaagtttttgtgtttgaatacagtaaggtttctttgtgttttaggttgtatacaatagaatgaccaggcagagctgtggatttggaattatgacaatgtctttagctgaaaaagtcagggttgtggtcgagcaatttaatgattatgtgaggatactttcactcctttgagccaaccgactcttggcatgcttctgaatctgatgatcagctattcaaccgaaggaaaatatgcagcagtgctgataaacagtggtctatactagattgtaatgctggtgttttgtaccacttaagatttttagattcaggatttgcaccaaagtttgcattacacaataacctgaaatcagaatcatacattataaccaatcatttcttatagtttcggctagctgtttggaactgaatttcttctactgagcgcatagtgcgtcagattgctgatagtactcatgactaattataattaatctttccttgcaaatagacatttcatggaggaccactgagggtgaactatgggccaccgccacccatggctctgttgaggaggtcaacaatgccatatcaaacctgatggcatcataggtacgctagatgattatgcgatatgaagggcatgaaccaaactgaaccacaagatggatgatctgacccagtgccaggatgagagatgctcaccgagtggtcgtcgtttgacaacactagcttagtgttattcgaggcaactctttcacatggatttttaaaatctgtagtgtttaaagaaccagaaatggatttgcttgtttctaattcattttgcttgttggatgtcgatatgcacatgcattttcagtcagcttatgatcaagggtacaaataagatcatgccaactctactccatgtactgctggtgtcacagaaaagtggaaaaaacactgttgaaaaaagaggccattcagaatttagtgaagttcttccaagattgcccagaacagttttttggccatatattggacgctttcttgaagataataacgaaatcttctaggctaaatacaacaatggctaccaatggtttaacaacattgctcattgcaagacttgaccattcaaatttggtggtcgcaaaagtgtggagacttgaattcatataatgtgaggcttaacattagtgcaaacagttgtattttagtttagatttagagcacacttatgtatgcgttgtttgacaatgcttatttatgatatattgaatggtacttatttatattatattaattataatgttgttcaatata

SEQ ID NO: 75899 - DNA, 2061 bp, Zea Mays
cgtctccttcggcagtccatgtgtcacagcccgcccaaaccctagcgcacagtagccgtcattcacctcctgctcgcccgcatccgacttgcccgccgaccacctcatccctcctaccgtgtagccctagccccaaccccttggtggcctagctccgtcggtcggcggccaaccgtagcagtcgctcgtcagcaacatcacccagccctagcctcacactgctctcaccagcagtcgccaacaacagcagccagtggcagtgagcatccgcgcacagcacagctcccgccttgattccccgccctccgctcgcggcctcgcgctccagtcactaacaggtagcatcagcaagcagtggcatcgaaggcgtggagaccggccagccgccaacgccctctgtagatcgctcggcctctccaaacgaccagggccagaagtagtgctagtcagttgagattacttgaaattcaagttgtatttgaagttttttaaaaaattcggcctaatgtgctatggccactagtttgaatttaagttagatttaaaggttacacacaatttactagttttattatctgaatagttgaattggtctcgtactattgtaaataatgacaagaattgtcatgtccaacaatagagctacatgcatgcattaagtttttgtgtttgaatacagtaaggtttctttgtgttttaggttgtatacaatagaatgaccaggcagagctgtggatttggaattatgacaatgtctttagctgaaaaagtcagggttgtggtcgagcaatttaatgattatgtgaggatactttcactcctttgagccaaccgactcttggcatgcttctgaatctgatgatcagctattcaaccgaaggaaaatatgcagcagtgctgataaacagtggtctatactagattgtaatgctggtgttttgtaccacttaagatttttagattcaggatttgcaccaaagtttgcattacacaataacctgaaatcagaatcatacattataaccaatcatttcttatagtttcggctagctgtttggaactgaatttcttctactgagcgcatagtgcgtcagattgctgatagtactcatgactaattataattaatctttccttgcaaatagacatttcatggaggaccactgagggtgaactatgggccaccgccacccatggctctgttgaggaggtcaacaatgccatatcaaacctgatggcatcataggtacgctagatgattatgcgatatgaagggcatgaaccaaactgaaccacaagatggatgatctgacccagtgccaggatgagagatgctcaccgagtggtcgtcgtttgacaacactagcttagtgttattcgaggcaactctttcacatggatttttaaaatctgtagtgtttaaagaaccagaaatggatttgcttgtttctaattcattttgcttgttggatgtcgatatgcacatgcattttcagtcagcttatgatcaagggtacaaataagatcatgccaactctactccatgtactgctggtgtcacaggtccttaatgctttgttcaacctttgcaaaattaataaaagaagacatgaacaagcaaccgaaaatagaatcatccctcacttgatgaaatttgtcatgtcagactcacctctgcggcaaaaagtggaaaaaacactgttgaaaaaagaggccattcagaatttagtgaagttcttccaagattgcccagaacagttttttggccatatattggacgctttcttgaagataataacgaaatcttctaggctaaatacaacaatggctaccaatggtttaacaacattgctcattgcaagacttgaccattcaaatttggtggtcgcaaaagtgtggagacttgaattcatataatgtgaggcttaacattagtgcaaacagttgtattttagtttagatttagagcacacttatgtatgcgttgtttgacaatgcttatttatgatatattgaatggtacttatttatattatattaattataatgttgttcaatata

SEQ ID NO: 75900 - DNA, 898 bp, Zea Mays
ttcacctcctgctcgcccgcatccgacttgcccgccgaccacctcatccctcctaccgtgtagccctagccccaaccccttggtggcctagctccgtcggtcggcggccaaccgtagcagtcgctcgtcagcaacatcacccagccctagcctcacactgctctcaccagcagtcgccaacaacagcagccagtggcagtgagcatccgcgcacagcacagctcccgccttgattccccgccctccgctcgcggcctcgcgctccagtcactaacaggtagcatcagcaagcagtggcatcgaaggcgtggagaccggccagccgccaacgccctctgtagatcgctcggcctctccaaacgaccagggccagaagtagtgctagtcaacatttcatggaggaccactgagggtgaactatgggccaccgccacccatggctctgttgaggaggtcaacaatgccatatcaaacctgatggcatcgtacgctagatgattatgcgatatgaagggcatgaaccaaactgaaccacaagatggatgatctgacccagtgccaggatgagagatgctcaccgagtggtcgtcgtttgacaacactagcttagtgttattcgaggcaactctttcacatggatttttaaaatctgtagtgtttaaagaaccagaaatggatttgcttgtttctaattcattttgcttgttggatgtcgatatgcacatgcattttcagtcagcttatgatcaagggtacaaataagatcatgccaactctactccatgtactgctggtgtcacaggtccttaatgctttgttcaacctttgcaaaattaataaaagaagacatgaacaagcaaccgaaaatagaatcatccctcacttgatgaaatttgtc

SEQ ID NO: 75901 - DNA, 920 bp, Zea Mays
agcgcacagtagccgtcattcacctcctgctcgcccgcatccgacttgcccgccgaccacctcatccctcctaccgtgtagccctagccccaaccccttggtggcctagctccgtcggtcggcggccaaccgtagcagtcgctcgtcagcaacatcacccagccctagcctcacactgctctcaccagcagtcgccaacaacagcagccagtggcagtgagcatccgcgcacagcacagctcccgccttgattccccgccctccgctcgcggcctcgcgctccagtcactaacaggtagcatcagcaagcagtggcatcgaaggcgtggagaccggccagccgccaacgccctctgtagatcgctcggcctctccaaacgaccagggccagaagtagtgctagtcaacatttcatggaggaccactgagggtgaactatgggccaccgccacccatggctctgttgaggaggtcaacaatgccatatcaaacctgatggcatcataggtacgctagatgattatgcgatatgaagggcatgaaccaaactgaaccacaagatggatgatctgacccagtgccaggatgagagatgctcaccgagtggtcgtcgtttgacaacactagcttagtgttattcgaggcaactctttcacatggatttttaaaatctgtagtgtttaaagaaccagaaatggatttgcttgtttctaattcattttgcttgttggatgtcgatatgcacatgcattttcagtcagcttatgatcaagggtacaaataagatcatgccaactctactccatgtactgctggtgtcacaggtccttaatgctttgttcaacctttgcaaaattaataaaagaagacatgaacaagcaaccgaaaatagaatcatccctcacttgatgaaatttgtc

SEQ ID NO: 75902 - DNA, 926 bp, Zea Mays
cccaaaccctagcgcacagtagccgtcattcacctcctgctcgcccgcatccgacttgcccgccgaccacctcatccctcctaccgtgtagccctagccccaaccccttggtggcctagctccgtcggtcggcggccaaccgtagcagtcgctcgtcagcaacatcacccagccctagcctcacactgctctcaccagcagtcgccaacaacagcagccagtggcagtgagcatccgcgcacagcacagctcccgccttgattccccgccctccgctcgcggcctcgcgctccagtcactaacaggtagcatcagcaagcagtggcatcgaaggcgtggagaccggccagccgccaacgccctctgtagatcgctcggcctctccaaacgaccagggccagaagtagtgctaacatttcatggaggaccactgagggtgaactatgggccaccgccacccatggctctgttgaggaggtcaacaatgccatatcaaacctgatggcatcataggtacgctagatgattatgcgatatgaagggcatgaaccaaactgaaccacaagatggatgatctgacccagtgccaggatgagagatgctcaccgagtggtcgtcgtttgacaacactagcttagtgttattcgaggcaactctttcacatggatttttaaaatctgtagtgtttaaagaaccagaaatggatttgcttgtttctaattcattttgcttgttggatgtcgatatgcacatgcattttcagtcagcttatgatcaagggtacaaataagatcatgccaactctactccatgtactgctggtgtcacaggtccttaatgctttgttcaacctttgcaaaattaataaaagaagacatgaacaagcaaccgaaaatagaatcatccctcacttgatgaaatttgtc

SEQ ID NO: 75903 - DNA, 3155 bp, Zea Mays
aagattcagaataagctttacattgaccacttgagttccatctccaatgcaagttccattggttctccatgcaagagggatgccgcagcgcgatgttctccatcatggagatccactagctggcgctcgggctgtggcagccggcggcgaaggacgaaatgctgctgctcaattcgtgcactatcccagagccttgattggtggtcaggaagtcgctatccaagggctaagtaaagattcagaataagctttacattgaccacttgagttccagctccaatgcaagttccattggttctccatgcaagagggatgccgcgacgcgacgttctccatcaaggaaatccactagccggcgctcgggctgtggcagccggcggcgaaggtcaaaatgttgctgctcaattcgtgcactatcctagagtatgtccctagctgagtagcagttgtcgcatctgttctctattttggtcctaattacttgttcgatattctgtcaatagcagtagtaatcagatcgacttacccaattaatttaattaatttgtccatatgatattgcattttggggaggccttgattggtggtcaggaagtcgctatccaagggctaagtaaagattcagaataagagggatgccgcagcgcgacgttctccatcaaggagatccactagctggcgctcgggctattgcagccggcggcgaaggccgaaatgctgttgctcaattcgtgcactatcccagagtatgtccctagctgagtagcagttgtcgcatctgttctctattttggtcctaattacttgttcgatattctgtcaatagcagtattaatcagatcgacttacccaattaatttaattaatttgtccatatgatattgcattttggggaggccttgattggtggtcaggaagtcgctatccaagggctaagtaaagattcagaataaggtattatggagttcaggaatgaagttattctaactgccaaatcgatcctaatatatacgattgtctagctgtctgcctgacagaagtttggatgctatcctttttggtacgctttgataatcaatacacactaaaccttaaatctttttgggttattattctcttaacaaatatcttacatgcatgtagtgcttttatttgaatatgcacatagataattcaaggaaagatttactagattggccaatgtgatttaacataaacaaaatcacttctcagttctcacctacggccacttcctcgttttttaaaacaaaatttgttggtacttaggaatgggtggtgtgttttggttttcgtcttgtggtttcagctttactttccaatgatatttttcactttaccatttattatataatgtccattgtgtgctaaatttttctgtttattatataatgtttaatgagaagtgtgcatttattttttctttgctatcctaccagacgtatatacttgacgacagttactatagagtttaattgtttgggtcttgtacattctgttattagtttgatctgatttatgccaaacttgtgtgaatgctatcaggaagttgctgctttgtcttgatgtctcagacccttagctatgtatactgactatcaacaccatctttatgattggcaagaattgcttcactatctatgcatgattttctttttgaaaccaattttattgctgcactttattttgttttgcattactcatgtttggatcacttcacaaattaggaaagcctatgtgtcttcctcccctgaagtttcagtgttcattacttttctgttaacctcaaaaattagcttagttgtattgaacactaggttttattctacctgtttatgtttcaaagtgtttgaggttctgcatgtgcaacatcacttgtattatagcagcctcctgttaacgtcaaatactgtagggcgcccgtatgggcgcttaatggtctagtaatatttatgctttattgataccttcggttcgacagaaggtgaaaatgtgagagacgcgagagtgattacagtacagcgtgaacagtacggggtactgttcatctatttataggcgcgggacgcagcccgtatgaaattacatccatgtccttgataactaattatgatcataatacagactaccaagggctatacagtattttcctctttaagccggtatcgtccttcgtctttagcatgacaccaagccgaagctctttcgatcgtagcttcatcttatatcttcatgttgtatctgcctttgtactgtcttaccgaaggtgttttttcctagaggaccttcggcggagaagaagaccccaacaataaccatctttatattacaactaaaggaaaataaagaatctatcacaattctaaatatccaataactctaatggcatttaaaactaactgattcttaaccttctcggccatccttcgaaaaccaatcattaaaatttatcgataaaggcatgaatatcatataagcacaatcatcttacattattgtaatctaacttaacttatttttgcaaaataagttagtcacaattattaatcactgaaaccaaatgagggcctagatgctttcaaataccacaatgatacttaaaaggagataaagtatttagacgttattagttagattgtatacaactaacttagaaaatagggattaagaatgcaaatggactatcccttgaacccacactatgtgtttaattatgtggacttccatgagttgtccacgtaaaaacttagaatcaactatatgtacgtagttgatttgagaagtgctggagcgcaccaacgaaacaaggtatggtagacgtgagggaggttggataccacattaaattgctccatgtcggagaggaagagcaaggaaggtgtaacatcctgattttgggtataaaatttcttttctaatatacaccaaatttaggtgttatcctctatttttcttacatttcttttcttctttctaatatagtggagaattattttgttatatattggcgtaagcctagtgaagtgagtcctataggtgctttagttgttacattcatgccattgtaaaatgtttctaagtgcaaaaggtgtctgaaacatgttaatataccttgtagaggctttcggtaaattttc

SEQ ID NO: 75904 - DNA, 613 bp, Zea Mays
tcgccctcctcgccacgcctcccatcgcctgagcgcacttttgtgcccgtgagggcgacccgcggtaaggtgctggcagcatgggctgtcgcgatatctgctcacaaggtctctccgtcacttgagcgtgatcactcccacgacggcgacctgcggcatgccgtcagcggcgcagcacagacttccacgacttctttttcctaacgactgtcgttcgtgatttgttcatttcgtgtcaagcttctgttctaagatgattgttctgttcttaaacacatcacttttatgccagattcttcttaagtttcattcaacaaattttggtattactcccttcgtccccttttgataaccataatagggaaaaaatatgtaccatattgatcgtcaatttgtcaaggagggagccttatcagcgtaaatgtggcattaaccacttgagtttcagctccaatgcaagttccattggttctccatgcaagagggatgccgcagcgcgacgttctcaatcaaggagatccactagccggtgctcaggctgtggcagccggcggcgaaggccgaaatgctgctgctcaattcgtgcactatcccagagccttgattggtggtc

SEQ ID NO: 75905 - DNA, 1520 bp, Zea Mays
tcgccctcctcgccacgcctcccatcgcctgagcgcacttttgtgcccgtgagggcgacccgcggtaaggtgctggcagcatgggctgtcgcgatatctgctcacaaggtctctccgtcacttgagcgtgatcactcccacgacggcgacctgcggcatgccgtcagcggcgcagcacagacttccacgacttctttttcctaacgactgtcgttcgtgatttgttcatttcgtgtcaagcttctgttctaagatgattgttctgttcttaaacacatcacttttatgccagattcttcttaagtttcattcaacaaattttggtattactcccttcgtccccttttgataaccataatagggaaaaaatatgtaccatattgatcgtcaatttgtcaaggagggagccttatcagcgtaaatgtggcattaaccacttgagtttcagctccaatgcaagttccattggttctccatgcaagagggatgccgcagcgcgacgttctcaatcaaggagatccactagccggtgctcaggctgtggcagccggcggcgaaggccgaaatgctgctgctcaattcgtgcactatcccagactttacattgaccacttgagttccatctccaatgcaagttccattggttctccatgcaagagggatgccgcagcgcgatgttctccatcatggagatccactagctggcgctcgggctgtggcagccggcggcgaaggacgaaatgctgctgctcaattcgtgcactatcccagagccttgattggtggtcaggaagtcgctatccaagggctaagtaaagattcagaataagctttacattgaccacttgagttccagctccaatgcaagttccattggttctccatgcaagagggatgccgcgacgcgacgttctccatcaaggaaatccactagccggcgctcgggctgtggcagccggcggcgaaggtcaaaatgttgctgctcaattcgtgcactatcctagagtatgtccctagctgagtagcagttgtcgcatctgttctctattttggtcctaattacttgttcgatattctgtcaatagcagtagtaatcagatcgacttacccaattaatttaattaatttgtccatatgatattgcattttggggaggccttgattggtggtcaggaagtcgctatccaagggctaagtaaagattcagaataaggtattatgcagttcaggaatgaagttattctaactgccaaatcgatcctaatatatatgattgtctagttgtctgcctgacagaagtttggatgctatccttttcggtacgctttgctttacattgaccacttgagttccatctccaatgcaagttccattggttctccatgcaagagggatgccgcagcgcgacgttctccatcaaggagatccactagctggcgctcgggctgttgcagccggcggcgaaggcctaaatgttgttgctcaattcgtgcactatcccagagccttgattggtggtc

SEQ ID NO: 75906 - DNA, 509 bp, Zea Mays
cttatgctaaattctctaggctataatggctgaaggaaaacaacacgccctggcaattggatatacaaagatgtcagcaaaagacataaggaccatcaacaaaggaattggtgttgacaatatgcactatctaaatgatggcctatggaagatggaacggctcgaatgagtagaattctctgaggggttcataacttgcggcagatcgtattgatggacatatgaaaccagcaggaccctatttgcacagctggtatcgttttaaagatgaagtactaagaagctttatttacctgaggcaacttgagcttactccgaccctttggtgtggagtgcatgtcagaaacaggattatgaatgctgtgttcagtgcttttcacaaattgttgtattttcaccagaacaatttgccctcaattggaagtgaggaaatccataacgatctataagttatttgatcttacagtttgttgtgtgtaacttatctaattggtaggattgcggatcct

SEQ ID NO: 75907 - DNA, 919 bp, Zea Mays
gaattaagatgcttgtagtatgtcatgttttataacatcactggtgacaagactgcaggttctcttcagaagatatatctggacagaatcaagttaaggcttctgtacaacgaaagattcggcaaataccccagccttgaacctttgctagatgacttgctcccaaaaaagtcacctatgattgttgttaaatgccaaaatcatcttaatcttgtagtggtgaataatgttcctctatttttcaatatacgtgatggtccttacatgccaaccctgcgtcttcttcatcagtatcctgatatcatgaaaaagttccaagtggatagaggtgctatcaaatttgttctatctggcgcaaacataatgtgtcctgggttgacttcacctggtggtgccttagacgacgaagtcgaggaggaaacaccagtggctataatggctgaaggaaaacaacacgccctggcaattggatatacaaagatgtcagcaaaagacataaggaccatcaacaaaggaattggtgttgacaatatgcactatctaaatgatggcctatggaagatggaacggctcgaatgagtagaattctctgaggggttcataacttgcggcagatcgtattgatggacatatgaaaccagcaggaccctatttgcacagctggtatcgttttaaagatgaagtactaagaagctttatttacctgaggcaacttgagcttactccgaccctttggtgtggagtgcatgtcagaaacaggattatgaatgctgtgttcagtgcttttcacaaattgttgtattttcaccagaacaatttgccctcaattggaagtgaggaaatccataacgatctataagttatttgatcttacagtttgttgtgtgtaacttatctaattggtaggattgcggatcct

SEQ ID NO: 75908 - DNA, 1130 bp, Zea Mays
acccatagtataaaccatagtgagtccagaataacatcccgtacatggtatccagacaagccgggattggctccgttgacagatcctgatccagtgtgatatttgggctgctcacagcacaattgggtccaataaagcccagccgggacgcagaggaagaagacccggagctgcgtcttccttccgtttcagcaccgcgcgcaatcggcctctcatcccctcttcctatcgcccgccgccgccgccgccgccgcccgtccgcttcagtacgacgtcgagcaaggggaggtaaaagttcgtttggcgtgcgccatgtttaagaagttctcttcagaagatatatctggacagaatcaagttaaggcttctgtacaacgaaagattcggcaaagtatcgctgatgagccaaaatcatcttaatcttgtagtggtgaataatgttcctctatttttcaatatacgtgatggtccttacatgccaaccctgcgtcttcttcatcagtatcctgatatcatgaaaaagttccaagtggatagaggtgctatcaaatttgttctatctggcgcaaacataatgtgtcctgggttgacttcacctggtggtgccttagacgacgaagtcgaggaggaaacaccagtggctataatggctgaaggaaaacaacacgccctggcaattggatatacaaagatgtcagcaaaagacataaggaccatcaacaaaggaattggtgttgacaatatgcactatctaaatgatggcctatggaagatggaacggctcgaatgagtagaattctctgaggggttcataacttgcggcagatcgtattgatggacatatgaaaccagcaggaccctatttgcacagctggtatcgttttaaagatgaagtactaagaagctttatttacctgaggcaacttgagcttactccgaccctttggtgtggagtgcatgtcagaaacaggattatgaatgctgtgttcagtgcttttcacaaattgttgtattttcaccagaacaatttgccctcaattggaagtgaggaaatccataacgatctataagttatttgatcttacagtttgttgtgtgtaacttatctaattggtaggattgcggatcct

SEQ ID NO: 75909 - DNA, 2053 bp, Zea Mays
tacagatacttcggttgagagaattataccttttcaatcttcaagttgtgcttgttggcaatttacatgttgccagtgtatatgctggaagtgattgcattgaattgaaaggacctcaaatcatggaagagctgattgttctacggcggttgattgacctgtgctttcttttctctaagaagccatttccagtgtttcgggaattagctggattttcacaggaggatgttcttattgaggaaccaaaggcggggattttgaagcctgcccatacaattatacgtgatgagtgcaccaaatccttccttgttttgatccgagggactcatagcatgaaagatactctgactgctgctactggggctgtagtgccatttcacctctcacttttggatgaaggcgatgtgagcaaattagtgttaggttatgcacactgtgggatggttgcagcagcccgctggattgcaagaggtgtaacaccatgcctccgtgaagcagtcagacaatgcccagagtaccaaatcaagattgttggccattcattgggtggtggtactgctgcattgctaacctacatccttagagaacacaaagagttttcttcaacaacttgtgttgcatttgcacctgcttcttgcatgacatgggaattagcagaatcaggcaagcattttgtgacaacggttgtcaatggagctgatctggttcccactgtatcaactgcatctattgatgatctccgttctgaggtaacagcttcatcatggttaaatgatctgagggatcaaatacaacagacacgcttcctaaatgtcgtttaccggtcagccactgctttaggaactcgcctgcagtctttttctggtgcgagagagagggttgcaggtgctggagcatttctacgtcctgtttcaaacaaaacccaggttgtgatgaaacaagcacagaatgtcgcacaggctgttgctagaagtcggtctgcattttcctcatggtcatgcatgggtgcacgtcgtcgaggtaacattgtggcgccaagaccatagaagaactgcagtatactgcagctagtgtttctgttcatgatgcagcagaggaagaagaggctcttttgagtgaacatgaaacctccagggagaatgccgaagaagaaacaacagagggtgagttgtggtatgagtttgagaaggacttggatcgacaagctgaaatggaggcacgaacaagggaggaagaggcagctgcagccaaagaaataatggaagaggaaagtgctgtgctaaaaggtgtagatgacaggcagtccttcacaccagatagcttggagaggcagcaattctacccccctggtagaatcatgcacatggttgcaatgcctcccacagacgctgacccagatgatccggttgctgctgacgagtgctgtgttggaatatatgagacccctagagatctttacagcaagattcgactctcaaataccatgatcaatgaccactacatgccaatgtataagaaaatgatggaaacattgattgagaagttcgcgagggatgaggactgctattgtacaggttctactgcagaataacatggaagcatgaatgacctatgtacatcgataactgtacaatactccgtgttagctgttattagcctatctgacattgcaatatacaagaggtgatgtcctcctgacccgtgaaaaaaggattttagttagggtcatgtgagtgtgtgatgtgtaaatgtaaaagaaaccagaatcagcaatttaataccttttccagtcatatttgcttgtactttacaagcatgtgatgcttggatcttgaaatctaaatgtttacaaggcattttaaagtcaggcgcttagcaagaagagcgttttgacattgttcatacagaccaatgggcaatgactacagggaactaaaacgataagagttgcaatggcgcactggtgcttgtttagctagccatactatttgatacttgacatggctgttaagaactgaaatgtaaagtgaaagtagagaacggaagaaattgt

SEQ ID NO: 75910 - DNA, 2339 bp, Zea Mays
cgaagcaaaccgaaacaaacaaacccaagtgcgcgtccgagcctcgaggcggagaagaaaccggagcgagatatttgcatttcagtccctgcgaagagaaaaccgtcgcgtcctcgccgcgccgctcgcgtcgggatcccgccgccgccctactcggtcgaccatggggacggcgacgatggcgactgcggtgggcgcggccatgctgctctacttcgtgctgagccggcggctggcgggcgaggacgtctcagcccgcggcggtggagggggaggagtcgggtctggaaagcggcggagggggcgcgcgctgcggcggccggtgcagccgccggcgacgtggatcgaggcggtgggcacgctcgcggaaacgctgcgtttcacctactcggagacgctcggcaagtggcccatcggggacctcgccttcggaatcaagtacctcatgcgccgacagggcaatttacatgttgccagtgtatatgctggaagtgattgcattgaattgaaaggacctcaaatcatggaagagctgattgttctacggcggttgattgacctgtgctttcttttctctaagaagccatttccagtgtttcgggaattagctggattttcacaggaggatgttcttattgaggaaccaaaggcgggggtgaattttgaagcctgcccatacaattatacgtgatgagtgcaccaaatccttccttgttttgatccgagggactcatagcatgaaagatactctgactgctgctactggggctgtagtgccatttcacctctcacttttggatgaaggcgatgtgagcaaattagtgttaggttatgcacactgtgggatggttgcagcagcccgctggattgcaagaggtgtaacaccatgcctccgtgaagcagtcagacaatgcccagagtaccaaatcaagattgttggccattcattgggtggtggtactgctgcattgctaacctacatccttagagaacacaaagagttttcttcaacaacttgtgttgcatttgcacctggtaacagcttcatcatggttaaatgatctgagggatcaaatacaacagacacgcttcctaaatgtcgtttaccggtcagccactgctttaggaactcgcctgcagtctttttctggtgcgagagagagggttgcaggtgctggagcatttctacgtcctgtttcaaacaaaacccaggttgtgatgaaacaagcacagaatgtcgcacaggctgttgctagaagtcggtctgcattttcctcatggtcatgcatgggtgcacgtcgtcgaggtaacattgtggcgccaagaccatagaagaactgcagtatactgcagctagtgtttctgttcatgatgcagcagaggaagaagaggctcttttgagtgaacatgaaacctccagggagaatgccgaagaagaaacaacagagggtgagttgtggtatgagtttgagaaggacttggatcgacaagctgaaatggaggcacgaacaagggaggaagaggcagctgcagccaaagaaataatggaagaggaaagtgctgtgctaaaaggtgtagatgacaggcagtccttcacaccagatagcttggagaggcagcaattctacccccctggtagaatcatgcacatggttgcaatgcctcccacagacgctgacccagatgatccggttgctgctgacgagtgctgtgttggaatatatgagacccctagagatctttacagcaagattcgactctcaaataccatgatcaatgaccactacatgccaatgtataagaaaatgatggaaacattgattgagaagttcgcgagggatgaggactgctattgtacaggttctactgcagaataacatggaagcatgaatgacctatgtacatcgataactgtacaatactccgtgttagctgttattagcctatctgacattgcaatatacaagaggtgatgtcctcctgacccgtgaaaaaaggattttagttagggtcatgtgagtgtgtgatgtgtaaatgtaaaagaaaccagaatcagcaatttaataccttttccagtcatatttgcttgtactttacaagcatgtgatgcttggatcttgaaatctaaatgtttacaaggcattttaaagtcaggcgcttagcaagaagagcgttttgacattgttcatacagaccaatgggcaatgactacagggaactaaaacgataagagttgcaatggcgcactggtgcttgtttagctagccatactatttgatacttgacatggctgttaagaactgaaatgtaaagtgaaagtagagaacggaagaaattgt

SEQ ID NO: 75911 - DNA, 2708 bp, Zea Mays
gaaaagctgagtgtttggcagtctgtagcagcttttggtggccagaagctgtgagaagccaaaacaaaccggcacttaattggaaaagcttaacaaatcggctcatggttatagtcacgcaacgaaaatctatctgaacaatggttgcagatgcagacgcggcgaagcaaaccgaaacaaacaaacccaagtgcgcgtccgagcctcgaggcggagaagaaaccggagcgagatatttgcatttcagtccctgcgaagagaaaaccgtcgcgtcctcgccgcgccgctcgcgtcgggatcccgccgccgccctactcggtcgaccatggggacggcgacgatggcgactgcggtgggcgcggccatgctgctctacttcgtgctgagccggcggctggcgggcgaggacgtctcagcccgcggcggtggagggggaggagtcgggtctggaaagcggcggagggggcgcgcgctgcggcggccggtgcagccgccggcgacgtggatcgaggcggtgggcacgctcgcggaaacgctgcgtttcacctactcggagacgctcggcaagtggcccatcggggacctcgccttcggaatcaagtacctcatgcgccgacagggcaatttacatgttgccagtgtatatgctggaagtgattgcattgaattgaaaggacctcaaatcatggaagagctgattgttctacggcggttgattgacctgtgctttcttttctctaagaagccatttccagtgtttcgggaattagctggattttcacaggaggatgttcttattgaggaaccaaaggcgggggtgaattttgaagcctgcccatacaattatacgtgatgagtgcaccaaatccttccttgttttgatccgagggactcatagcatgaaagatactctgactgctgctactggggctgtagtgccatttcacctctcacttttggatgaaggcgatgtgagcaaattagtgttaggttatgcacactgtgggatggttgcagcagcccgctggattgcaagaggtgtaacaccatgcctccgtgaagcagtcagacaatgcccagagtaccaaatcaagattgttggccattcattgggtggtggtactgctgcattgctaacctacatccttagagaacacaaagagttttcttcaacaacttgtgttgcatttgcacctgcttcttgcatgacatgggaattagcagaatcaggcaagcattttgtgacaacggttgtcaatggagctgatctggttcccactgtatcaactgcatctattgatgatctccgttctgaggtaacagcttcatcatggttaaatgatctgagggatcaaatacaacagacacgcttcctaaatgtcgtttaccggtcagccactgctttaggaactcgcctgcagtctttttctggtgcgagagagagggttgcaggtgctggagcatttctacgtcctgtttcaaacaaaacccaggttgtgatgaaacaagcacagaatgtcgcacaggctgttgctagaagtcggtctgcattttcctcatggtcatgcatgggtgcacgtcgtcgaggtgtaggtgtagttactgcatgttctaaagatgatatgagagtggaaacccatgtaacatcaacagttgagtcaaagtctgtccttgtagaacattgtggcgccaagaccatagaagaactgcagtatactgcagctagtgtttctgttcatgatgcagcagaggaagaagaggctcttttgagtgaacatgaaacctccagggagaatgccgaagaagaaacaacagagggtgagttgtggtatgagtttgagaaggacttggatcgacaagctgaaatggaggcacgaacaagggaggaagaggcagctgcagccaaagaaataatggaagaggaaagtgctgtgctaaaaggtgtagatgacaggcagtccttcacaccagatagcttggagaggcagcaattctacccccctggtagaatcatgcacatggttgcaatgcctcccacagacgctgacccagatgatccggttgctgctgacgagtgctgtgttggaatatatgagacccctagagatctttacagcaagattcgactctcaaataccatgatcaatgaccactacatgccaatgtataagaaaatgatggaaacattgattgagaagttcgcgagggatgaggactgctattgtacaggttctactgcagaataacatggaagcatgaatgacctatgtacatcgataactgtacaatactccgtgttagctgttattagcctatctgacattgcaatatacaagaggtgatgtcctcctgacccgtgaaaaaaggattttagttagggtcatgtgagtgtgtgatgtgtaaatgtaaaagaaaccagaatcagcaatttaataccttttccagtcatatttgcttgtactttacaagcatgtgatgcttggatcttgaaatctaaatgtttacaaggcattttaaagtcaggcgcttagcaagaagagcgttttgacattgttcatacagaccaatgggcaatgactacagggaactaaaacgataagagttgcaatggcgcactggtgcttgtttagctagccatactatttgatacttgacatggctgttaagaactgaaatgtaaagtgaaagtagagaacggaagaaattgt

SEQ ID NO: 75912 - DNA, 2111 bp, Zea Mays
caccgtatgacccctcgtctcgccccagatccagatcataggcgtgaaggccaacagttaccagaagctgactgtgtgatagatggaccaaacacgttcgaagacgacccgcaggacacgttcgagcaaggcaagtggattctccctctacatctctatttgtacccaagtaactcatataataatgtttactttttggatatttgcataattttatgggatttgcctaaataggatttttcctagaattactaaccctattccttgatttaccctgggataaatactatgcttagcaatttgtgctactactcaacttgataattatgatgtcactcgttaatgatactaatgttccggaaatgaagtttatattataatgttaacccgatggttaaacaagaccatttcgtattaaatggaacatggagtgcccacccaggacaacagtacaaccacgagtgctataatggctctggctttggtaattagttctatagacttagtgcttagcaaccctacctgaaagatgggcaagaggggcggcagtggtttggtggcagctcatgttaacatggggtggtagtcttggctaagttacctcgcctagagggccatcaatactgacgtggaaaccttagcaggtggctttgtactaaggatattttatgaaagccttatagtgggtccctagtcattcacctaggaagtgtttacgggtccgatcaacctaggctagaggggatacacggcttgtgggtaaagttgtaccacctctgtagagtgtaaaactaatatgtgagccatgctcacggttaagagcaacctggaccctcacatgatacttaaagatgggaaataaattgtgatccgatgattcataaatggtttgcttaagtggtttcacttaaatgtttttgatataatcatgtacttatgtttaattgggaattttgggatacacttacaattagtaagtcaggcgttgttagtaaaatattgatcaactaaaatgcttaccgcttatccatagcctaccttgttaaacttgcattactcctcccacttgctgagccccaaccataagtgagctcaccccttgctaatattttgatcagagggtgatgaagaagactttgcagatgatgtcgatgagaactaagtctaacgatgcaccagtcaccttcctatggaagagtgtccatgtttaattctattgtactttgatgatgatactttttaagacactattgtctaaatgatgtaataaagttactctactctctttacgcctttattgcattgtcttttgatatattacacttgtgacgtcaacatatgtgtgaaaaatggatattggcacacatatcctatgcattcggtttgcccccaaaaccggctgtgacagcgtcacttgcacatggtcacatgttgtcgtgcgcgcagtccgtgtgctccttcgtgcatgtcgcagtgctgtttcgcacgcgtcgtcgcgtgtcgttcgcgagtgccgcacgtactgttcgcacgcgttgtcgcgcgtcgctcgcacgtaacgcgcgttattaaattgttctcttataatcactcataacaattaattaactatttgtttatttgcccactattaaaatagtaaattggtcaaagctaatcggtagtcttgatttatagttgataaatgtcaattaatataactaggtcgaaccaaatgttctaactaatattttttagcgtaaacacgataacatgtcgaccgtagctccgactagcgtgtttcttttcctcgcgtgaccgtaaaacctatctctattttatagtatatgtttttataatgttttccttggtatggtgtaatgttattatgcatgtgtatgtttgttgcttgtgtttgtttgtcttcgttgcgtgtcgcaaatagacgcgatctgttcccaagcttcagtggatcaacgatcaagctccaacgaccaagtgaacaagctcctcgagtcctacgagattgaatatcctgagcatatgtttggtgaaggcaagtgtcctctgacctatttatgtcatattcacataataatttacttctccgcattacataattaaaacctaag

SEQ ID NO: 75913 - DNA, 227 bp, Zea Mays
gtcatggactacccattattatttatggagcagggaggaactgtatcattcttcagattataattgacaatttatggagcagggttctccaggttataactgatgacacattaaaatatatgtgttataaaatacacctgaaattgttgaggtaaatgcaatttcacttcagagttctcagcacatcagcctacataaatgtcgaagcaacagatggcaggggtttg

SEQ ID NO: 75914 - DNA, 522 bp, Zea Mays
cccccggcgaaacgtcccacagaaattggacacccatcttcttcgtgtggagtgtgcggagagccgcgccgtgtgtgtgcgtccatttgtgtatccacggaccgcagaagaacctcaaaagctcttcacttttcccctccactccacagcgcaggcgaggcaggcacacgcaagctgccgcatttcttgcagttgcacctcgcaaacagatggggagggcgccgtgctgcgggaaggtggggttgaagaaggggaggtggaccagggaggaggacgagatcctggcgaggtacatcgaggagcacggggaaggctcatggagatcactgcccaagaatgctgggttgctgcggtgcgggaagagctgcaggctgcggtggatcaactacctgagggcgggtctcaagagggggaacatcacggaggaggaggaggacgtgatcgtcaagcttcacgccacgcttggcaacagccattgattgctcacgcagcgcggcgatcaacccatgaagcaaacctcgc

SEQ ID NO: 75915 - DNA, 1292 bp, Zea Mays
gtcatcttgaaagcagacagtccccctaatgatagtgattatttcaaataaggtccacccaagggggtcaagtatgtagtcgaacttgtgaatgaatttcatgagaaagttctagttgtgtagtcccagatcgatgacccccagcccctcaaggattttggtctggtgatcaaatcaatgaccaggtggcaaggactgtgtgagacccagcgccttgaaaattatttacgcacgcaggagagctgtgcccacgcttttgatgttacgtgcccccggcgaaacgtcccacagaaattggacacccatcttcttcgtgtggagtgtgcggagagccgcgccgtgtgtgtgcgtccatttgtgtatccacggaccgcagaagaacctcaaaagctcttcacttttcccctccactccacagcgcaggcgaggcaggcacacgcaagctgccgcatttcttgcagttgcacctcgcaaacagatggggagggcgccgtgctgcgggaaggtggggttgaagaaggggaggtggaccagggaggaggacgagatcctggcgaggtacatcgaggagcacggggaaggctcatggagatcactgcccaagaatgctgggttgctgcggtgcgggaagagctgcaggctgcggtggatcaactacctgagggcgggtctcaagagggggaacatcacggaggaggaggaggacgtgatcgtcaagcttcacgccacgcttggcaacagagctacataagtcggagctggagaagcaggttcttcaagatgcagagaccatcaagatgattgctcttctcttccatcagcaagatatgaagactcgggcgcaagagtaaagacagatcgtgccgtatgctggtcaagcctaggagacgtcagttagttcagcctgtgtgctgttaaggccgagagccatctaattggaaccctcgtttgcatttttgtcttgttagcgtggaatattctgctattgggtgtaggctgtaacaccgtgatggctgttgcctaggcgagcagtatcagggtgggccatttagttttgtgtttcattctgaatgttacatactaaactctaattttgttactatcaatgaaattcagttttgccagtgtgggaaaaaaggaagctaccatatatgagaagtcgcaaaaaatgcagcttaaactactgaaagcacaatgtgcactaacataaactaagatagtacaatttgacagtgcacaatatgcaaagacaacagaatcacattttaaatacactgtcacatttgaagacc

SEQ ID NO: 75916 - DNA, 852 bp, Zea Mays
gtggatcttgtgaattttagtgggaatttgatcgtggaaagtttatgaagttttgtcggggttctggatgcataagatagtggtgtatgtgatttgcccatagtttctgcagcctcattgttttccatttggtatcaataaagcttcacgctcatggatagggctgatacatcaggttgtcagtggtggtatacattacatgaacatccatgtgtatattcattttctgtatactatgtgcttcctcagtggtgaagttgtaaagctggagttctgatctctactggttggattaagtatctggtctctggacaacatataaatttcttcctatcataatcctaccttatttatactaagaaagatggaccttaataggacaaatatttggtttcatggaaaggaacatatagctactgcttcattctcccaggcccaaccatctgccataaattgcaggaatgaagaactatctatgtcagccgtgaacttgggttacattaggagcttagaaatagcacagaactctagaaaatcatttcagcatggcaatcaaagtttgaccgctccagatatgcaaccagacatgctttattcttgttcctgttttgttttccttatgtattaattccttaacttgtaatgcacatgatgttttccttatgtattaattccttaacgtgtaatgcacatgatgttttccttatgtattaattccttaacttttaaagcacataatgaaggctggttgtcgggtaagttctcttaaactttggtaagattacgtacttttgctatggatattttgaatcaaatacaaggtaattcatttaaaaatcgtagtaacacatg

SEQ ID NO: 75917 - DNA, 954 bp, Zea Mays
ccacttgtcgcgcgggatggtagcgtccagaggcacgtcgccgtcgccatcgccgcggtagagaaggccaggctgagcaggaagatctcgcacgccgcgtgacgtacaagtacaaccatgtgtgtgagaccaaactccccgcccgcgccgcaccgcttcctagttcctttcctgaaacggtcgcctggacatcaactatgctgatggatcaacgaacgtgatacgggtctcctgtcctctcctctctctctctctctctctctctctctctctctctctccaccggctatatcatcgtactgccttcgtctcttccgtcagtagctgcagatttctgtctggtacaggttgtcgtatacgttgcgtgttgctgcttgctggggagaggggagcgctgttgcagatggcaagcttcaaccaagagagcagagcaggcacacagagggaggaggcacctctacagggcaagtacggaggcatttctccgaagaaggcgctcatcaacaaggaccacgagcgcgcctacttcgactccgcagattgggtgctcggcaagcaaggcgtgagcagcaacagcccgacgacggtgcccgcagccgagcccctcaagcccaagctgcagcggacggcgtaccaccagcttccccctcggcggcccgcgtacacgtcgtcggagtagctcggcgagcggggagtcgctgcagtgcagcaccgtaggaagccggaatccacggaggtggcgccaattgggttgtacatgttgagaaacactaatgaaggattacgtggtaaataccgaatatatttctaaaggatatcacgtctatatatatatatatatacatatatatatatatagaacatatacaaatgtatcgtctcgtgtagaatatattagctactcatatggaatatagatgagaaagaggctagagggcccaccctatatattat

SEQ ID NO: 75918 - DNA, 1319 bp, Zea Mays
gtctgctacaggcacttgctgctagctatgtaaatgctggagaatttggaaaagcaaatctgctctgaagaaagttgagggccttatcagtgctcatgatgacagacagccttttgatttccttctgagcctatacgcttcactaggaaatttgagcgaggtcaatagggtatggaatgtgataaagtccaaattctcgaagatctatatggagtgggaatctaattatgaaacctttgatgtaaagctgacgaatatgatgattcgcagccatctgaaggttggcatgaccgaggaagcagaaatgttggtggagaaggtcaaggaaaatggtgcagagtttgacaccaaaacatagaagctcgatcaggacaggatctacaagttccagaagtatttcgaagaacacaaggatgctgacggtgcagagaggttctgcaactgcctgaggacgctagggtgcattgacgggaaagcatacgagtctctcttacgcacatacttggcagccggtaagaaaagctgttcactccgccaacagataaaaaacgataaggttgagatctgctatgacattgggaagctactcaagaggttgggcgacaaggggcgatgagatacatatttatcttcgtttttaatttgagagagattagttctgttgatcctgtacgtccatgagcatcagaaaccaaatgtcggtccaacggttgaaaatgtatcagttctttcgttgttcatgaaaaggatagctcatggctgggctggtatcgttccggcttttgcgttcttacaagaagcagtggggaacaataagattcttgtaagtgcaacgtgaggtcttgtctagctaggcttttttgagatacacttttcttctgaaatgaaattgctgttacaacacgaatcctgctacagagccgcttcactttccatgtctaaagtcagtgtgccgtcaggacatcaggtttatgtcgtgacaacgatatgtgcacgctcgcgaggagtgtagtgtggataggtctttgtgaacagagcagcaattcgtgctggaaataattggctgcaggacgttagtccaaagctgtctacaggtgtgctatgcttctgtcgtgtcaaaccgcgaaaaatggtgaatctgaaaccgagataattcttttttggtggtaaagacatacaattgctgaacgtcgtagtctaattctagacgtactgtatcattgttgccatgtaagtgtcattcttttgtcatgtgaccatttgttgtcaaatatactatcataaacttccttatgactatccttatgaatggttttcgt

SEQ ID NO: 75919 - DNA, 1347 bp, Zea Mays
gtctgctacaggcacttgctgctagctatgtaaatgctggagaatttggaaaagcaaatctgctctgaagaaagttgagggccttatcagtgctcatgatgacagacagccttttgatttccttctgagcctatacgcttcactaggaaatttgagcgaggtcaatagggtatggaatgtgataaagtccaaattctcgaagcagccatctgaaggttggcatgaccgaggaagcagaaatgttggtggagaaggtcaaggaaaatggtgcagagtttgacaccaaaacatgtgagttgtttcttgatcactacatgggcactgaggacatgaactcagcactgaactggttagagaatatgactaaactctccaagaaagcagagaagctcgatcaggacaggatctacaagttccagaagtatttcgaagaacacaaggatgctgacggtgcagagaggttctgcaactgcctgaggacgctagggtgcattgacgggaaagcatacgagtctctcttacgcacatacttggcagccggtaagaaaagctgttcactccgccaacagataaaaaacgataaggttgagatctgctatgacattgggaagctactcaagaggttgggcgacaaggggcgatgagatacatatttatcttcgtttttaatttgagagagattagttctgttgatcctgtacgtccatgagcatcagaaaccaaatgtcggtccaacggttgaaaatgtatcagttctttcgttgttcatgaaaaggatagctcatggctgggctggtatcgttccggcttttgcgttcttacaagaagcagtggggaacaataagattcttgtaagtgcaacgtgaggtcttgtctagctaggcttttttgagatacacttttcttctgaaatgaaattgctgttacaacacgaatcctgctacagagccgcttcactttccatgtctaaagtcagtgtgccgtcaggacatcaggtttatgtcgtgacaacgatatgtgcacgctcgcgaggagtgtagtgtggataggtctttgtgaacagagcagcaattcgtgctggaaataattggctgcaggacgttagtccaaagctgtctacaggtgtgctatgcttctgtcgtgtcaaaccgcgaaaaatggtgaatctgaaaccgagataattcttttttggtggtaaagacatacaattgctgaacgtcgtagtctaattctagacgtactgtatcattgttgccatgtaagtgtcattcttttgtcatgtgaccatttgttgtcaaatatactatcataaacttccttatgactatccttatgaatggttttcgt

SEQ ID NO: 75920 - DNA, 1367 bp, Zea Mays
gtctgctacaggcacttgctgctagctatgtaaatgctggagaatttggaaaagcaaatctgctctgaagaaagttgagggccttatcagtgctcatgatgacagacagccttttgatttccttctgagcctatacgcttcactaggaaatttgagcgaggtcaatagggtatggaatgtgataaagtccaaattctcgaagctgacgaatatgatgattcgcagccatctgaaggttggcatgaccgaggaagcagaaatgttggtggagaaggtcaaggaaaatggtgcagagtttgacaccaaaacatgtgagttgtttcttgatcactacatgggcactgaggacatgaactcagcactgaactggttagagaatatgactaaactctccaagaaagcagagaagctcgatcaggacaggatctacaagttccagaagtatttcgaagaacacaaggatgctgacggtgcagagaggttctgcaactgcctgaggacgctagggtgcattgacgggaaagcatacgagtctctcttacgcacatacttggcagccggtaagaaaagctgttcactccgccaacagataaaaaacgataaggttgagatctgctatgacattgggaagctactcaagaggttgggcgacaaggggcgatgagatacatatttatcttcgtttttaatttgagagagattagttctgttgatcctgtacgtccatgagcatcagaaaccaaatgtcggtccaacggttgaaaatgtatcagttctttcgttgttcatgaaaaggatagctcatggctgggctggtatcgttccggcttttgcgttcttacaagaagcagtggggaacaataagattcttgtaagtgcaacgtgaggtcttgtctagctaggcttttttgagatacacttttcttctgaaatgaaattgctgttacaacacgaatcctgctacagagccgcttcactttccatgtctaaagtcagtgtgccgtcaggacatcaggtttatgtcgtgacaacgatatgtgcacgctcgcgaggagtgtagtgtggataggtctttgtgaacagagcagcaattcgtgctggaaataattggctgcaggacgttagtccaaagctgtctacaggtgtgctatgcttctgtcgtgtcaaaccgcgaaaaatggtgaatctgaaaccgagataattcttttttggtggtaaagacatacaattgctgaacgtcgtagtctaattctagacgtactgtatcattgttgccatgtaagtgtcattcttttgtcatgtgaccatttgttgtcaaatatactatcataaacttccttatgactatccttatgaatggttttcgt

SEQ ID NO: 75921 - DNA, 1344 bp, Zea Mays
gtctgctacaggcacttgctgctagctatgtaaatgctggagaatttggaaaagcaaatctgctctgaagaaagttgagggccttatcagtgctcatgatgacagacagccttttgatttccttctgagcctatacgcttcactaggaaatttgagcgaggtcaatagggtatggaatgtgataaagtccaaattctcgaagccatctgaaggttggcatgaccgaggaagcagaaatgttggtggagaaggtcaaggaaaatggtgcagagtttgacaccaaaacatgtgagttgtttcttgatcactacatgggcactgaggacatgaactcagcactgaactggttagagaatatgactaaactctccaagaaagcagagaagctcgatcaggacaggatctacaagttccagaagtatttcgaagaacacaaggatgctgacggtgcagagaggttctgcaactgcctgaggacgctagggtgcattgacgggaaagcatacgagtctctcttacgcacatacttggcagccggtaagaaaagctgttcactccgccaacagataaaaaacgataaggttgagatctgctatgacattgggaagctactcaagaggttgggcgacaaggggcgatgagatacatatttatcttcgtttttaatttgagagagattagttctgttgatcctgtacgtccatgagcatcagaaaccaaatgtcggtccaacggttgaaaatgtatcagttctttcgttgttcatgaaaaggatagctcatggctgggctggtatcgttccggcttttgcgttcttacaagaagcagtggggaacaataagattcttgtaagtgcaacgtgaggtcttgtctagctaggcttttttgagatacacttttcttctgaaatgaaattgctgttacaacacgaatcctgctacagagccgcttcactttccatgtctaaagtcagtgtgccgtcaggacatcaggtttatgtcgtgacaacgatatgtgcacgctcgcgaggagtgtagtgtggataggtctttgtgaacagagcagcaattcgtgctggaaataattggctgcaggacgttagtccaaagctgtctacaggtgtgctatgcttctgtcgtgtcaaaccgcgaaaaatggtgaatctgaaaccgagataattcttttttggtggtaaagacatacaattgctgaacgtcgtagtctaattctagacgtactgtatcattgttgccatgtaagtgtcattcttttgtcatgtgaccatttgttgtcaaatatactatcataaacttccttatgactatccttatgaatggttttcgt

SEQ ID NO: 75922 - DNA, 2406 bp, Zea Mays
agaagcaacacctccctcttttcctcgagcggtctaaccccaaaccctaaaccatggcgccgccggccccatccgtcggtccccgcctcctactccgccgcctcctctctacggctaccgaagcggcggcggagacacctgcgcccaccgcccccagctccgccgccgccgcgaagccggcgaaacaggacccgaggctgctctaccgtcgtttgtcggcgcttggaagcgccggggaggggagcgtgtcgcgggttttgaacaagtgggtgcgggagggcggcgcgacgcgaagcgacgacctcgtcaagcatgtcaaggagctccgcaagtacaagcgtcacgcccacgccctcgaggtatacgcctggatcctccttgtctatcaaccaggcgcgcccattcgattccagttctggtttggcagtttgtgatctatgatatcaaccaggcgcgcccattcgatctcagttctggtttggcagtttgtgatctatgaatcgtttagtgtttgttggctacatgagtttgggaagagttgtaattagttagtaaccgcaattagttaggaaccctcccctagtctggtgttggagatcaatgatgtcggtggttgaatggggttttgccagcccagtgtatcttggcctccgaggacaggttctgtgagggacttggtgctggctggcaagataaataagcaattgacgggaggcagtgtggctggcaagataaattggcaattgactggagacattctggttgcaattgctacattgtcaccacccgtgttgcccatagcgagattgaaacacagacttgagcaaatcacagataatcaaatgacaccgatatatgagggagtttgactcctgttctttcctgtttctcaattctttcttgtccccccttttgtctccagcttctctcctatatagctaccacttggttctgccaacccaaaactgcaaggtccaaaggccatgacaactgggcccacatatctaatggtgctaggtatgataatgttgcccccacgaaacattgcttgtccccaagcaatggcttgaatgccactactgtaagtgccaccagcattcatggcacattcaaacagactgcaaacagtatcctcccaagggcatacttgcccacagcagtacttctgtgatcagaatgacctctgagttgaaagttttgaacgccaaggatgtgaaatcaaacttcccatttgatgcaatactcatcacaccatgtagcaacttctatcagtacctctccccttagcacttcatggtggctccaaagtccgaagattgaattagtatgtacagccagaagatgcagaagaccgaaacacaaacactgggcattctgaattatgtaactcataattttgactctgacaatttgctcacctttcagggggcgcaatgcatgaaatttcaataagtaatcatgaatgagcaaggcaaactttagattgtgcccaataaactctccactagaactgcaggatagatgtagcagttgaacatctgccctgacagcatcaagaatctttagcaatcctgtgtgagctcttctaaaagttttcaaactaacagtagttttagaatcagctacctgaaccataaatgcacttttaagattttcttgtagtttcaaaatacttggcaagcacatattatgttgcctagctctttcttctaggttgaaatcactcatccagaatagttcaagtaccttctttctttctgttagatgaaaaataacatatctttctgctggcattaccttgaaaacttgattgatttcaatcattgttttcaagtcgtccgattaatcgcgattagtcgggcaggtcgcctggtagtggccgatcagccggacgactcgactagagtatcatgtcgtccaggtcgtccaactagtcgtcgattagtcgtctgactagatggtaaatcgaccaggaattgtccaggcggctagggttttctagtgggctattgggcttctattttttcggcccatctacagtagtataaaggcgatgcgccgccaccccttatcaccccttgaaacttttcctctcctctgccgagtctagaacataggctgcggctctaaaacatcagcagcagctccagaacatcggcggctgctccaaaacactagcgacgagatgagctactcatctcaaggttcccccttctccccttttcctatctttcctattgtctgaattccgatgaatctgaatctgttggagaagttgctgctgctttttgcttggatgatgatatgctcttgctagtaggtactgcattactgcttgtagccttgtattcaatatttcagttctgctataatgctatatgcctatattgcctttcactctgttac

SEQ ID NO: 75923 - DNA, 548 bp, Zea Mays
aacggaatcggcaggtgctgtttcgtccgcccgggattcttgcgccatgatccgctctcttcgcttgggctgcacctaatatctggtggggtcaacctgtcaaccctcctcccgtgaccaccacatgcccaacggatttctgtttgagaagatcgtgccggctcacctgggaatcctaccgaccggatgcctttgggctcttataaattcctgaccgcctagtcgtagccaccgccgtatgcatctgtgtcgagatgagagagaggaatcgaagggtgagagagagaccacggggtagaaggtaatcccgtgcgcggccgtgggggcgattctatcggcgccatcgattcagttgaggaagtggtgggggaaactccggtgattcgtggggaggcgcgcgaagcatgatccagtcggaatctggccgactctagccgggattcgtcgctggacttcacggagcagccgatccgcctaccccaacatcgccgcactgctctgctgaatgatcaccgacgaaccagtggccgaggatcctggtgtttagc

SEQ ID NO: 75924 - DNA, 929 bp, Zea Mays
attcgagtccatggcaggccagccctcaagcctgcagctggacctgggctatatgtgagagaacagccgctgtctattgcctgttgggccgaactgggcagcgtggaaaggctacgaagagcggagaggcgctccattgaagcggacggcgacgagctctgcatgctgcgctgcgcccttctcaccgccgccagcccgccagaacgtctcctccccgtctctagagtggctctttctttctccgtcaaatggctctcgcgtgcgcctctcacgcgtgccgctttctcctcgccggccaggcgagatctttccacgcccagccctaccatgagaaaattgattttgagttttgcacacaagtaccgtcttggtctctggaagccccaagcagaacccaggaaagtttaaagttggttcgttcttgaaagatagtctactgttggactgaggcatgtttgggacattgaatatttgctttgtaatttagaaacctcaaacctttgttctctgtctctagccatacttatttgcaaccattacgcaaaaaaaaaagattctagaaagattccaacttattgtgtgtgggtttgttccttttgtaataacaaatcataaggctttgttggtttcatccctaatccatcgggattagagtggattgagggaggttttgacttgtaggggattcaatccctctcaatccttgcggtttgataaaaccgaacagggtcaaaggtgcagccccctgtgataatctgtcacttgatgtttgtatttttacttaggtttcttaccaacaacattgcagttttgttaacgtagcctaagtaaattgattaggttcagagttggacccgacggtccacaattcaacaatgttgtaatgacatagaagtttttgtggttctacgctgccctttcaagctgca

SEQ ID NO: 75925 - DNA, 1300 bp, Zea Mays
caaacctgcccctgcgagactccggaggcgcgcctcttttattataaaacgcaagcggaaccatggagttaaacacaagtgcctgctcacaattagcagtgtacgtagttgacaccacacagctgcgccattaacatatagcaggcctagcagtgccgttctggaaagggcgggagaggggatgaggacgagaggtggcagcggattcgccggcctgcaggtggcgtgcgtcgtcgccgccctgtgcctgctcctgccgacggggagccgcgcccaactgcaggtggggttctacaacacctcctgccccaacgccgaggcgctcgtgcgtcaggtcgtcacggctgctttcgccaacaactccggcgtcgcacccgggctcatccgcctccatttccatgactgcttcgtcaggggttgcgatgcctccgtgctcctgtccgtgaaccccgccggcggcaaaacggagcgtgagtccccggccaacgacaacctgctggggccggacagcacggcggagatcctcatcgacggcttcgggaagaagaacctgagcatcgaggacatggtggtcctgtccggctcccacaccatcggccgctcccactgcttctccttcctgtccaccaaccggcagcggctggccaacgggaccataagcccagcgtaccaggcgctgctggaggcgctgtgcccgcccaacccgggccagttcacccccaacaccacggagatcgacgtcagcacgcccaccgtgctggacaacaactactacaagctgctgccgctcaacctgggcctgcacttctccgacgaccagcttatccgcaacggcactctcgcgccgttcgccagcgcattcgccgccaacgagacgctctggaaggacaagttcgccgccgccatgatcaagatgggcaacatcgaggttaagaccggcaccaccgatgagatccgcctcaactgcagcgtcgtcaacccgtcgtcgtcgtcgtccaccgctggggtgatcgagatgctgttccctgcagccgacgaggttgccacgagctcatgactgatcgaaaaaatatatccactcgtgttaataacgcgcgtgcggagtacgtacatatcttcgcctttgtacgtacgtggacctcgattgtttgctgcgcgcacagtcgtactgaactgggtttggtttgtgggtgtggtgaaagcatgaataaaacttgcttacatcactaccgaaaatagcttctttgtcgagtgtctgaaccactcaacaaagtctgaaaaacatcgagtgtggcactcc

SEQ ID NO: 75926 - DNA, 1979 bp, Zea Mays
acgagaattcaaatttgaatcaggcggctcccgtaacacagccgcaggccgcagcatgcgtctcgtcgccgtcggaggcagcctcagcgcgtcttctgtattcctaattctacctccgcctttattctacagttgatactaatatataaacgcaacgcctactgtctgtctgcacgtcgtctgaacagggaggcggctggtgcaacaacgtgagggcgtgccagttccgcaaggcgagccggcgcggctcgtcggacctgatggagaaggagatccccttctccggcatcatgagcagcagccctgtcgacaaccctggtgaacgggttttacttccgcgggcagcgcgtctgggacgccaccgtccggcacctcctctccatcgggatggccgctgcggaccaggtgttgctcgctggctgctccgccggcgggctggcggtcatactgcactgcgaccagttccaggccttcttccctcggtccaacaacgccgccgccgccggcggtaccaccaccactactaccgtcaagtgcctcgccgacgccggcctcttcctcgacgccatcgacgtctccggcgggcgcagccttcggtcctactactccgacatcgtggccatgcagggggtgggtcccaacctgccgccggcgtgcactgcccgtttggacaccgcctcgtgcttcttccctcagaacgtgatcgatggcgtaaacacccccatcttcctgctcaacgcagcgtacgacgcctggcagatacaggagagcctggcacccagcggagctgaccccagcggagcctggcgagcctgcaagtccaaccactctgcctgcgacgcgacccagatgaaattcctgcaaggtttcagggaccagatggtagcgtccgtgttgggcgggcgcttcgccggctccaggagcaacaacgggctcttcatcaactcctgcttcgcgcactgccagtccgagctgccggccacctggagctggagccacgcggcaggtgcctcccccgccatccaaagcagggggattgccaagtcagtgggcgactggtacttcggtcgagctcaagtcaaggcgatcgactgcccctacccctgcgacggaacatgccgcaacatcatatgatcacagacagacaggctcatgttgttgtaccctgtggctttgtgccgcacacgtcggccgtgtccgctgcagcttgcataactctcgtgggccactaaaagccgacggaattaattgattctcgtcggtggtcaacagaaattaattaaaccttgtccacaaagtcccatcggttctcaagaaccgacgagaattactaattttcgtcgatatattgcttattctcaggtgtgagaaatgttcccgtcattattcatcaagaatggcactcgacatgtgtgttttgccgaatgtccgataaattgcacttaataaatcgttgcaaagagtaagatacccagtaaatattttatcctgctaaatttagaattctgccggattttggtagtgtactcagtaaatattttctgctgcttaattcagagttctgcgtacctgcccgtgctaatcctgtaagaactgaagaatgaattatgcaaaaactctttgattgagcatgtcatatttctgtacaactagtgaaattgatgctatacattctatgaaaaataatatgccgaggcacaggatctgctgataacatcaatagcccaagaaaaaatcagctgattcctgtcatgaagtgcattcctcattcgtattaaccatctttgtacatttggagactggagccactgcaactgaaggcaccggcaacatttctcacaggaagatcatgatgcagcttgggcagcaccaagtttgttagctcctttgtccagtttcttttttgacaccttttgggatgcttcctcctcttgattcttcactactggtttgaactgttgaaaatgaaagtataattt

SEQ ID NO: 75927 - DNA, 901 bp, Zea Mays
ttccatcaattgataatttatggtgctcgttgtcaacactggaaacctttaatgtaaactactcttttatgctgatctttaattactactagtctactactttggtgcagacggatccaaattggagtaattttctgtatgatgatgctacaaggaaattcaatctgatagattttggagcagcccgtgattttgcaaaacactttgtagatgattatctacgaatgttgcctgtgcaaatagagatcggaccggtgtcttagagatgtcccgcagactaggattccttactggggaggaaccagaagtcatgctggatgctcatgtccaagcagccttcattgttggtgtgccgttctcaaagccaggcggtcacgattttcgagcgaataatatcacgcatagtgtttccaatcttggggccaccatgttgaagcacaggctgaccccaccaccggatgaagtgtacagcctccatagaaagctgtcaggtgcattccttgcctgcatcaagattggggcagttgtaccctgcagagagatcctgttccaagtttacgagcaatataatttcagcgacggccattcagacgttgaatctagtgctggatagtagggtcaaagaaattcgttttcgatgtcttatgtaactgaaatactccctctgttttctatttatttatcgcgttttagtataactgacttgagctacaaatattcgagaacggacggaatccttgtcggctgcagttcatttttcggagaggttgccggtcaccttttattcttaattggcgtcaaaagaatgtaaaataccttattctggatttggatagtcaatagtggtggcgttatttgcacatgaaggaataaagacattagaacaaagttttttttgata

SEQ ID NO: 75928 - DNA, 897 bp, Zea Mays
gcgagtctcaccgcgcttgccccgcctccgcggaccacgcagctccgctctggttcctggtccaggggccttccacgccttccctttccatggcgtccagggatctccggcgcctgctcgacggtgtcgccctcgtcgcgcgcgaggccacgcggggtacctccctgcgtgatgtcctcaggtctgcgctccttgccaccaccgacctcgccggcctcaccagaggcaccccgcgccgtccgccgcaccctccaggcgcaggaccgctgcccgccaccgaatcctcccgcccctcctccgtcgtgtacttctcccacgatgaagccacggcgtcgccgcaagatcatgcactggagcgtccgccgccagcgcaagaggccccgcaccccgcgcggacgcaggagaccgtccgaactggtacaaccgcctccgttgcagccgaacctgctgccgtcgcggcggacaggcccgaacctgcggcacctcctcccgatccctcgcctttgccccaacaggcgccccctttggcctcagcggcgcctggggagaagaggaggcggctgcgggaacggaaggttccatccacgcccttcaccagagcactcgggactgggcgccgggttagcgtggggcactgttcaggagtcggcccgtcgggtaatgatgcggggagcagcgctcaaggtggggcagatgctgagcatccaggacgaatcccttgtacctccgccggtgttagcagctcttgatattgttcgtcaaggtgctgatgttatgccaaggaagcagctaaattcagtccttgatgccgagcttggtcctgactggtcctccaggttgaggagtttcgactatgaaccgctagctgcagctagcattggccaggttggttcagca

SEQ ID NO: 75929 - DNA, 1815 bp, Zea Mays
cgcccacacagctcccctccaataaaaacacccaccttgctgccgatttcgggggcgggagtgccaagtggtttctagagctgggtagagattggcggtttgccgatggggagaggcgacggggaaggagggatggcgacgcggggcggcgtggttgggtcgggggcaatgctggggctggacatgcacctcgccgcgcagcagatgcacccggccgccgccgcgttccagcaccagcaggaccaccaccacgatgggttccagctgcagcagccgcccccgccgccgtcgttctcgccctactccaacacgtcgtcgtccagggtcgtggtgagcgcggcgacggtggggcacgatgaagacacggtgggcaacggctgctgcgggaagggaggagtggtggtgcagcagcagcaacagcaacagatggcggcggcggggtgcccgtggacgaggatgaagtggaccgacgacatggtgcgcctgctcatcagcgtggtctacagcgttggggatgactgggagggcgcggcaatgcctggcggcgcggggggaggcaaggcgagcagggcgggctcgtcggggcacggccacggtcatgcggcggcggcgcagcagcagaagaagggcaagtggaagtcggtgtcgcaccctcgtccgccgctcgccactaccaggcagccccgtccccgccgtgcatgaaggactcctccgccgacgtcgcggacgatgaagacgacagcgacgccgtgagcgacaacggcgaggaggacgaggacgactacgacgaggaggacgacggtcacatgtaccacagccacctcaccagtcgtcagcacagcggcggcggccgccggcgcggcaagcgcgagcatggcgaggatagcgccgcggccgaggacctcgaggacgaggcggccggcggtgggaaacgcgcgaggacgggggcggcacccgacccatcggcaatgctgcagcagttgaagagcgagctcgcggccgcggctgccgcggcgatggacccgcagcaggccaggtgctgggtgcgacgccgcgcggtggaggtggaggagcagcagatcctcctcgaatcccacgcgtacgacctggagcggcagcggctgaaatgggatcggttccgcgccaacaaagagcgcgacatggaacgcgcgcgcctgcagaatgaccgcctccggatccagagccgacgcttgctgctcatgctccggcacaaggaggtcgagctcgacatggccgaggccaactcttcctcggtcgaccaccaccccggcgcgtcgccgctcgcagcacaccagcagacaattgggtccagcccgtccaccgccggccacccaaattagatgccgtgcgtgcatttccattccattaacagtagcggtcagtagctgaaaagagaaaaagggcagtagtgctaaagtttcagggttttttattgtggtccgcgtcagtgtttcagtgtagcatgttcatattatgtgcggctgtgtccggtcagactacttcgtatagttttcttaactattcagtcaaaatacctctaattcacaaaaaaaagtttgtcaaacactatagcctcatcaaattgtcctccatcaaaagagtgaattaggagttagattcattttttgacggccaatctttttaagagatgctccatagaatcatgttttagctctttaagagatggctctatagaatcatgtttcgtatgctctttcaattacgtcctcgtgggatgaaaattacttgtttggcattgctactaagcttatttgagatgccggtgaaaagcag

SEQ ID NO: 75930 - DNA, 2624 bp, Zea Mays
caagcatacgacgatacgagtcatcacatgctaaacaaaacgaatagcgacatgtatccgatcgattgcacacagtaattcgcaaattaattcaggggccgagaatggcatcataaaaacatagtacaagattaattcaaaaaccattcgaattcaacagtgcttgacaggacccataacaacatgatataattaaacccaaactacgcgtcgccaaaagagatacaggtgttctgttccaagaaactactaccattgcaacaaaacaaaacaaagcaaaaaggattatcacctagcaagacttcccattttccttcccgacagaaaggaggggcatcctacgcctgctggttgtagacgtaggtgaggccacacttaccgcagtagtggcggtcgaagtggttggccatgaagacccccgcgccgcactcggcgttggggcactccttgcggaggcgggtgaccttgccggtggcgtcgtcaaccttgtagaactggagcacggccagcttcaccttcttgtgcttgtgcttgatcttcttgggcttggtgtacgtcttcttcttgcgcttcttggcgcctcccctgaggcggagcaccaggtgcagcgtcgactccttctggatgttgtagtcggcgagggtgcggccatcctcgagctgtttgccggcgaagatgaggcgctgctggtccggcgggatgccctccttgtcctggatcttggccttcacgttgtcgatggtgtccgaggactccacctccagcgtgatggtcttccccgtcagggtcttcacgaagatctgcatcttggcaaccgcgcacttctccggcggcggccgccctaacctaaggtggcgctggttctcgcctgcggcggcgggatggggctgtgtgtgtatgggcggaggctagggttcaagaggggagagatgattcttttatagctcgggtcgggtgctctctcccactggatccaaaaggatttggatcggacggcacatatgggcctcctgtgatgagagttgggccgcatgcgcttcattttctaatcccttttgtgttcccccggaggttggtttgggcctcgtaacttttgtgccccagttcgtttatcctctcctctctctttctctgtcttgctgcggcgacacctccgcttccgccggccgagtcccgagcggagccgaagcaacaaccgccggggaggcgagggattgattcggagatggcgtcaactagctctataggcgacgtgggagcctcagttcctcgcaggtaaaaaaaatggaaagggagatgacaagttagttggtgcgctccttgtgggatttgcgcgtccaattccaccttgagtgcagggatcttcctctctgtaatttgtaacatatgcaaaatcacgtgtggaggatgtttggaagaagatgaatggtggctttcctaataagatgcccaaacctgcaatgacgaagctcagttcaacagcaacagaaaagaaaaataagccaacaaatgtcagtaaaatttgttttgaacttagcagcattgaggttgctttgtgaaatatctactggttggatttttgacagaattggatgactgttctaggcctctcaccaagtaaggcatgtaattccagtcaaggatcaaaaaatggtctaaaatggacacaacatgaaacgagagaggatgccaaaaaacttgcagcaaaggcccttgcagctgccaaaaatgccgctgctgtggcatctggacgagggaaagtggagatcactgaggtaagggactttgctgtcaaggacatcgaaatcaagaaattggttgatcctaattcgaaggaggcaatagagaaggccaaggcagctggtgccgccccatcagctgtcgatagcattctagagcaaatacggaagaagcagaagctgagcgtcctggacaagacgaagaaagactggggagagtacaaggaagaaaaccgaggcttggaggaagagctggacgcctacaagaagagctcgaaccagtacctcgacaagcaatcattcctgcagcgaactgattaccgcgagtttgagcgcgagcgggatgcccggctgtccatgatggccaaacggaggaccgatatgcgggaggacgatgtgaagggtccattgaccggaactgccttcgacccgcttcatttgccaactggtgttccagtgcctatgtgtttttgtggtaatccttgcaaggttgacaagtctgaggatcatgacacgtatcgacaaaagtattggatgtgtgctaactatgcatttgagccaatgattgttcagcgccggatgaatttaatgactcctccaccactctgtgattttgagcagtggattgacacagaaatctcacagaaagacaaaaagtggttggagaatcttaagaagtgggacgcggaggacaaagaaaggatagagaaaagacgagaggagcttgctgccgagcaacaatgggtagacgagcaggaaatgaggcgtgttgttgaatacagggagaaggagaagaagcttgagcgtgcacgtcgtgcaaaggacgcagtggaggagaaccctgatgcttttcgcaagggcaaatggcctcattgcatgcagtag

SEQ ID NO: 75931 - DNA, 1594 bp, Zea Mays
gttgagtatcttatatttgtattggagacaagctccttaaagacatgctcttctgcattcatcacatatgtaccatgaagcaaagagttcttttgcacatcatggagtaaagttttcaaatctggaagtggacctcccagccatgatggctcagaaagacaaagctgtggcaggactaacaaaaggaattgaagggctctttaaaaagaacaaggtgacttatgttaaaggctttggaaaattgtcatccccctcagaagtgtcagttgacttgattgatggtggtagcactgttgtcaaaggcaaaaacataataattgcaactgggtctgatgtaaaatcacttccaggaataacaattgatgagaagaaagttgtttcatctactggtgcactgtgcttgtcagagatcccgaagaaactggtggtaattggagcaggttatattggccttgagatgggttcagtctggaaccgccttggttcagaggtcactgttgttgaatttgcgccagatatagtaccatcaatggatggcgaagtcaggaagcagttccaacgcatgctagaaaaacaaaagttcaagttcatgctcaagacaaaggttgttgggtgtgataccagtggagatggcgtaaagctgacacttgagcctgcagctggtggtgagcagaacatccttgaagcagatgttgtccttgtctctgctggcagaaccccatttacttctgggattgggcttgaaactcttggcgttgagacagataaagctggcaggatccttgttgataagcgcttcatgaccaatgtgaagggagtctatgcaattggggatgcgatccctggtcccatgcttgcccataaagctgaagaggatggtgtcgcttgcgtagagttcattgctggaaaggaaggccatgttgactatgacacagttcctggtgtggtttatacgcatccagaagttgcatctgttggcaagactgaggagcaggtgacggctctaggaattccctatcgtgtgggcaagtttccacttttggctaacagtcgtgcgaaggccattgatgatgctgaaggggtagttaaggtgatcgcggagaaggaaaccgataagattctaggtgtgcacataatggcacccaatgctggtgaaatcatccatgaagctgtcatcgccttgcagtatggagcatccagtgaggatgttgctcgaacatgccacgcacaccctaccgtgagcgaggccctcaaggaggcttgcttgcaaaccttcgataaagcaatccacatataatttctcattttctatttccttgccatccaaacttttggctcaacaagatccaaagtttatggtaattttgggcctgttggaacagaaggcctccagttgtccttttgttttgttggcaataatgtgaattctttgagttgcccacatcttatagtcgtttatgcttcattggcatggcatatccatccaaattccaaaataatgttctgatactatgttttactgtgtatgcccatgaaccattgatggatacatttcggacgttccagtatggccgtgttcgtgccttgatttctt

SEQ ID NO: 75932 - DNA, 1800 bp, Zea Mays
ttttgcttcctccgttccatttccccacgcccaccccctcttcttcccatctcaactctctcccttcctccctctctctccagcgcacaaggatcttttcttcgggcagggacggccaaggaagcgcccgcggagagagatgatgctggcgatcctagcgaggcggcgtgccgcggaggccgtgctgcggcggccgcaggcggccttgtccgcctggagggcgtacgcggcggcgggcgaggagagcgatgtggtggtggtgggtggcgggcccggagggtacgtggcggcgatcaaggccgcgcagctggggctcaagaccacctgcatcgagaagaggggcaccctcggcgggacctgtctcaacgtcggatgcattccatccaaggctcttctgcattcatcacatatgtaccatgaagcaaagagttcttttgcacatcatggagtaaagttttcaaatctggaagtggacctcccagccatgatggctcagaaagacaaagctgtggcaggactaacaaaaggaattgaagggctctttaaaaagaacaaggaataacaattgatgagaagaaagttgtttcatctactggtgcactgtgcttgtcagagatcccgaagaaactggtggtaattggagcaggttatattggccttgagatgggttcagtctggaaccgccttggttcagaggtcactgttgttgaatttgcgccagatatagtaccatcaatggatggcgaagtcaggaagcagttccaacgcatgctagaaaaacaaaagttcaagttcatgctcaagacaaaggttgttgggtgtgataccagtggagatggcgtaaagctgacacttgagcctgcagctggtggtgagcagaacatccttgaagcagatgttgtccttgtctctgctggcagaaccccatttacttctgggattgggcttgaaactcttggcgttgagacagataaagctggcaggatccttgttgataagcgcttcatgaccaatgtgaagggagtctatgcaattggggatgcgatccctggtcccatgcttgcccataaagctgaagaggatggtgtcgcttgcgtagagttcattgctggaaaggaaggccatgttgactatgacacagttcctggtgtggtttatacgcatccagaagttgcatctgttggcaagactgaggagcaggtgacggctctaggaattccctatcgtgtgggcaagtttccacttttggctaacagtcgtgcgaaggccattgatgatgctgaaggggtagttaaggtgatcgcggagaaggaaaccgataagattctaggtgtgcacataatggcacccaatgctggtgaaatcatccatgaagctgtcatcgccttgcagtatggagcatccagtgaggatgttgctcgaacatgccacgcacaccctaccgtgagcgaggccctcaaggaggcttgcttgcaaaccttcgataaagcaatccacatataatttctcattttctatttccttgccatccaaacttttggctcaacaagatccaaagtttatggtaattttgggcctgttggaacagaaggcctccagttgtccttttgttttgttggcaataatgtgaattctttgagttgcccacatcttatagtcgtttatgcttcattggcatggcatatccatccaaattccaaaataatgttctgatactatgttttactgtgtatgcccatgaaccattgatggatacatttcggacgttccagtatggccgtgttcgtgccttgatttctt

SEQ ID NO: 75933 - DNA, 1138 bp, Zea Mays
ctcccagggtgacccgtatttttccagttttcaggagctagcttcttccaccttagctccatcgcttggattggagcccctttagcttccttgcttctgcctgcactgtccttgaaacagtcatctgatcagcctccgcaatagcccgtgccttaggaagttcctgagtgagaaagcaccatcaatggcataaagaagagtggaccctactcctttcctcccttagggtttcgatgcgttggtggtgcagcaccgacaggtcatggttcaagaagttgcaagaatgcatcctcccttgcacgaggactagggtatcatttccatccacccattaccgacaaatgagggaagaagatctcctagcagaagatatcaacaaggctgccaagatttcaaggatcgctgatatattggaacagtcagatgaatcaagctccatgctcacaagaaagaaggagtgccaagtatctttggtagatactgagttaagaagaagccttaggttaaaaaagataaatcccatgtttaaaaatgaaggatgtcttaagaaaaattgccttatgtgtgctcatgacagcagcagcttgctagctatgtcagttaaagtcattaggaatcttgccacccaattctgcagtattgatcctcaatagactaaagaatctatgttgcacaaaaagaggcaatttgttgcaccagttaaacctcttataggtcaatccgcacttgtagagaaggataagagcaagtgggagaagaagaccaagaaatctgccaatgataagaagaagaaaggacaggacaagtgactagtcccagcagaagcgtgttgaccgagaacaacgttggagctcattgatattgtctgcagctttatatattttgggactttgcccttgggatgggcttatttgctgcactagtctgttgtttaaattcaaacatggtcttgttgctgacctagctattatatatgttattggatctttatttgtatctggcaagtctgatccttctccaacatttgacctggtttatgttggatttttatctcatcacatcgattggtcatctgatactagagatcaggtgtgggttttcagtgcacgcctccttgtttaatggataatgatcgaca

SEQ ID NO: 75934 - DNA, 2596 bp, Zea Mays
cacaattgttggaggaaaaaatattggtttccatccaagtgcaaaaatttcgaactgttttgaaggaaagttcatagactgtaagtgggcctcagaccctaagacgtggtttcgaggtgtggctcccacctcccagggtgacccgtatttttccagttttcaggagctagcttcttccaccttagctccatcgcttggattggagcccctttagcttccttgcttctgcctgcactgtccttgaaacagtcatctgatcagcctccgcaatagcccgtgccttaggaagttcctgagtgagaaagcaccatcaatggcataaagaagagtggaccctactcctttcctcccttagggtttcgatgcgttggtggtgcagcaccgacaggtcatggttcaagaagttgcaagaatgcatcctcccttgcacgaggactagggtatcatttccatccacccattaccgacaaatgaggtaatcttttagaatgttagagatatagtgagagaatttcttgttgaccacatgggtttgaacatcagagagattcaacgatcaccctaaggtcaggccttggttcggtacagaaacatcttcgatagggataatctgattgctttgagccctatgcaatatttggatacaatgttcattgttgttaggcataatcgagcctagaattggaggaatctgaattttgacagagaatgttggattatgttgcttggatttcctatggattatcacacttcagagaatttgcaaaatgctattgggtcttttggtagattggtctattcggaggatgacagagccaacatcactaggccgctcctcaaaacccgggttatcttgctagaggatattcctcagtttattttttagtgatgttgaaggcttcttaggatcgtcgtcgatgatacagtgtgaaatcatgcgtgtgaaatcatgcagtaagagttgcttggtgctcttccaacaaatgaggatcatgtgccagtcattctagaagatggtcagtagctacactttttgacttctttggtttgggccagcctattccacagctagcctttgatttgaaagtgcgagcaaacaaaaatgatgcttttttaggtggacaaggggaggataacaatgatcatgtggatgggatcaatggattcagattgctgctcctgaggttgctagcaactagcagatgcatcaggatggtcctgccaatgatgaaggaaacgatcagctcagtttttaggattcttatatgggtgctcataactcttctgattgatgtactaacaatgagggattgcatggggatctggccattaaaaacaacaatatatttgtggacccaatgcaagtgggcttgccccagttctgcttggccttccagctattcagcctgacaatcagattgctcaagatcaagtctcggatgtccttgaggacaaccctactcttcctgagaatcttcttgtcagtttcatgcaaatgacaagccctctagttcatcttattttcgttgaaagggaagccaggaaaagaaatgcagacatgtgtagaacatggttcaaatacttccctcctactggtcgctcggatttggctgtgcaagttccaaaaaattaggcttcctttttcatgtcaaaccttctttccccaaggtccttctagtggacaaagaaatttttagcttctaaggccttgttagctcttatggagccagtaatggaatctctatcctttgctttgccctagaaatgccccccttaatgacaagttttcatgcttcaccatcagggaagaagatctcctagcagaagatatcaacaaggctgccaagatttcaaggatcgctgatatattggaacagtcagatgaatcaagctccatgctcacaagaaagaaggagtgccaagtatctttggtagatactgagttaagaagaagccttaggttaaaaaagataaatcccatgtttaaaaatgaaggatgtcttaagaaaaattgccttatgtgtgctcatgacagcagcagcttgctagctatgtcagttaaagtcattaggaatcttgccacccaattctgcagtattgatcctcaatagactaaagaatctatgttgcacaaaaagaggcaatttgttgcaccagttaaacctcttataggtcaatccgcacttgtagagaaggataagagcaagtgggagaagaagaccaagaaatctgccaatgataagaagaagaaaggacaggacaagtgactagtcccagcagaagcgtgttgaccgagaacaacgttggagctcattgatattgtctgcagctttatatattttgggactttgcccttgggatgggcttatttgctgcactagtctgttgtttaaattcaaacatggtcttgttgctgacctagctattatatatgttattggatctttatttgtatctggcaagtctgatccttctccaacatttgacctggtttatgttggatttttatctcatcacatcgattggtcatctgatactagagatcaggtgtgggttttcagtgcacgcctccttgtttaatggataatgatcgaca

SEQ ID NO: 75935 - DNA, 1536 bp, Zea Mays
cctccttcctccccacccccggcctccgccgctgccttcttttcctcgtgcgcatattcgcttgcagcggcgccgacaccatttcataaacaccggaaacgcgcgcgaagtgaggagcagcaccaaacgcccctctgcttctcctctatttctccctcttgcggagccgcctcttgtgtgtaggggtgtgtcgagtctatggcggcggcggcggatacctcggaggcgtctgcggccgggatcgcgcttgcggaggccaatatcaactgggagaggttggacaagacgaggtttcatgtgattggagctatcctgtttacggcccagcaaggtgctctgcacccaacagctgttgtgaagactaggatgcaggttgctgaagggcggcttgcacgtatgtctgggtttactgtttttaggaggatattgagaagcgatggaatccctggtattttcagaggatttggcacctctgctgttggagctctacctgggcgagtgctagctctaacatcactggagatatctaaagaaatgacatttaagtattgtgaacattttgatatgtcagaggcgtcacgaattgctgtagcaaatggcgttgcaggcctgatgtcgagtatctgttcatgttcatattatgtgcctctggatgtgatttgccaaaggctcatggttcaaggagtgccagggatggcaacgtacaggggaccatttgatgtgataaataaggttgtcagaacacaggggatccaggggctttaccgaggttttggaatcactatgttgactcagtcgccagcttcagccctttggtggagtgcatatggtggtgctcaacatgctatttggaggagtttgggttatggaaatgactcatcaacaaaaccatctcaatcagaacttgttgctgtccaagcaacagcaggaacaattgctggtgcttgctcgtcgattatcaccactccaatagatacaatcaagactaggcttcaggttatggacaactatggtaatggtaggccttctgtcatgaaaactaccaggctgctgcttgatgaagatggctggagggggctttatagaggttttggacccaggtttcttaacatgtctctctggggcacatcaatgatcgtgacatatgagctcataaagaggctatctgtgaagtcggaatgacacgttttggcagattctcaactgagttgatttactgttcagtatcatctttatgaatacaggcaatcaagttagtttgcctcgctaaaagtataggccagtattatgatagggatgttgtaggcttgtagccagcttctttaggatgcaacagatggaggccaagatacatgttgtgtctaatgaggcacattgtagctgtagctgtagctgttcatggtgcagcaaaattttggcagagttctgcgtccttttcgttcagtgaccagctctccagttgttgtcgtccaacttacatttttagaatctacagagattgtgttcgtcattgaggatgtgtctggtttgttcgtc

SEQ ID NO: 75936 - DNA, 1573 bp, Zea Mays
gggggacaccgacccccgtgctggaaatttccaaccaaaaccccaatgcctcgagggcgcacccaaacaaactggctccgcctccttcctccccacccccggcctccgccgctgccttcttttcctcgtgcgcatattcgcttgcagcggcgccgacaccatttcataaacaccggaaacgcgcgcgaagtgaggagcagcaccaaacgcccctctgcttctcctctatttctccctcttgcggagccgcctcttgtgtgtaggggtgtgtcgagtctatggcggcggcggcggatacctcggaggcgtctgcggccgggatcgcgcttgcggaggccaatatcaactgggagaggttggacaagacgaggtttcatgtgattggagctatcctgtttacggcccagcaaggtgctctgcacccaacagctgttgtgaagactaggatgcaggttgctgaagggcggcttgcacgtatgtctgggtttactgtttttaggaggatattgagaagcgatggaatccctggtattttcagaggatttggcacctctgctgttggagctctacctgggcgagtgctagctctaacatcactggagatatctaaagaaatgacatttaagtattgtgaacattttgatatgtcagaggcgtcacgaattgctgtagcaaatggcgttgcaggcctgatgtcgagtatctgttcatgttcatattatgtgcctctggatgtgatttgccaaaggctcatggttcaaggagtgccagggatggcaacgtacaggggaccatttgatgtgataaataaggttgtcagaacacaggggatccaggggctttaccgaggttttggaatcactatgttgactcagtcgccagcttcagccctttggtggagtgcatatggtggtgctcaacatgctatttggaggagtttgggttatggaaatgactcatcaacaaaaccatctcaatcagaacttgttgctgtccaagcaacagcaggaacaattgctggtgcttgctcgtcgattatcaccactccaatagatacaatcaagactaggcttcaggttatggacaactatggtaatggtaggccttctgtcatgaaaactaccaggctgctgcttgatgaagatggctggagggggctttatagaggttttggacccaggtttcttaacatgtctctctggggcacatcaatgatcgtgacatatgagctcataaagaggctatctgtgaagtcggaatgacacgttttggcagattctcaactgagttgatttactgttcagtatcatctttatgaatacaggcaatcaagatgttgtaggcttgtagccagcttctttaggatgcaacagatggaggccaagatacatgttgtgtctaatgaggcacattgtagctgtagctgtagctgttcatggtgcagcaaaattttggcagagttctgcgtccttttcgttcagtgaccagctctccagttgttgtcgtccaacttacatttttagaatctacagagattgtgttcgtcattgaggatgtgtctggtttgttcgtc

SEQ ID NO: 75937 - DNA, 1402 bp, Zea Mays
catcaatccgcgcccaattcaggccccgcagtccagtgagccgaggccggacgaatggcaagttgggcagcgcgctccgggggacaccgacccccgtgctggaaatttccaaccaaaaccccaatgcctcgagggcgcacccaaacaaactggctccgcctccttcctccccacccccggcctccgccgctgccttcttttcctcgtgcgcatattcgcttgcagcggcgccgacaccatttcataaacaccggaaacgcgcgcgaagtgaggagcagcaccaaacgcccctctgcttctcctctatttctccctcttgcggagccgcctcttgtgtgtaggggtgtgtcgagtctatggcggcggcggcggatacctcggaggcgtctgcggccgggatcgcgcttgcggaggccaatatcaactgggagagatttgccaaaggctcatggttcaaggagtgccagggatggcaacgtacaggggaccatttgatgtgataaataaggttgtcagaacacaggggatccaggggctttaccgaggttttggaatcactatgttgactcagtcgccagcttcagccctttggtggagtgcatatggtggtgctcaacatgctatttggaggagtttgggttatggaaatgactcatcaacaaaaccatctcaatcagaacttgttgctgtccaagcaacagcaggaacaattgctggtgcttgctcgtcgattatcaccactccaatagatacaatcaagactaggcttcaggttatggacaactatggtaatggtaggccttctgtcatgaaaactaccaggctgctgcttgatgaagatggctggagggggctttatagaggttttggacccaggtttcttaacatgtctctctggggcacatcaatgatcgtgacatatgagctcataaagaggctatctgtgaagtcggaatgacacgttttggcagattctcaactgagttgatttactgttcagtatcatctttatgaatacaggcaatcaagttagtttgcctcgctaaaagtataggccagtattatgatagggtaggatgcagaattatggtttagttacataataacatccttctgtaggactcgtgatgtatatatttgtgctaaagaccctcctttcaggatgttgtaggcttgtagccagcttctttaggatgcaacagatggaggccaagatacatgttgtgtctaatgaggcacattgtagctgtagctgtagctgttcatggtgcagcaaaattttggcagagttctgcgtccttttcgttcagtgaccagctctccagttgttgtcgtccaacttacatttttagaatctacagagattgtgttcgtcattgaggatgtgtctggtttgttcgtc

SEQ ID NO: 75938 - DNA, 1150 bp, Zea Mays
gtcgcctccggcgcttgcctcctcctctcatgtgctgtcaccgcttccccttcttgccccaaagggggccttggggatcttcctccattcatccttgagggttcgaaggggaggagatggaggcagaagagtggcaaataatcgagatgattgtcgtccgggctgacagcagcctgggtcggtggagtgtttccttcacaactttagcgaggcagtctcgatcgcccgcttgttgatgacgaggaacatcattccgcaaagccaacgtctctactcccgatcgtcggctcgaagggaggcgttgtaggccacgcagcgggagatggagaggctgcaggaggaggtggcttgctcggaggagagagatcgggagctttcaggcatccgagccaagactgagtgcctcgaggctgaggccacacaccttaggtcggggcgtgatgaggcgcacaaggacgccaagcgtcttcgtggggaaaggactcgtcttcagcaagatctgcgcgaggtgaccccacgggctgaagaagccgaatcgatagtgcgagtggcgaacacccgccttgaggaggctaactcagaccttcgacgggagcgagagatggccggagatcttcagaagaagttttccgaggcccttgacgctatgaaggcaatccaggaggtgccgaaggcggcagaggatgaagtgcgcaagctttcaattgcttgtgatggcgctattgcgacgcagagtgatgaggacctagacgcaattgaagagaaagtgcatcccaatgctcgtatgctttccagctgggccaatgtgaagacgcttatgaggtcccatgatgtaagcccaggactcgactggtacagatggttcccctccaccattgtgggcccggtgttgtcctttcgtgttgaaatagaaacccgcaccaacacccacgaaacttcgggtcgagtgcgtgttacacccgtttcgcacacatcctccaggagagaaaattgcgtcgctgtcagagacaacccagacgaaccattcgttcagtttgatcatttcgattcgtcgtcctacatggcgttcacgagatgttgcagttacttctatgaaaaggaagtttttgttaaagttccaatagcagtatacgccagagctatcagttaa

SEQ ID NO: 75939 - DNA, 797 bp, Zea Mays
cttgccccaaagggggccttggggatcttcctccattcatccttgagggttcgaaggggaggagatggaggcagaagagtggcaaataatcgagatgattgtcgtccgggctgacagcagcctgggtcggtggagtgtttccttcacaactttagcgaggcagtctcgatcgcccgcttgttgatgacgaggaacatcattccgcaaagccaagttggttccccttcctatttgtttttcctttgtccgagttcttgtagtcatggctaaacatggccgtcgagttgcttttttcagcgtctctactcccgatcgtcggctcgaagggaggcgttgtaggccacgcagcgggagatggagaggctgcaggaggaggtggcttgctcggaggagagagatcgggagctttcaggcatccgagccaagactgagtgcctcgaggctgaggccacacaccttaggtcggggcgtgatgaggcgcacaaggacgccaagcgtcttcgtggggaaaggactcgtcttcagcaagatctgcgcgaggtgaccccacgggctgaagaagccgaatcgatagtgcgagtggcgaacacccgccttgaggaggctaactcagaccttcgacgggagcgagagatggccggagatcttcagaagaagttttccgaggcccttgacgctatgaaggcaatccaggaggtgccgaaggcggcagaggatgaagtgcgcaagctttcaattgcttgtgatggcgctattgcgacgcagatatcatttatctcaggtgcatacaaaccaag

SEQ ID NO: 75940 - DNA, 2379 bp, Zea Mays
tgtcgtcgtgatctacctgatccaaaattgggggtcatacacagtcttacatagcttaaaagaaagctatgaagaagcacttcggagaaacgatgttaaagctattgtcgttacagggaaaggagggaaattttctggaggatttgatattagttcctttggtggtgttcaaggaggccaaacaatgcaaccaaaggttggctacatagcaatagatattctcacagatactgtagaagctgcgacaaagccatcagtggcagcaattgatggtcttgctcttggtgggggtttagaagttgccatggcatgccatgcacggattgcaactccaacagctcaattaggtcttccagaacttcagttaggaattattccaggatttggaggaacacagcgactcccacgactggttggtctgacaaaatctttggaaatgatgctgttatctaagccaatcaagggcggtgaggcacaccaactgggtctggttgatgccttagtttctcctaatgatttggtgaatactgctcgtcaatgggctttggatatatatgaatgtaggaggccctggatcaaaagcctttataagactgacaagctagaacctcttggggaggctagggaaattctgaagtttgcaagagctcaagctcaaaagcaggcagctaatcttcatcacccacttgtttgtattgatgtcattgaagaaggtatagttgcaggaccacgggctggactctggaaggaagcaacttctttccaggaactgcttttctcagatacttgtaaaagcttagttcatgtgttcttttctcagcgggcaacgtctaagattccaggtgctacagacttggggttgatgcctaggaaaataactaaagttgccattctaggtggtgggcttatgggttcaggaattgcaactgcgatggtattaagtaactatcctgtgctacttaaagaagtaaatgagaagttcctaactgctggaatcaacagaatccaagccaatttgcagagtcgagtaaagaaaggaaaaatgaccgaggagcgatatgagaaggctatgtctctcgttactggtgtccttgattatgaacgtttcaaagatgtagacctcgttatagaggcagttattgagaatgtgaagttgaagcagcaaatattttctgacttagagaagtactgtccttcacattgcatccttgctactaacacatctacaattgatcttaatctgattggggagaaaacaaaggctcaagatcgtattgctggtgcacacttctttagtcctgcgcatgtgatgccacttctggaaatagttcgtactcagcacacttcaccacaagttgttgttgacttgctggatgttgggaagaagattaaaaagacaccaatagtcgtcgggaactgtactggctttgcagttaataggatgttctttccatacactcaatcagcactcttttatgttgatcttggtatggatgtttataagattgatcgtgcttgtaccaaatttggaatgcctatgggtcctttcagactggcagatctggttggttttggtgtggctgtggccactggtatgcaataccttgaaaatttcccagagagggtctacaaatcaatgctacttcctctgatgatggagggcaatagggcaggtgaagccacccaaaaaggattttacaagtatgagggcaagaggaaagcgactcctgatcctgaaattatgaaatatattgaaaaatctaggagcatggcaggagttacaccagatcctgagctgatgaagctaagtgagaaagacatagtcgagatggtgtttttcccggtgataaatgaagcctgccgagtccttgatgagggtatcgccgtcaaggcttctgacctagacatcgcttcaatctttggcatggggttcccaccttataggggaggtgtcatgcactgggcagattccatcggcgcaaagtacatccatggaaagttggaggagtggacaaagcggtatgggggcttcttcaagccctgctcttacctcgctgaaagagctgcaaaagggattcctctgagtgcaccaacaaagaaagttcaggctcggctataagatgatttccttgtggatggaggagacaataatggattccggtgaagcatttggaatgcgtagagctgtaggctaccactatcacatgcatgtaacgcaatatactactgtgaaaataaagtgcactgcacggcggtttttttatatataaatacaaggatttttttcttgtcacctgtaaaaatttaaacagattttttgtggaatctcatgagaactgaggcaccgctccaaattctaaacaaaccctaagaatggta

SEQ ID NO: 75941 - DNA, 2768 bp, Zea Mays
tttttttataccatcactagtgttatagaaaggattcggacatgtaaaaaaaatttatcctccaatgtcactagcacatagaattttctcttgttcctgttgaatacagtatgtatactacacgtcctcgagaattcgcgcagctgagccgagttccatgccttctcgggaaacaaagcagtagatggatgaggcacatcgcgtcagcggcaaccgcctgcggtacgcgccagaaataataattaggggatcctgataagtgttggcacaagtagcttgccagcacccaactccaagcaagccataactgcaagaaagcaacggcagcaagaaaccttgtaaacatcggagcatagatcgcggcggtgatggcggccaaggtgaggacggagctggacgtgggcgccgacggcgtggccgtaatcaccatctacaatccgcccgtcaactccctctccatcgacgtcttacatagcttaaaagaaagctatgaagaagcacttcggagaaacgatgttaaagctattgtcgttacagggaaaggagggaaattttctggaggatttgatattagttcctttggtggtgttcaaggaggccaaacaatgcaaccaaaggttggctacatagcaatagatattctcacagatactgtagaagctgcgacaaagccatcagtggcagcaattgatggtcttgctcttggtgggggtttagaagttgccatggcatgccatgcacggattgcaactccaacagctcaattaggtcttccagaacttcagttaggaattattccaggatttggaggaacacagcgactcccacgactggttggtctgacaaaatctttggaaatgatgctgttatctaagccaatcaagggcggtgaggcacaccaactgggtctggttgatgccttagtttctcctaatgatttggtgaatactgctcgtcaatgggctttggatatatatgaatgtaggaggccctggatcaaaagcctttataagactgacaagctagaacctcttggggaggctagggaaattctgaagtttgcaagagctcaagctcaaaagcaggcagctaatcttcatcacccacttgtttgtattgatgtcattgaagaaggtatagttgcaggaccacgggctggactctggaaggaagcaacttctttccaggaactgcttttctcagatacttgtaaaagcttagttcatgtgttcttttctcagcgggcaacgtctaagattccaggtgctacagacttggggttgatgcctaggaaaataactaaagttgccattctaggtggtgggcttatgggttcaggaattgcaactgcgatggtattaagtaactatcctgtgctacttaaagaagtaaatgagaagttcctaactgctggaatcaacagaatccaagccaatttgcagagtcgagtaaagaaaggaaaaatgaccgaggagcgatatgagaaggctatgtctctcgttactggtgtccttgattatgaacgtttcaaagatgtagacctcgttatagaggcagttattgagaatgtgaagttgaagcagcaaatattttctgacttagagaagtactgtccttcacattgcatccttgctactaacacatctacaattgatcttaatctgattggggagaaaacaaaggctcaagatcgtattgctggtgcacacttctttagttcgtactcagcacacttcaccacaagttgttgttgacttgctggatgttgggaagaagattaaaaagacaccaatagtcgtcgggaactgtactggctttgcagttaataggatgttctttccatacactcaatcagcactcttttatgttgatcttggtatggatgtttataagattgatcgtgcttgtaccaaatttggaatgcctatgggtcctttcagactggcagatctggttggttttggtgtggctgtggccactggtatgcaataccttgaaaatttcccagagagggtctacaaatcaatgctacttcctctgatgatggagggcaatagggcaggtgaagccacccaaaaaggattttacaagtatgagggcaagaggaaagcgactcctgatcctgaaattatgaaatatattgaaaaatctaggagcatggcaggagttacaccagatcctgagctgatgaagctaagtgagaaagacatagtcgagatggtgtttttcccggtgataaatgaagcctgccgagtccttgatgagggtatcgccgtcaaggcttctgacctagacatcgcttcaatctttggcatggggttcccaccttataggggaggtgtcatgcactgggcagattccatcggcgcaaagtacatccatggaaagttggaggagtggacaaagcggtatgggggcttcttcaagccctgctcttacctcgctgaaagagctgcaaaagggattcctctgagtgcaccaacaaagaaagttcaggctcggctataagatgatttccttgtggatggaggagacaataatggattccggtgaagcatttggaatgcgtagagctgtaggctaccactatcacatgcatgtaacgcaatatactactgtgaaaataaagtgcactgcacggcggtttttttatatataaatacaaggatttttttcttgtcacctgtaaaaatttaaacagattttttgtggaatctcatgagaactgaggcaccgctccaaattctaaacaaaccctaagaatggta

SEQ ID NO: 75942 - DNA, 2800 bp, Zea Mays
tttttttataccatcactagtgttatagaaaggattcggacatgtaaaaaaaatttatcctccaatgtcactagcacatagaattttctcttgttcctgttgaatacagtatgtatactacacgtcctcgagaattcgcgcagctgagccgagttccatgccttctcgggaaacaaagcagtagatggatgaggcacatcgcgtcagcggcaaccgcctgcggtacgcgccagaaataataattaggggatcctgataagtgttggcacaagtagcttgccagcacccaactccaagcaagccataactgcaagaaagcaacggcagcaagaaaccttgtaaacatcggagcatagatcgcggcggtgatggcggccaaggtgaggacggagctggacgtgggcgccgacggcgtggccgtaatcaccatctacaatccgcccgtcaactccctctccatcgacgtcttacatagcttaaaagaaagctatgaagaagcacttcggagaaacgatgttaaagctattgtcgttacagggaaaggagggaaattttctggaggatttgatattagttcctttggtggtgttcaaggaggccaaacaatgcaaccaaaggttggctacatagcaatagatattctcacagatactgtagaagctgcgacaaagccatcagtggcagcaattgatggtcttgctcttggtgggggtttagaagttgccatggcatgccatgcacggattgcaactccaacagctcaattaggtcttccagaacttcagttaggaattattccaggatttggaggaacacagcgactcccacgactggttggtctgacaaaatctttggaaatgatgctgttatctaagccaatcaagggcggtgaggcacaccaactgggtctggttgatgccttagtttctcctaatgatttggtgaatactgctcgtcaatgggctttggatatatatgaatgtaggaggccctggatcaaaagcctttataagactgacaagctagaacctcttggggaggctagggaaattctgaagtttgcaagagctcaagctcaaaagcaggcagctaatcttcatcacccacttgtttgtattgatgtcattgaagaaggtatagttgcaggaccacgggctggactctggaaggaagcaacttctttccaggaactgcttttctcagatacttgtaaaagcttagttcatgtgttcttttctcagcgggcaacgtctaagattccaggtgctacagacttggggttgatgcctaggaaaataactaaagttgccattctaggtggtgggcttatgggttcaggaattgcaactgcgatggtattaagtaactatcctgtgctacttaaagaagtaaatgagaagttcctaactgctggaatcaacagaatccaagccaatttgcagagtcgagtaaagaaaggaaaaatgaccgaggagcgatatgagaaggctatgtctctcgttactggtgtccttgattatgaacgtttcaaagatgtagacctcgttatagaggcagttattgagaatgtgaagttgaagcagcaaatattttctgacttagagaagtactgtccttcacattgcatccttgctactaacacatctacaattgatcttaatctgattggggagaaaacaaaggctcaagatcgtattgctggtgcacacttctttagtcctgcgcatgtgatgccacttctggaaatagttcgtactcagcacacttcaccacaagttgttgttgacttgctggatgttgggaagaagattaaaaagacaccaatagtcgtcgggaactgtactggctttgcagttaataggatgttctttccatacactcaatcagcactcttttatgttgatcttggtatggatgtttataagattgatcgtgcttgtaccaaatttggaatgcctatgggtcctttcagactggcagatctggttggttttggtgtggctgtggccactggtatgcaataccttgaaaatttcccagagagggtctacaaatcaatgctacttcctctgatgatggagggcaatagggcaggtgaagccacccaaaaaggattttacaagtatgagggcaagaggaaagcgactcctgatcctgaaattatgaaatatattgaaaaatctaggagcatggcaggagttacaccagatcctgagctgatgaagctaagtgagaaagacatagtcgagatggtgtttttcccggtgataaatgaagcctgccgagtccttgatgagggtatcgccgtcaaggcttctgacctagacatcgcttcaatctttggcatggggttcccaccttataggggaggtgtcatgcactgggcagattccatcggcgcaaagtacatccatggaaagttggaggagtggacaaagcggtatgggggcttcttcaagccctgctcttacctcgctgaaagagctgcaaaagggattcctctgagtgcaccaacaaagaaagttcaggctcggctataagatgatttccttgtggatggaggagacaataatggattccggtgaagcatttggaatgcgtagagctgtaggctaccactatcacatgcatgtaacgcaatatactactgtgaaaataaagtgcactgcacggcggtttttttatatataaatacaaggatttttttcttgtcacctgtaaaaatttaaacagattttttgtggaatctcatgagaactgaggcaccgctccaaattctaaacaaaccctaagaatggta

SEQ ID NO: 75943 - DNA, 2769 bp, Zea Mays
tttttttataccatcactagtgttatagaaaggattcggacatgtaaaaaaaatttatcctccaatgtcactagcacatagaattttctcttgttcctgttgaatacagtatgtatactacacgtcctcgagaattcgcggtaaaacacaagggcagatctgatccttcgacgcgctgatatttccgttttccgacaatatcctaatctacaaactcaaatttcgcagcagctgagccgagttccatgccttctcgggaaacaaagcagtagatggatgaggcacatcgcgtcagcggcaaccgcctgcggtacgcgccagaaataataattaggggatcctgataagtgttggcacaagtagcttgccagcacccaactccaagcaagccataactgcaagaaagcaacggcagcaagaaaccttgtaaacatcggagcatagatcgcggcggtgatggcggccaaggtgaggacggagctggacgtgggcgccgacggcgtggccgtaatcaccatctacaatccgcccgtcaactccctctccatcgacgtcttacatagcttaaaagaaagctatgaagaagcacttcggagaaacgatgttaaagctattgtcgttacagggaaaggagggaaattttctggaggatttgatattagttcctttggtggtgttcaaggaggccaaacaatgcaaccaaaggttggctacatagcaatagatattctcacagatactgtagaagctgcgacaaagccatcagtggcagcaattgatggtcttgctcttggtgggggtttagaagttgccatggcatgccatgcacggattgcaactccaacagctcaattaggtcttccagaacttcagttaggaattattccaggatttggaggaacacagcgactcccacgactggttggtctgacaaaatctttggaaatgatgctggaggccctggatcaaaagcctttataagactgacaagctagaacctcttggggaggctagggaaattctgaagtttgcaagagctcaagctcaaaagcaggcagctaatcttcatcacccacttgtttgtattgatgtcattgaagaaggtatagttgcaggaccacgggctggactctggaaggaagcaacttctttccaggaactgcttttctcagatacttgtaaaagcttagttcatgtgttcttttctcagcgggcaacgtctaagattccaggtgctacagacttggggttgatgcctaggaaaataactaaagttgccattctaggtggtgggcttatgggttcaggaattgcaactgcgatggtattaagtaactatcctgtgctacttaaagaagtaaatgagaagttcctaactgctggaatcaacagaatccaagccaatttgcagagtcgagtaaagaaaggaaaaatgaccgaggagcgatatgagaaggctatgtctctcgttactggtgtccttgattatgaacgtttcaaagatgtagacctcgttatagaggcagttattgagaatgtgaagttgaagcagcaaatattttctgacttagagaagtactgtccttcacattgcatccttgctactaacacatctacaattgatcttaatctgattggggagaaaacaaaggctcaagatcgtattgctggtgcacacttctttagtcctgcgcatgtgatgccacttctggaaatagttcgtactcagcacacttcaccacaagttgttgttgacttgctggatgttgggaagaagattaaaaagacaccaatagtcgtcgggaactgtactggctttgcagttaataggatgttctttccatacactcaatcagcactcttttatgttgatcttggtatggatgtttataagattgatcgtgcttgtaccaaatttggaatgcctatgggtcctttcagactggcagatctggttggttttggtgtggctgtggccactggtatgcaataccttgaaaatttcccagagagggtctacaaatcaatgctacttcctctgatgatggagggcaatagggcaggtgaagccacccaaaaaggattttacaagtatgagggcaagaggaaagcgactcctgatcctgaaattatgaaatatattgaaaaatctaggagcatggcaggagttacaccagatcctgagctgatgaagctaagtgagaaagacatagtcgagatggtgtttttcccggtgataaatgaagcctgccgagtccttgatgagggtatcgccgtcaaggcttctgacctagacatcgcttcaatctttggcatggggttcccaccttataggggaggtgtcatgcactgggcagattccatcggcgcaaagtacatccatggaaagttggaggagtggacaaagcggtatgggggcttcttcaagccctgctcttacctcgctgaaagagctgcaaaagggattcctctgagtgcaccaacaaagaaagttcaggctcggctataagatgatttccttgtggatggaggagacaataatggattccggtgaagcatttggaatgcgtagagctgtaggctaccactatcacatgcatgtaacgcaatatactactgtgaaaataaagtgcactgcacggcggtttttttatatataaatacaaggatttttttcttgtcacctgtaaaaatttaaacagattttttgtggaatctcatgagaactgaggcaccgctccaaattctaaacaaaccctaagaatggta

SEQ ID NO: 75944 - DNA, 3416 bp, Zea Mays
tcctgtcgtgtttccttccaattccattctagcagttggccagaaggcaccacctttcccttcgcccgcaggcttttccgatccgcaaccagaccaaactccacaacatttcctcaagctgttccttcaagaaacctggatcaatccaaccttcaatcgcacagtccgtgggatctcccttgagttgcgatggaagaggggaccacggaacctggatcattctcccgctcttcctccttcgttggattcgaggagtgggtggcattggtgaggaaacgcaatgggaaggcctcttcgtgcgggcgtctgggtctccgttcaacagccagttcagaagtactagaacttgcagatcctgatagcaatgtcattaatcctgacccttgtgaccaagtgccagaaggaatcctttgggagaggcttgggagggtttccatgatggatattgagtcaagtgacttcagttggacctctctcacctcactgcaccatacaaaacatacggctacaagtactgatccatctgaggatgacattagcagaagttttgaggtgacagtaaattctgggggcattgtttttattgcattattcaaagctattgaaaatgttgatcttccgtccaaggaaacagctgcagtaattaaaatagcaccttcaaggatggccacacagtctgaacgctttgggtacgaactcgctaaatggcttggagtgagaactcctcaaggtagagtcattcatagctcctcagatgaatggcaacaagtcaaggatgcagttgaaaatgctcgaaatgcatcgatagcttctggtgatgaacttgaggagatgatttgcgccgaggttttagaagcccttgaattgagtcgttgcctatttctgatgaattatgtacatggctccgctctgctagagaatgtaatgcccttcgagtcacggcaagctgctgaaaaaactgctgaagcattagggaagcttatgccaaccttgactcactagatgatgtttatgattctgctatcattcgatacaagccagagatcattagaagccctcagaaacagaagcagagaagagctgtttcaattagtggcagtattggctcagatgtctctgacctcacattggaggactcttatgcttctagtggacatgtgttttctagctttaatattgtagccattgattcaggtgtaccacgcaggccaccagccagtaagcgggcaaaagatcaggagagctaccccaaactagtggagttaacattgaacaacttcgactattcttccaaacttctgtttgaggtgtccttcggaaaacttggcaccccaggacatgaagaatttgatgtaccatcagactacagttataattctcctctctctgagagtgatatggtagcaacagtgcattcattccgaggaggttttcgtagtgctctgagagaccttcagcgattccacatttttctcatcacactgtatcagaagctggatggtctattaaaaattttcttcaaccttatgtataaatgttccaatgaatatgctagggaggatgctggtacttcggattcaccattgtgttcagtggaaccacaaggagattcaaatgatactgatgttccaaggcatctgcgtaagccttcccgaaccttatcccgtgagagtctagaccaatcatctccttgtcgggatagctttatcaccagacatttcaaaggaaatggtgattcctcccgtggtcttcggttgacaatgaagctgcgagattttaacaagtatgccaaggtgaagacctttgaagtgtggattgataaattgtctattataaactgtctgacgtaggtttctagttgtttttttcactcttatagattgtcccactatttagttgcaggaagccaaatagctaaatggcttcatgattttttttacataagaagggcctcatgatctgcttatggattatcataatttaagtatctagattatataattcacctaataatttgtgttgtttgtttgtcttttaacttatttaagctggattatataatctagagggtaaacaaacagggcaagtttatcatgtgattctattagtcattgaacacatttttacagatagacagtgaattaagcaaagagatagaacaatggaatgacatgctgaggactgaagtagtaaagttgtgtcaagacaacaattttcaaacaggtttttttgaaggcactgataatagcactgttgttgatgcttacgagttgaaggttcgacttgagcacattctcgagaggatatctttgatctctgatgctgcaagtactgagcgtccatcacagatcacagattatctgtatattggtggtgctcttgctgctcggtcaacacacacacttaaacaccttggcatcacccatatattgtgcttgtgtgcaaatgaaattggacagtcagaatcgcagaagcctgacctttttgagtataggaatttctcgataaacgatgatgacaatgcagacattggtgatctctttcaagatggttctgatttcatcagttatgtggatcacttgcgtggcaaagtacttgtgcattgctttgagggaaaaagtcgaagtgcgactgttgttcttgcctacctgatgctgaggaaaaactgtactctcctggaagcatggaacatgctgaagaaggtgcaccgacgcgcgcatcccaatgatgggtttgctaagatcttgctggatcttgacaagaaactgcacgggaaaatctccatggaatggcaacacaagaggcctgcaatgaaagtgtgtcctatctgtggcaagaatgctggtctcagcagcagttcactcaagctccacttgcagaaggcacacaagaagatatcctctgggagcgtagacagtgcaatgactctggagatacaaaaagcattagaggcaatcaaagctggctggggcggcagtgacagcccagtgcataaatcacaatcacacatagaaggattttgacgtttaatcttacgttcctacggtcctattaatatatcaacaaggctggtagtcggcgaccgctttaagagtgaagcctcagctctagacttcatgacacttgtaagtagcacatttttggaacatttggtttttattctatagttcatgagcttggattgacaagaaccatccatagagggaatgtagtttctgttataaaattgtgcgattcttttttcatgaaacttgtacgagatgagcattcagattctttggctatcaaattttgaatctgttgtcctgtataatcagtttgttcaaatggacaagctcttcttttagttcattgccaaactacagaaatcaaatcatttttgttggataaataggtatttttagttttaatttaat

SEQ ID NO: 75945 - DNA, 3341 bp, Zea Mays
tcctgtcgtgtttccttccaattccattctagcagttggccagaaggcaccacctttcccttcgcccgcaggcttttccgatccgcaaccagaccaaactccacaacatttcctcaagctgttccttcaagaaacctggatcaatccaaccttcaatcgcacagtccgtgggatctcccttgagttgcgatggaagaggggaccacggaacctggatcattctcccgctcttcctccttcgttggattcgaggagtgggtggcattggtgaggaaacgcaatgggaaggcctcttcgtgcgggcgtctgggtctccgttcaacagccagttcagaagtactagaacttgcagatcctgatagcaatgtcattaatcctgacccttgtgaccaagtgccagaaggaatcctttgggagaggcttgggagggtttccatgatggatattgagtcaagtgacttcagttggacctctctcacctcactgcaccatacaaaacatacggctacaagtactgatccatctgaggatgacattagcagaagttttgaggtgacagtaaattctgggggcattgtttttattgcattattcaaagctattgaaaatgttgatcttccgtccaaggaaacagctgcagtaattaaaatagcaccttcaaggatggccacacagtctgaacgctttgggtacgaactcgctaaatggcttggagtgagaactcctcaaggtagagtcattcatagctcctcagatgaatggcaacaagtcaaggatgcagttgaaaatgctcgaaatgcatcgatagcttctggtgatgaacttgaggagatgatttgcgccgaggttttagaagcccttgaattgagtcgttgcctatttctgatgaattatgtacatggctccgctctgctagagaatgtaatgcccttcgagtcacggcaagctgctgaaaaaactgctgaagcattaggtagggtcttaatcttggacctcgtattgaggaatgaggatagactgcgatgccgtccccttggctggcgtggaaattatgcaaatctacttgttgccaacagggaagcttatgccaaccttgactcactagatgatgtttatgattctgctatcattcgatacaagccagagatcattagaagccctcagaaacagaagcagagaagagctgtttcaattagtggcagtattggctcagatgtctctgacctcacattggaggactcttatgcttctagtggacatgtgttttctagctttaatattgtagccattgattcaggtgtaccacgcaggccaccagccagtaagcgggcaaaagatcaggagagctaccccaaactagtggagttaacattgaacaacttcgactattcttccaaacttctgtttgaggtgtccttcggaaaacttggcaccccaggacatgaagaatttgatgtaccatcagactacagttataattctcctctctctgagagtgatatggtagcaacagtgcattcattccgaggaggttttcgtagtgctctgagagaccttcagcgattccacatttttctcatcacactgtatcagaagctggatggtctattaaaaattttcttcaaccttatgtataaatgttccaatgaatatgctagggaggatgctggtacttcggattcaccattgtgttcagtggaaccacaaggagattcaaatgatactgatgttccaaggcatctgcgtaagccttcccgaaccttatcccgtgagagtctagaccaatcatctccttgtcgggatagctttatcaccagacatttcaaaggaaatggtgattcctcccgtggtcttcggttgacaatgaagctgcgagattttaacaagtatgccaagacaacaattttcaaacaggtttttttgaaggcactgataatagcactgttgttgatgcttacgagttgaaggttcgacttgagcacattctcgagaggatatctttgatctctgatgctgcaagtactgagcgtccatcacagatcacagattatctgtatattggtggtgctcttgctgctcggtcaacacacacacttaaacaccttggcatcacccatatattgtgcttgtgtgcaaatgaaattggacagtcagaatcgcagaagcctgacctttttgagtataggaatttctcgataaacgatgatgacaatgcagacattggtgatctctttcaagatggttctgatttcatcagttatgtggatcacttgcgtggcaaagtacttgtgcattgctttgagggaaaaagtcgaagtgcgactgttgttcttgcctacctgatgctgaggaagtaagactgcacagtaattactatatcatcactatcatgcttctctgttaaaaccaataactcaccacgactaaaacaatctattaacagatttactatttttcatgtgatcttaaggtctatcaacccagaattgacatctgtaaggataggaagattggaattgcatctttccttattttttattgttctggacgcagtcatcatctcgtaatttcccctttttctcttaagaaactgtactctcctggaagcatggaacatgctgaagaaggtgcaccgacgcgcgcatcccaatgatgggtttgctaagatcttgctggatcttgacaagaaactgcacgggaaaatctccatggaatggcaacacaagaggcctgcaatgaaagtgtgtcctatctgtggcaagaatgctggtctcagcagcagttcactcaagctccacttgcagaaggcacacaagaagatatcctctgggagcgtagacagtgcaatgactctggagatacaaaaagcattagaggcaatcaaagctggctggggcggcagtgacagcccagtgcataaatcacaatcacacatagaaggattttgacgtttaatcttacgttcctacggtcctattaatatatcaacaaggctggtagtcggcgaccgctttaagagtgaagcctcagctctagacttcatgacacttgtaagtagcacatttttggaacatttggtttttattctatagttcatgagcttggattgacaagaaccatccatagagggaatgtagtttctgttataaaattgtgcgattcttttttcatgaaacttgtacgagatgagcattcagattctttggctatcaaattttgaatctgttgtcctgtataatcagtttgttcaaatggacaagctcttcttttagttcattgccaaactacagaaatcaaatcatttttgttggataaataggtatttttagttttaatttaat

SEQ ID NO: 75946 - DNA, 3859 bp, Zea Mays
tcctgtcgtgtttccttccaattccattctagcagttggccagaaggcaccacctttcccttcgcccgcaggcttttccgatccgcaaccagaccaaactccacaacatttcctcaagctgttccttcaagaaacctggatcaatccaaccttcaatcgcacagtccgtgggatctcccttgagttgcgatggaagaggggaccacggaacctggatcattctcccgctcttcctccttcgttggattcgaggagtgggtggcattggtgaggaaacgcaatgggaaggcctcttcgtgcgggcgtctgggtctccgttcaacagccagttcagaagtactagaacttgcagatcctgatagcaatgtcattaatcctgacccttgtgaccaagtgccagaaggaatcctttgggagaggcttgggagggtttccatgatggatattgagtcaagtgacttcagttggacctctctcacctcactgcaccatacaaaacatacggctacaagtactgatccatctgaggatgacattagcagaagttttgaggtgacagtaaattctgggggcattgtttttattgcattattcaaagctattgaaaatgttgatcttccgtccaaggaaacagctgcagtaattaaaatagcaccttcaaggatggccacacagtctgaacgctttgggtacgaactcgctaaatggcttggagtgagaactcctcaaggtagagtcattcatagctcctcagatgaatggcaacaagtcaaggatgcagttgaaaatgctcgaaatgcatcgatagcttctggtgatgaacttgaggagatgatttgcgccgaggttttagaagcccttgaattgagtcgttgcctatttctgatgaattatgtacatggctccgctctgctagagaatgtaatgcccttcgagtcacggcaagctgctgaaaaaactgctgaagcattaggtagggtcttaatcttggacctcgtattgaggaatgaggatagactgcgatgccgtccccttggctggcgtggaaattatgcaaatctacttgttgccaacagggaagcttatgccaaccttgactcactagatgatgtttatgattctgctatcattcgatacaagccagagatcattagaagccctcagaaacagaagcagagaagagctgtttcaattagtggcagtattggctcagatgtctctgacctcacattggaggactcttatgcttctagtggacatgtgttttctagctttaatattgtagccattgattcaggtgtaccacgcaggccaccagccagtaagcgggcaaaagatcaggagagctaccccaaactagtggagttaacattgaacaacttcgactattcttccaaacttctgtttgaggtgtccttcggaaaacttggcaccccaggacatgaagaatttgatgtaccatcagactacagttataattctcctctctctgagagtgatatggtagcaacagtgcattcattccgaggaggttttcgtagtgctctgagagaccttcagcgattccacatttttctcatcacactgtatcagaagctggatggtctattaaaaattttcttcaaccttatgtataaatgttccaatgaatatgctagggaggatgctggtacttcggattcaccattgtgttcagtggaaccacaaggagattcaaatgatactgatgttccaaggcatctgcgtaagccttcccgaaccttatcccgtgagagtctagaccaatcatctccttgtcgggatagctttatcaccagacatttcaaaggaaatggtgattcctcccgtggtcttcggttgacaatgaagctgcgagattttaacaagtatgccaaggtgaagacctttgaagtgtggattgataaattgtctattataaactgtctgacgtaggtttctagttgtttttttcactcttatagattgtcccactatttagttgcaggaagccaaatagctaaatggcttcatgattttttttacataagaagggcctcatgatctgcttatggattatcataatttaagtatctagattatataattcacctaataatttgtgttgtttgtttgtcttttaacttatttaagctggattatataatctagagggtaaacaaacagggcaagtttatcatgtgattctattagtcattgaacacatttttacagatagacagtgaattaagcaaagagatagaacaatggaatgacatgctgaggactgaagtagtaaagttgtgtcaagacaacaattttcaaacaggtttttttgaaggcactgataatagcactgttgttgatgcttacgagttgaaggttcgacttgagcacattctcgagaggatatctttgatctctgatgctgcaagtactgagcgtccatcacagatcacagattatctgtatattggtggtgctcttgctgctcggtcaacacacacacttaaacaccttggcatcacccatatattgtgcttgtgtgcaaatgaaattggacagtcagaatcgcagaagcctgacctttttgagtataggaatttctcggtgagttctacataatacctccatggatggaaaatcatttgcctttagcataaggcagaagactcagtttagatatctttcagtgttgaattgcttctctatgtagataaacgatgatgacaatgcagacattggtgatctctttcaagatggttctgatttcatcagttatgtggatcacttgcgtggcaaagtacttgtgcattgctttgagggaaaaagtcgaagtgcgactgttgttcttgcctacctgatgctgaggaagtaagactgcacagtaattactatatcatcactatcatgcttctctgttaaaaccaataactcaccacgactaaaacaatctattaacagatttactatttttcatgtgatcttaaggtctatcaacccagaattgacatctgtaaggataggaagattggaattgcatctttccttattttttattgttctggacgcagtcatcatctcgtaatttcccctttttctcttaagaaactgtactctcctggaagcatggaacatgctgaagaaggtgcaccgacgcgcgcatcccaatgatgggtttgctaagatcttgctggatcttgacaagaaactgcacgggaaaatctccatggaatggcaacacaagaggcctgcaatgaaagtgtgtcctatctgtggcaagaatgctggtctcagcagcagttcactcaagctccacttgcagaaggcacacaagaagatatcctctgggagcgtagacagtgcaatgactctggagatacaaaaagcattagaggcaatcaaagctggctggggcggcagtgacagcccagtgcataaatcacaatcacacatagaaggattttgacgtttaatcttacgttcctacggtcctattaatatatcaacaaggctggtagtcggcgaccgctttaagagtgaagcctcagctctagacttcatgacacttgtaagtagcacatttttggaacatttggtttttattctatagttcatgagcttggattgacaagaaccatccatagagggaatgtagtttctgttataaaattgtgcgattcttttttcatgaaacttgtacgagatgagcattcagattctttggctatcaaattttgaatctgttgtcctgtataatcagtttgttcaaatggacaagctcttcttttagttcattgccaaactacagaaatcaaatcatttttgttggataaataggtatttttagttttaatttaat

SEQ ID NO: 75947 - DNA, 3346 bp, Zea Mays
tcctgtcgtgtttccttccaattccattctagcagttggccagaaggcaccacctttcccttcgcccgcaggcttttccgatccgcaaccagaccaaactccacaacatttcctcaagctgttccttcaagaaacctggatcaatccaaccttcaatcgcacagtccgtgggatctcccttgagttgcgatggaagaggggaccacggaacctggatcattctcccgctcttcctccttcgttggattcgaggagtgggtggcattggtgaggaaacgcaatgggaaggcctcttcgtgcgggcgtctgggtctccgttcaacagccagaaggaatcctttgggagaggcttgggagggtttccatgatggatattgagtcaagtgacttcagttggacctctctcacctcactgcaccatacaaaacatacggctacaagtactgatccatctgaggatgacattagcagaagttttgaggtgacagtaaattctgggggcattgtttttattgcattattcaaagctattgaaaatgttgatcttccgtccaaggaaacagctgcagtaattaaaatagcaccttcaaggatggccacacagtctgaacgctttgggtacgaactcgctaaatggcttggagtgagaactcctcaaggtagagtcattcatagctcctcagatgaatggcaacaagtcaaggatgcagttgaaaatgctcgaaatgcatcgatagcttctggtgatgaacttgaggagatgatttgcgccgaggttttagaagcccttgaattgagtcgttgcctatttctgatgaattatgtacatggctccgctctgctagagaatgtaatgcccttcgagtcacggcaagctgctgaaaaaactgctgaagcattaggtagggtcttaatcttggacctcgtattgaggaatgaggatagactgcgatgccgtccccttggctggcgtggaaattatgcaaatctacttgttgccaacagggaagcttatgccaaccttgactcactagatgatgtttatgattctgctatcattcgatacaagccagagatcattagaagccctcagaaacagaagcagagaagagctgtttcaattagtggcagtattggctcagatgtctctgacctcacattggaggactcttatgcttctagtggacatgtgttttctagctttaatattgtagccattgattcaggtgtaccacgcaggccaccagccagtaagcgggcaaaagatcaggagagctaccccaaactagtggagttaacattgaacaacttcgactattcttccaaacttctgtttgaggtgtccttcggaaaacttggcaccccaggacatgaagaatttgatgtaccatcagactacagttataattctcctctctctgagagtgatatggtagcaacagtgcattcattccgaggaggttttcgtagtgctctgagagaccttcagcgattccacatttttctcatcacactgtatcagaagctggatggtctattaaaaattttcttcaaccttatgtataaatgttccaatgaatatgctagggaggatgctggtacttcggattcaccattgtgttcagtggaaccacaaggagattcaaatgatactgatgttccaaggcatctgcgtaagccttcccgaaccttatcccgtgagagtctagaccaatcatctccttgtcgggatagctttatcaccagacatttcaaaggaaatggtgattcctcccgtggtcttcggttgacaatgaagctgcgagattttaacaagtatgccaagatagacagtgaattaagcaaagagatagaacaatggaatgacatgctgaggactgaagtagtaaagttgtgtcaagacaacaattttcaaacaggtttttttgaaggcactgataatagcactgttgttgatgcttacgagttgaaggttcgacttgagcacattctcgagaggatatctttgatctctgatgctgcaagtactgagcgtccatcacagatcacagattatctgtatattggtggtgctcttgctgctcggtcaacacacacacttaaacaccttggcatcacccatatattgtgcttgtgtgcaaatgaaattggacagtcagaatcgcagaagcctgacctttttgagtataggaatttctcgataaacgatgatgacaatgcagacattggtgatctctttcaagatggttctgatttcatcagttatgtggatcacttgcgtggcaaagtacttgtgcattgctttgagggaaaaagtcgaagtgcgactgttgttcttgcctacctgatgctgaggaagtaagactgcacagtaattactatatcatcactatcatgcttctctgttaaaaccaataactcaccacgactaaaacaatctattaacagatttactatttttcatgtgatcttaaggtctatcaacccagaattgacatctgtaaggataggaagattggaattgcatctttccttattttttattgttctggacgcagtcatcatctcgtaatttcccctttttctcttaagaaactgtactctcctggaagcatggaacatgctgaagaaggtgcaccgacgcgcgcatcccaatgatgggtttgctaagatcttgctggatcttgacaagaaactgcacgggaaaatctccatggaatggcaacacaagaggcctgcaatgaaagtgtgtcctatctgtggcaagaatgctggtctcagcagcagttcactcaagctccacttgcagaaggcacacaagaagatatcctctgggagcgtagacagtgcaatgactctggagatacaaaaagcattagaggcaatcaaagctggctggggcggcagtgacagcccagtgcataaatcacaatcacacatagaaggattttgacgtttaatcttacgttcctacggtcctattaatatatcaacaaggctggtagtcggcgaccgctttaagagtgaagcctcagctctagacttcatgacacttgtaagtagcacatttttggaacatttggtttttattctatagttcatgagcttggattgacaagaaccatccatagagggaatgtagtttctgttataaaattgtgcgattcttttttcatgaaacttgtacgagatgagcattcagattctttggctatcaaattttgaatctgttgtcctgtataatcagtttgttcaaatggacaagctcttcttttagttcattgccaaactacagaaatcaaatcatttttgttggataaataggtatttttagttttaatttaat

SEQ ID NO: 75948 - DNA, 3280 bp, Zea Mays
tcctgtcgtgtttccttccaattccattctagcagttggccagaaggcaccacctttcccttcgcccgcaggcttttccgatccgcaaccagaccaaactccacaacatttcctcaagctgttccttcaagaaacctggatcaatccaaccttcaatcgcacagtccgtgggatctcccttgagttgcgatggaagaggggaccacggaacctggatcattctcccgctcttcctccttcgttggattcgaggagtgggtggcattggtgaggaaacgcaatgggaaggcctcttcgtgcgggcgtctgggtctccgttcaacagccagttcagaagtactagaacttgcagatcctgatagcaatgtcattaatcctgacccttgtgaccaagtgccagaaggaatcctttgggagaggcttgggagggtttccatgatggatattgagtcaagtgacttcagttggacctctctcacctcactgcaccatacaaaacatacggctacaagtactgatccatctgaggatgacattagcagaagttttgaggtgacagtaaattctgggggcattgtttttattgcattattcaaagctattgaaaatgttgatcttccgtccaaggaaacagctgcagtaattaaaatagcaccttcaaggatggccacacagtctgaacgctttgggtacgaactcgctaaatggcttggagtgagaactcctcaaggtagagtcattcatagctcctcagatgaatggcaacaagtcaaggatgcagttgaaaatgctcgaaatgcatcgatagcttctggtgatgaacttgaggagatgatttgcgccgaggttttagaagcccttgaattgagtcgttgcctatttctgatgaattatgtacatggctccgctctgctagagaatgtaatgcccttcgagtcacggcaagctgctgaaaaaactgctgaagcattaggtagggtcttaatcttggacctcgtattgaggaatgaggatagactgcgatgccgtccccttggctggcgtggaaattatgcaaatctacttgttgccaacagggaagcttatgccaaccttgactcactagatgatgtttatgattctgctatcattcgatacaagccagagatcattagaagccctcagaaacagaagcagagaagagctgtttcaattagtggcagtattggctcagatgtctctgacctcacattggaggactcttatgcttctagtggacatgtgttttctagctttaatattgtagccattgattcaggtgtaccacgcaggccaccagccagtaagcgggcaaaagatcaggagagctaccccaaactagtggagttaacattgaacaacttcgactattcttccaaacttctgtttgaggtgtccttcggaaaacttggcaccccaggacatgaagaatttgatgtaccatcagactacagttataattctcctctctctgagagtgatatggtagcaacagtgcattcattccgaggaggttttcgtagtgctctgagagaccttcagcgattccacatttttctcatcacactgtatcagaagctggatggtctattaaaaattttcttcaaccttatgtataaatgttccaatgaatatgctagggaggatgctggtacttcggattcaccattgtgttcagtggaaccacaaggagattcaaatgatactgatgttccaaggcatctgcgtaagccttcccgaaccttatcccgtgagagtctagaccaatcatctccttgtcgggatagctttatcaccagacatttcaaaggaaatggtgattcctcccgtggtcttcggttgacaatgaagctgcgagattttaacaagtatgccaagatagacagtgaattaagcaaagagatagaacaatggaatgacatgctgaggactgaagtagtaaagttgtgtcaagacaacaattttcaaacaggtttttttgaaggcactgataatagcactgttgttgatgcttacgagttgaaggtaaatctaaatgtacactctgtactaactacgtgtacacattaattgaacctatcgagcaattctgttgttaggttcgacttgagcacattctcgagaggatatctttgatctctgatgctgcaagtactgagcgtccatcacagatcacagattatctgtatattggtggtgctcttgctgctcggtcaacacacacacttaaacaccttggcatcacccatatattgtgcttgtgtgcaaatgaaattggacagtcagaatcgcagaagcctgacctttttgagtataggaatttctcgtgttgaattgcttctctatgtagataaacgatgatgacaatgcagacattggtgatctctttcaagatggttctgatttcatcagttatgtggatcacttgcgtggcaaagtacttgtgcattgctttgagggaaaaagtcgaagtgcgactgttgttcttgcctacctgatgctgaggaaaaactgtactctcctggaagcatggaacatgctgaagaaggtgcaccgacgcgcgcatcccaatgatgggtttgctaagatcttgctggatcttgacaagaaactgcacgggaaaatctccatggaatggcaacacaagaggcctgcaatgaaagtgtgtcctatctgtggcaagaatgctggtctcagcagcagttcactcaagctccacttgcagaaggcacacaagaagatatcctctgggagcgtagacagtgcaatgactctggagatacaaaaagcattagaggcaatcaaagctggctggggcggcagtgacagcccagtgcataaatcacaatcacacatagaaggattttgacgtttaatcttacgttcctacggtcctattaatatatcaacaaggctggtagtcggcgaccgctttaagagtgaagcctcagctctagacttcatgacacttgtaagtagcacatttttggaacatttggtttttattctatagttcatgagcttggattgacaagaaccatccatagagggaatgtagtttctgttataaaattgtgcgattcttttttcatgaaacttgtacgagatgagcattcagattctttggctatcaaattttgaatctgttgtcctgtataatcagtttgttcaaatggacaagctcttcttttagttcattgccaaactacagaaatcaaatcatttttgttggataaataggtatttttagttttaatttaat

SEQ ID NO: 75949 - DNA, 2972 bp, Zea Mays
gtttcctctctctcctgtcgtgtttccttccaattccattctagcagttggccagaaggcaccacctttcccttcgcccgcaggcttttccgatccgcaaccagaccaaactccacaacatttcctcaagctgttccttcaagaaacctggatcaatccaaccttcaatcgcacagtccgtgggatctcccttgagttgcgatggaagaggggaccacggaacctggatcattctcccgctcttcctccttcgttggattcgaggagtgggtggcattggtgaggaaacgcaatgggaaggcctcttcgtgcgggcgtctgggtctccgttcaacagccaggtgacagtaaattctgggggcattgtttttattgcattattcaaagctattgaaaatgttgatcttccgtccaaggaaacagctgcagtaattaaaatagcaccttcaaggatggccacacagtctgaacgctttgggtacgaactcgctaaatggcttggagtgagaactcctcaaggtagagtcattcatagctcctcagatgaatggcaacaagtcaaggatgcagttgaaaatgctcgaaatgcatcgatagcttctggtgatgaacttgaggagatgatttgcgccgaggttttagaagcccttgaattgagtcgttgcctatttctgatgaattatgtacatggctccgctctgctagagaatgtaatgcccttcgagtcacggcaagctgctgaaaaaactgctgaagcattaggtagggtcttaatcttggacctcgtattgaggaatgaggatagactgcgatgccgtccccttggctggcgtggaaattatgcaaatctacttgttgccaacagggaagcttatgccaaccttgactcactagatgatgtttatgattctgctatcattcgatacaagccagagatcattagaagccctcagaaacagaagcagagaagagctgtttcaattagtggcagtattggctcagatgtctctgacctcacattggaggactcttatgcttctagtggacatgtgttttctagctttaatattgtagccattgattcaggtgtaccacgcaggccaccagccagtaagcgggcaaaagatcaggagagctaccccaaactagtggagttaacattgaacaacttcgactattcttccaaacttctgtttgaggtgtccttcggaaaacttggcaccccaggacatgaagaatttgatgtaccatcagactacagttataattctcctctctctgagagtgatatggtagcaacagtgcattcattccgaggaggttttcgtagtgctctgagagaccttcagcgattccacatttttctcatcacactgtatcagaagctggatggtctattaaaaattttcttcaaccttatgtataaatgttccaatgaatatgctagggaggatgctggtacttcggattcaccattgtgttcagtggaaccacaaggagattcaaatgatactgatgttccaaggcatctgcgtaagccttcccgaaccttatcccgtgagagtctagaccaatcatctccttgtcgggatagctttatcaccagacatttcaaaggaaatggtgattcctcccgtggtcttcggttgacaatgaagctgcgagattttaacaagtatgccaagatagacagtgaattaagcaaagagatagaacaatggaatgacatgctgaggactgaagtagtaaagttgtgtcaagacaacaattttcaaacaggtttttttgaaggcactgataatagcactgttgttgatgcttacgagttgaaggttcgacttgagcacattctcgagaggatatctttgatctctgatgctgcaagtactgagcgtccatcacagatcacagattatctgtatattggtggtgctcttgctgctcggtcaacacacacacttaaacaccttggcatcacccatatattgtgcttgtgtgcaaatgaaattggacagtcagaatcgcagaagcctgacctttttgagtataggaatttctcgataaacgatgatgacaatgcagacattggtgatctctttcaagatggttctgatttcatcagttatgtggatcacttgcgtggcaaagtacttgtgcattgctttgagggaaaaagtcgaagtgcgactgttgttcttgcctacctgatgctgaggaaaaactgtactctcctggaagcatggaacatgctgaagaaggtgcaccgacgcgcgcatcccaatgatgggtttgctaagatcttgctggatcttgacaagaaactgcacgggaaaatctccatggaatggcaacacaagaggcctgcaatgaaagtgtgtcctatctgtggcaagaatgctggtctcagcagcagttcactcaagctccacttgcagaaggcacacaagaagatatcctctgggagcgtagacagtgcaatgactctggagatacaaaaagcattagaggcaatcaaagctggctggggcggcagtgacagcccagtgcataaatcacaatcacacatagaaggattttgacgtttaatcttacgttcctacggtcctattaatatatcaacaaggctggtagtcggcgaccgctttaagagtgaagcctcagctctagacttcatgacacttgtaagtagcacatttttggaacatttggtttttattctatagttcatgagcttggattgacaagaaccatccatagagggaatgtagtttctgttataaaattgtgcgattcttttttcatgaaacttgtacgagatgagcattcagattctttggctatcaaattttgaatctgttgtcctgtataatcagtttgttcaaatggacaagctcttcttttagttcattgccaaactacagaaatcaaatcatttttgttggataaataggtatttttagttttaatttaat

SEQ ID NO: 75950 - DNA, 3382 bp, Zea Mays
gtttcctctctctcctgtcgtgtttccttccaattccattctagcagttggccagaaggcaccacctttcccttcgcccgcaggcttttccgatccgcaaccagaccaaactccacaacatttcctcaagctgttccttcaagaaacctggatcaatccaaccttcaatcgcacagtccgtgggatctcccttgagttgcgatggaagaggggaccacggaacctggatcattctcccgctcttcctccttcgttggattcgaggagtgggtggcattggtgaggaaacgcaatgggaaggcctcttcgtgcgggcgtctgggtctccgttcaacagccaggtgacagtaaattctgggggcattgtttttattgcattattcaaagctattgaaaatgttgatcttccgtccaaggaaacagctgcagtaattaaaatagcaccttcaaggatggccacacagtctgaacgctttgggtacgaactcgctaaatggcttggagtgagaactcctcaaggtagagtcattcatagctcctcagatgaatggcaacaagtcaaggatgcagttgaaaatgctcgaaatgcatcgatagcttctggtgatgaacttgaggagatgatttgcgccgaggttttagaagcccttgaattgagtcgttgcctatttctgatgaattatgtacatggctccgctctgctagagaatgtaatgcccttcgagtcacggcaagctgctgaaaaaactgctgaagcattaggtagggtcttaatcttggacctcgtattgaggaatgaggatagactgcgatgccgtccccttggctggcgtggaaattatgcaaatctacttgttgccaacagggaagcttatgccaaccttgactcactagatgatgtttatgattctgctatcattcgatacaagccagagatcattagaagccctcagaaacagaagcagagaagagctgtttcaattagtggcagtattggctcagatgtctctgacctcacattggaggactcttatgcttctagtggacatgtgttttctagctttaatattgtagccattgattcaggtgtaccacgcaggccaccagccagtaagcgggcaaaagatcaggagagctaccccaaactagtggagttaacattgaacaacttcgactattcttccaaacttctgtttgaggtgtccttcggaaaacttggcaccccaggacatgaagaatttgatgtaccatcagactacagttataattctcctctctctgagagtgatatggtagcaacagtgcattcattccgaggaggttttcgtagtgctctgagagaccttcagcgattccacatttttctcatcacactgtatcagaagctggatggtctattaaaaattttcttcaaccttatgtataaatgttccaatgaatatgctagggaggatgctggtacttcggattcaccattgtgttcagtggaaccacaaggagattcaaatgatactgatgttccaaggcatctgcgtaagccttcccgaaccttatcccgtgagagtctagaccaatcatctccttgtcgggatagctttatcaccagacatttcaaaggaaatggtgattcctcccgtggtcttcggttgacaatgaagctgcgagattttaacaagtatgccaaggtgaagacctttgaagtgtggattgataaattgtctattataaactgtctgacgtaggtttctagttgtttttttcactcttatagattgtcccactatttagttgcaggaagccaaatagctaaatggcttcatgattttttttacataagaagggcctcatgatctgcttatggattatcataatttaagtatctagattatataattcacctaataatttgtgttgtttgtttgtcttttaacttatttaagctggattatataatctagagggtaaacaaacagggcaagtttatcatgtgattctattagtcattgaacacatttttacagatagacagtgaattaagcaaagagatagaacaatggaatgacatgctgaggactgaagtagtaaagttgtgtcaagacaacaattttcaaacaggtttttttgaaggcactgataatagcactgttgttgatgcttacgagttgaaggtaaatctaaatgtacactctgtactaactacgtgtacacattaattgaacctatcgagcaattctgttgttaggttcgacttgagcacattctcgagaggatatctttgatctctgatgctgcaagtactgagcgtccatcacagatcacagattatctgtatattggtggtgctcttgctgctcggtcaacacacacacttaaacaccttggcatcacccatatattgtgcttgtgtgcaaatgaaattggacagtcagaatcgcagaagcctgacctttttgagtataggaatttctcgataaacgatgatgacaatgcagacattggtgatctctttcaagatggttctgatttcatcagttatgtggatcacttgcgtggcaaagtacttgtgcattgctttgagggaaaaagtcgaagtgcgactgttgttcttgcctacctgatgctgaggaaaaactgtactctcctggaagcatggaacatgctgaagaaggtgcaccgacgcgcgcatcccaatgatgggtttgctaagatcttgctggatcttgacaagaaactgcacgggaaaatctccatggaatggcaacacaagaggcctgcaatgaaagtgtgtcctatctgtggcaagaatgctggtctcagcagcagttcactcaagctccacttgcagaaggcacacaagaagatatcctctgggagcgtagacagtgcaatgactctggagatacaaaaagcattagaggcaatcaaagctggctggggcggcagtgacagcccagtgcataaatcacaatcacacatagaaggattttgacgtttaatcttacgttcctacggtcctattaatatatcaacaaggctggtagtcggcgaccgctttaagagtgaagcctcagctctagacttcatgacacttgtaagtagcacatttttggaacatttggtttttattctatagttcatgagcttggattgacaagaaccatccatagagggaatgtagtttctgttataaaattgtgcgattcttttttcatgaaacttgtacgagatgagcattcagattctttggctatcaaattttgaatctgttgtcctgtataatcagtttgttcaaatggacaagctcttcttttagttcattgccaaactacagaaatcaaatcatttttgttggataaataggtatttttagttttaatttaat

SEQ ID NO: 75951 - DNA, 2000 bp, Zea Mays
ctcttgtttccatctccgtgccgcgtgattatattgttgcctcaagctgggtccgcccgtcttcttcttcctcctcagctaatttccattattccgttccaatttccaaccgcacccaggagcaagtctgggttcgcgccacagttggagtttcgacgggtctcggtcgggggtggtgccttcgtcgcggccgttcgacctacaccatggaatcgccgcagcagcaagccccaccgccgagccagggagctagctctggaagctgcgacgctcctctgcagctagcagctcgatatggtgccaccgtaccacgtacatcctcgccacctgcctcagtcactcggccggaagtcaacaatagaatggagctaaagagcagcaacagtgagacactatgtgacagcttgacgctaaatacggtatccgtgatgctaaccgtcagcttcttcagagaagacggggacggtggtactgacgtgtttcttggcttctcatgcgtgctcggtttcatcattcgcaagtatctgtgggtgctgcgctccgagagcgcccggttcacgggtctggatatctacacgaacacggtcgttctagtggtcaccgcatatgcaatgctgctcgcgaacagtttgcagtacatcatccttgctcccttcccgatcagtgtggctgccttcatcgcttacctgtacaaggaaagactggagcaccatggcagtagtggagctgatcagcaggataataaggacggatgcaaacctggggacggcaatggcaagaaagccggggagctcgaaatggtggtagcgccgtactctatgctgctgatcagtgcaatagtgatgccgtacgaagatagccctgtcctcctgtctcacttcctgctcttctcatgttgcgcgctcgggacgctggcgctgctctactccagactggcggaagcaagtccggccttgagaccagcgttggagtgcatccagatggcctacatggtgacgctgttcataacggtgcacacggtggccgcagaatggctgggagacgtcatggcgctggtcaccatgccggagttgatcgcagggcttgtctggttctgtaatcttctccacggcgacactgcttgtaatactgcagcagtagcccacattctcagatcagatgaaggttccagcagtagttcggatgcaactcatcatcaagtcccaacaaattcggaaacaagacaagggttcgtcttcgatgggtccatgttcactcccctcggagctgttttggcagggttagtaacatccactttcgcacatgacgaagaactcctggccagctggaacaccaaggcgaccgtcgcctgcagcattgcagggtgtttgccatatctcagcatatggatggtgtcgaggtggcccgggcgcatacctagctcagacaaggcgactcggctgctcaagtttgctgcaaatgtgtgcttgactggagcttttctgatgctgtttgccttgcttgatgaaaaggcactggcctatcgtctctttggtttggatgagattattgatcctagtcaactcaaatatcttccggctgttcacttcagtacagcggtagccctgtatttctttcggaagcatcttgctggtgcgttggcaaatttaggggaggagctagggaatctcctatccctccttattgctgcttctccaacagagaagcaggggagaaagagaaggaggaagaagaagacaaaaagtatagatgtgagaagacgtcgataatgaagagcagctatagatgagcttcgttctaacatgagtccggcctctgttttaactgttttgttgctgagtgtaaaagcactccggctaagcgaccatgcaaaaaaggtgtaaaatcggacattgattgctctgagatggatggacgtttgtaaattgtaatccccgtccaattgtatgtttatggcattctttgtagatgttatgtttgagttctgcctaggtatgcac

SEQ ID NO: 75952 - DNA, 921 bp, Zea Mays
cacacacatcccccttcccttcccttccccgcaactaccctctactctctactgcacgcttctactatctaagaaacaacgcacacgggccgaaactaaatttctccaagcgcgcaatcctgtcgccaaccccggccacggatcggggatgtcgtctgctgcgggccgcgcgccggcgccgacgccgatgggctccgccgatcgctgtaagtcactttgcaacgcctgtgggatccggtaccgaaaaaagaggaggcaagagcttggcctagaccgcaagctgcagcaacaacaaaataatggcgaggcgaagacggatgaagcaaaagacagctctagcaacagcagcagcgggagcagcaacttgcaggtggtgcagaaacggaggctgctaatgggagtggaggaggctgctctgctgctgatgaccctatcttcttcgcccacatccacgttgcttcatggataaggaccctcctccaacgccagatcagcagtgtacatacaacgtaccccctgcacagtgactgccgaacgattgcaggcctatctcagggttgtgtgatcttgtgattggggcggattattagtgccaagctaatcactccgttgatcgtcttgtcttcctctgttttcgccgcacccgtagatcttgatgccagccagccatatatcttctacgtgatttgtggtaggctccataatcagaggtctgttgatcccattccccccgcacatcttttttctcttgtcttttctctttttggttttttgtatgtactttgatgttgccccatttgtgagggatgggtgatcaaagaggagacgccatcccttctcgttctggaataatggtccaaataataaaggatttgagctgttttgttttgtttcgtagtttcagtaaggatttttttttct

SEQ ID NO: 75953 - DNA, 1393 bp, Zea Mays
accaatgtaaaggcacctgaacatgtattggtcaagtcgactctattgaatagaattttgaaagaaagattcttgatcacccaagttaaaagagaaacttagccttgcctttcagattaaactagaggagacatgtatgaaaatggctggaaggactacaagatgcaattaatcatttacatatttggaaagtagtccatcctcatagctatgccattttgtttcctattgcttgacattatcagatgatttgcttctgcagtttagtgccatccatcttgaaccaagatgatccgcaaggtcccagtactgcacctccacctccagatagcccctccaatgacaatgacgatatgaaatctgttctctctcttgatgatggtcgatggtctgtatcagcagacgaacacacttcatttacttctgctaatttggaagaagagttgttacagttgaatatcaaacaaccttctcctccaccagttctggcagaggtacaaagaccaatttctccatcaagagttgctgatccaacaccaggacttccgacctcgggaactgcccgttttcagaacttgcatgttccgatcaagttgatggattgttttctaagggttgccgagtcaaacaccaaaagaagcttagaaacctgtggggttcttgctggtaccctgaaaaatagaactttttatgtgacaaccttaattatcccaaagcagaaatcgacatctgttacgtgtgaagctacaaatgaagaagaactatttgaagttcaggacatgggctcactgttcactcttggttggattcatacacatccaacacagtcctgcttcctttcttccgttgacctccacaaccattattcttatcaggtcatgctgcctgaagcaattgcaatagttatggcacctactgacacaacaaggtggtatgggcgtgatccatgattgtcaagagagaggtttccatcctcataaggcacctcttgatggttcgccaatctacaagcaatgctcccatgtgtacatggacaccgacataaagtttgatatgattgatctccgagaacgatgagagcctaacttttttgggtttattttggagcccatactgtagttaaatcaagttgctgcctttttcttagtcgtgctgaagatttgtggattcttatgtatgctgttgtacatagctattgtattgtatagagaaaacaattgagtgaatgatatcagtcattgctgctttgttgcgattcatcccatatcctcgcgaggcacgtttgtgtggcaagatgaagtgatgtctagattttataccatgccaattctccatacttgaatatttgacttgaagagcactaaatatcactgattgttaaagctctattatc

SEQ ID NO: 75954 - DNA, 1330 bp, Zea Mays
accaatgtaaaggcacctgaacatgtattggtcaagtcgactctattgaatagaattttgaaagaaagattcttgatcacccaagttaaaagagaaacttagccttgcctttcagattaaactagaggagacatgtatgaaaatggctggaaggactacaagatgcaattaatcatttacatatttggaaagtagtccatcctcatagctatgccattttgtttcctattgcttgacattatcagatgatttgcttctgcagtttagtgccatccatcttgaaccaagatgatccgcaaggtcccagtactgcacctccacctccagatagcccctccaatgacaatgacgatatgaaatctgttctctctcttgatgatggtcgatgttctggcagaggtacaaagaccaatttctccatcaagagttgctgatccaacaccaggacttccgacctcgggaactgcccgttttcagaacttgcatgttccgatcaagttgatggattgttttctaagggttgccgagtcaaacaccaaaagaagcttagaaacctgtggggttcttgctggtaccctgaaaaatagaactttttatgtgacaaccttaattatcccaaagcagaaatcgacatctgttacgtgtgaagctacaaatgaagaagaactatttgaagttcaggacatgggctcactgttcactcttggttggattcatacacatccaacacagtcctgcttcctttcttccgttgacctccacaaccattattcttatcaggtcatgctgcctgaagcaattgcaatagttatggcacctactgacacaacaagaaaacatggtatatttcatctcacggatccaggtggtatgggcgtgatccatgattgtcaagagagaggtttccatcctcataaggcacctcttgatggttcgccaatctacaagcaatgctcccatgtgtacatggacaccgacataaagtttgatatgattgatctccgagaacgatgagagcctaacttttttgggtttattttggagcccatactgtagttaaatcaagttgctgcctttttcttagtcgtgctgaagatttgtggattcttatgtatgctgttgtacatagctattgtattgtatagagaaaacaattgagtgaatgatatcagtcattgctgctttgttgcgattcatcccatatcctcgcgaggcacgtttgtgtggcaagatgaagtgatgtctagattttataccatgccaattctccatacttgaatatttgacttgaagagcactaaatatcactgattgttaaagctctattatc

SEQ ID NO: 75955 - DNA, 1336 bp, Zea Mays
gaaggatgtcgtaggattggggacgccgccggccatgttacttttgttgaagctcttgatcaattaatgcctgggtttgatcccgagattgcaaaattggcgcagaggattcttattagtcctcgtaaaattgactatcacactggtgtttttgcaagcaagattaccccagcaaaggatggtaagcctgttttgattgagctgattgatgctaaaacaaaagaacacaaggagacacttgaggtggatgcagcactcatagctactggaagggcacccttcaccaaaggacttggcttggaaaatatcaatgtcgttacacaacaaggttttgttcctgttgatgagcggatgcaagttatggatgcaactggcaatgtggttcctaatttatattgtatcggagatgccaatggtaagctcatgcttgctcatgcagccagcgcacaaggaatctcagttgtggagcaaatcagtgggagggacaacattttaaatcacctaagcatcccagctgcttgtttcactcaccctgagatcagtatggttggcttgacagagccacaggctagggagaaggctgacaaggaaggatttgaaataagtgttgtaaagaccagttttaaggctaacacaaaggccctggcagagaatgaaggagatggacttgctaagatgatttatcgccctgacaccggagaaattcttggagttcatattttgggcttgcatgctgctgatctcatccatgaggcatcaaatgccattgcccttggaacccatgtgcaggacatcaagtttgctgttcatgcacacccaacgttgtctgaagttctggatgaactcttcaaggctgccaaggttaacacagctggttcgcattctatgaatgagccagttgcggtgtagagaggagccatagttgaaacaatctatctgctgcagccccacaccccagttatattgcctttagtacttaactagcctgctactcagaaaactgattttgtagccatttgcggacattttcgttatgagattcaggattagtgccagcactatctatttcatgagaaaatagaaatccaatgatctgtcccatgtatggaaaaatgtaaattttgtagtccttgtagagtaaatgtagtgcctttacgtggcaaaactcgctcttatgaatctatgattacttcaattcataagatgggcttgtttggtcagcattatgaatttttacagcttaggtcagcagctaccgtatctcattctttatttcattcttatttcaatcttcactttgtaaacggtgttatctatagtataaatcctccatttt

SEQ ID NO: 75956 - DNA, 1663 bp, Zea Mays
aaatgacatacaatttggaatgagggagtatatgtttagcactactatgacaaaatctgccaatttatgttgcaactgggatactacaatgtgcatctacctgaaagaattgtgagctaggggaagcaaaaagtgagatatgggaaagttggtttcccagacaatgaaatcactgctagaaacatcataattgccactggatctgttccttttgtccccaagggcattgaaatagatggtaaaactgtatttactagtgatcatgcactaaaacttgagtcagtccctgaatggattgctattgttggaagtggttacattggacttgaattcagtgatgtatacacagctctaggaagtgaggttacttttgttgaagctcttgatcaattaatgcctgggtttgatcccgagattgcaaaattggcgcagaggattcttattagtcctcgtaaaattgactatcacactggtgtttttgcaagcaagattaccccagcaaaggatggtaagcctgttttgattgagctgattgatgctaaaacaaaagaacacaaggagacacttgaggtggatgcagcactcatagctactggaagggcacccttcaccaaaggacttggcttggaaaatatcaatgtcgttacacaacaaggttttgttcctgttgatgagcggatgcaagttatggatgcaactggcaatgtggttcctaatttatattgtatcggagatgccaatggtaagctcatgcttgctcatgcagccagcgcacaaggaatctcagttgtggagcaaatcagtgggagggacaacattttaaatcacctaagcatcccagctgcttgtttcactcaccctgagatcagtatggttggcttgacagagccacaggctagggagaaggctgacaaggaaggatttgaaataagtgttgtaaagaccagttttaaggctaacacaaaggccctggcagagaatgaaggagatggacttgctaagatgatttatcgccctgacaccggagaaattcttggagttcatattttgggcttgcatgctgctgatctcatccatgaggcatcaaatgccattgcccttggaacccatgtgcaggacatcaagtttgctgttcatgcacacccaacgttgtctgaagttctggatgaactcttcaaggctgccaaggttaacacagctggttcgcattctatgaatgagccagttgcggtgtagagaggagccatagttgaaacaatctatctgctgcagccccacaccccagttatattgcctttagtacttaactagcctgctactcagaaaactgattttgtagccatttgcggacattttcgttatgagattcaggattagtgccagcactatctatttcatgagaaaatagaaatccaatgatctgtcccatgtatggaaaaatgtaaattttgtagtccttgtagagtaaatgtagtgcctttacgtggcaaaactcgctcttatgaatctatgattacttcaattcataagatgggcttgtttggtcagcattatgaatttttacagcttaggtcagcagctaccgtatctcattctttatttcattcttatttcaatcttcactttgtaaacggtgttatctatagtataaatcctccatttt

SEQ ID NO: 75957 - DNA, 1859 bp, Zea Mays
attttatactaataagattaataattgtgcttgctctatgcttttatatgttaattatttgagtatttctgttggtggcatggtgctcactaatcggggctagtggattggcatattttcttcataatttactgctaaaaggatgatgaaagggtttgaaaactgccataattgagggagacgtcgtgggtggaacttgtgtcaacagaggctgtgttccgtcaaaggctctccttgctgtaagtggtaggatgcgagaacttcaagatgaacatcacatgaaatcactgggcctacaggtctcatcaccaggatatgacaggcaggttgttgctgaccatgcaaataatcttgcatctaaaatccgcagcaacttgactaattcaatgaaagctctgggtgtggatatactcactggtattggcaccattgtggtaaaactgtatttactagtgatcatgcactaaaacttgagtcagtccctgaatggattgctattgttggaagtggttacattggacttgaattcagtgatgtatacacagctctaggaagtgaggttacttttgttgaagctcttgatcaattaatgcctgggtttgatcccgagattgcaaaattggcgcagaggattcttattagtcctcgtaaaattgactatcacactggtgtttttgcaagcaagattaccccagcaaaggatggtaagcctgttttgattgagctgattgatgctaaaacaaaagaacacaaggagacacttgaggtggatgcagcactcatagctactggaagggcacccttcaccaaaggacttggcttggaaaatatcaatgtcgttacacaacaaggttttgttcctgttgatgagcggatgcaagttatggatgcaactggcaatgtggttcctaatttatattgtatcggagatgccaatggtaagctcatgcttgctcatgcagccagcgcacaaggaatctcagttgtggagcaaatcagtgggagggacaacattttaaatcacctaagcatcccagctgcttgtttcactcaccctgagatcagtatggttggcttgacagagccacaggctagggagaaggctgacaaggaaggatttgaaataagtgttgtaaagaccagttttaaggctaacacaaaggccctggcagagaatgaaggagatggacttgctaagatgatttatcgccctgacaccggagaaattcttggagttcatattttgggcttgcatgctgctgatctcatccatgaggcatcaaatgccattgcccttggaacccatgtgcaggacatcaagtttgctgttcatgcacacccaacgttgtctgaagttctggatgaactcttcaaggctgccaaggttaacacagctggttcgcattctatgaatgagccagttgcggtgtagagaggagccatagttgaaacaatctatctgctgcagccccacaccccagttatattgcctttagtacttaactagcctgctactcagaaaactgattttgtagccatttgcggacattttcgttatgagattcaggattagtgccagcactatctatttcatgagaaaatagaaatccaatgatctgtcccatgtatggaaaaatgtaaattttgtagtccttgtagagtaaatgtagtgcctttacgtggcaaaactcgctcttatgaatctatgattacttcaattcataagatgggcttgtttggtcagcattatgaatttttacagcttaggtcagcagctaccgtatctcattctttatttcattcttatttcaatcttcactttgtaaacggtgttatctatagtataaatcctccatttt

SEQ ID NO: 75958 - DNA, 2131 bp, Zea Mays
gttgtattatagtaattaaatatcaatattgaacaatcgaaaaatagtgagaagatggaagaagcggttgcaaggtgcctatggatatatgacttctcttacttagaatttactgggctggtttttttcctcaactaagtacttgtgacagtaaattttatactaataagattaataattgtgcttgctctatgcttttatatgttaattatttgagtatttctgttggtggcatggtgctcactaatcggggctagtggattggcatattttcttcataatttactgctaaaaggatgatgaaagggtttgaaaactgccataattgagggagacgtcgtgggtggaacttgtgtcaacagaggctgtgttccgtcaaaggctctccttgctgtaagtggtaggatgcgagaacttcaagatgaacatcacatgaaatcactgggcctacaggtctcatcaccaggatatgacaggcaggttgttgctgaccatgcaaataatcttgcatctaaaatccgcagcaacttgactaattcaatgaaagctctgggtgtggatatactcactggtattggcaccattgtggggaagcaaaaagtgagatatgggaaagttggtttcccagacaatgaaatcactgctagaaacatcataattgccactggatctgttccttttgtccccaagggcattgaaatagatggtaaaactgtatttactagtgatcatgcactaaaacttgagtcagtccctgaatggattgctattgttggaagtggttacattggacttgaattcagtgatgtatacacagctctaggaagtgaggttacttttgttgaagctcttgatcaattaatgcctgggtttgatcccgagattgcaaaattggcgcagaggattcttattagtcctcgtaaaattgactatcacactggtgtttttgcaagcaagattaccccagcaaaggatggtaagcctgttttgattgagctgattgatgctaaaacaaaagaacacaaggagacacttgaggtggatgcagcactcatagctactggaagggcacccttcaccaaaggacttggcttggaaaatatcaatgtcgttacacaacaaggttttgttcctgttgatgagcggatgcaagttatggatgcaactggcaatgtggttcctaatttatattgtatcggagatgccaatggtaagctcatgcttgctcatgcagccagcgcacaaggaatctcagttgtggagcaaatcagtgggagggacaacattttaaatcacctaagcatcccagctgcttgtttcactcaccctgagatcagtatggttggcttgacagagccacaggctagggagaaggctgacaaggaaggatttgaaataagtgttgtaaagaccagttttaaggctaacacaaaggccctggcagagaatgaaggagatggacttgctaagatgatttatcgccctgacaccggagaaattcttggagttcatattttgggcttgcatgctgctgatctcatccatgaggcatcaaatgccattgcccttggaacccatgtgcaggacatcaagtttgctgttcatgcacacccaacgttgtctgaagttctggatgaactcttcaaggctgccaaggttaacacagctggttcgcattctatgaatgagccagttgcggtgtagagaggagccatagttgaaacaatctatctgctgcagccccacaccccagttatattgcctttagtacttaactagcctgctactcagaaaactgattttgtagccatttgcggacattttcgttatgagattcaggattagtgccagcactatctatttcatgagaaaatagaaatccaatgatctgtcccatgtatggaaaaatgtaaattttgtagtccttgtagagtaaatgtagtgcctttacgtggcaaaactcgctcttatgaatctatgattacttcaattcataagatgggcttgtttggtcagcattatgaatttttacagcttaggtcagcagctaccgtatctcattctttatttcattcttatttcaatcttcactttgtaaacggtgttatctatagtataaatcctccatttt

SEQ ID NO: 75959 - DNA, 2142 bp, Zea Mays
gcctcatcccttttcttcaccgcttcgaatcctccgcccgtcgccaaaaaaccaccctcgttttcgtccaccctcgccgcttccgcccatttcacctcgtcttcttctgttacgcctcgccccccgccgcctctctcgctagcaccagaatccatctctactcgctgccaccatgcacctcacggtcatgtccctctcggcggcggttgccaacggcgccgctgcctacaggtacgacacgatccagccggttgcgaggctccgcttctgcggcctcaggcgcaaggcccaccggctccactcgccccggtactcgcggcacttggtggccgctaggcggagcgtggtggttgcggcgacggctggcaatggcgcggccgcgagcggcacgttcgactacgacctcgtgatcatcggagctggcgtcggcggccacggcgccgccctccatgcagtcgagaagggtttgaaaactgccataattgagggagacgtcgtgggtggaacttgtgtcaacagaggctgtgttccgtcaaaggctctccttgctgtaagtggtaggatgcgagaacttcaagatgaacatcacatgaaatcactgggcctacaggtctcatcaccaggatatgacaggcaggttgttgctgaccatgcaaataatcttgcatctaaaatccgcagcaacttgactaattcaatgaaagctctgggtgtggatatactcactggtattggcaccattgtggtaaaactgtatttactagtgatcatgcactaaaacttgagtcagtccctgaatggattgctattgttggaagtggttacattggacttgaattcagtgatgtatacacagctctaggaagtgaggttacttttgttgaagctcttgatcaattaatgcctgggtttgatcccgagattgcaaaattggcgcagaggattcttattagtcctcgtaaaattgactatcacactggtgtttttgcaagcaagattaccccagcaaaggatggtaagcctgttttgattgagctgattgatgctaaaacaaaagaacacaaggagacacttgaggtggatgcagcactcatagctactggaagggcacccttcaccaaaggacttggcttggaaaatgttttgttcctgttgatgagcggatgcaagttatggatgcaactggcaatgtggttcctaatttatattgtatcggagatgccaatggtaagctcatgcttgctcatgcagccagcgcacaaggaatctcagttgtggagcaaatcagtgggagggacaacattttaaatcacctaagcatcccagctgcttgtttcactcaccctgagatcagtatggttggcttgacagaggctagggagaaggctgacaaggaaggatttgaaataagtgttgtaaagaccagttttaaggctaacacaaaggccctggcagagaatgaaggagatggacttgctaagatgatttatcgccctgacaccggagaaattcttggagttcatattttgggcttgcatgctgctgatctcatccatgaggcatcaaatgccattgcccttggaacccatgtgcaggacatcaagtttgctgttcatgcacacccaacgttgtctgaagttctggatgaactcttcaaggctgccaaggttaacacagctggttcgcattctatgaatgagccagttgcggtgtagagaggagccatagttgaaacaatctatctgctgcagccccacaccccagttatattgcctttagtacttaactagcctgctactcagaaaactgattttgtagccatttgcggacattttcgttatgagattcaggattagtgccagcactatctatttcatgagaaaatagaaatccaatgatctgtcccatgtatggaaaaatgtaaattttgtagtccttgtagagtaaatgtagtgcctttacgtggcaaaactcgctcttatgaatctatgattacttcaattcataagatgggcttgtttggtcagcattatgaatttttacagcttaggtcagcagctaccgtatctcattctttatttcattcttatttcaatcttcactttgtaaacggtgttatctatagtataaatcctccatttt

SEQ ID NO: 75960 - DNA, 2281 bp, Zea Mays
gcagcctcatcccttttcttcaccgcttcgaatcctccgcccgtcgccaaaaaaccaccctcgttttcgtccaccctcgccgcttccgcccatttcacctcgtcttcttctgttacgcctcgccccccgccgcctctctcgctagcaccagaatccatctctactcgctgccaccatgcacctcacggtcatgtccctctcggcggcggttgccaacggcgccgctgcctacaggtacgacacgatccagccggttgcgaggctccgcttctgcggcctcaggcgcaaggcccaccggctccactcgccccggtactcgcggcacttggtggccgctaggcggagcgtggtggttgcggcgacggctggcaatggcgcggccgcgagcggcacgttcgactacgacctcgtgatcatcggagctggcgtcggcggccacggcgccgccctccatgcagtcgagaagggtttgaaaactgccataattgagggagacgtcgtgggtggaacttgtgtcaacagaggctgtgttccgtcaaaggctctccttgctgtaagtggtaggatgcgagaacttcaagatgaacatcacatgaaatcactgggcctacaggtctcatcaccaggatatgacaggcaggttgttgctgaccatgcaaataatcttgcatctaaaatccgcagcaacttgactaattcaatgaaagctctgggtgtggatatactcactggtattggcaccattgtggggaagcaaaaagtgagatatgggaaagttggtttcccagacaatgaaatcactgctagaaacatcataattgccactggatctgttccttttgtccccaagggcattgaaatagatggtaaaactgtatttactagtgatcatgcactaaaacttgagtcagtccctgaatggattgctattgttggaagtggttacattggacttgaattcagtgatgtatacacagctctaggaagtgaggttacttttgttgaagctcttgatcaattaatgcctgggtttgatcccgagattgcaaaattggcgcagaggattcttattagtcctcgtaaaattgactatcacactggtgtttttgcaagcaagcaaaggatggtaagcctgttttgattgagctgattgatgctaaaacaaaagaacacaaggagacacttgaggtggatgcagcactcatagctactggaagggcacccttcaccaaaggacttggcttggaaaatatcaatgtcgttacacaacaaggttttgttcctgttgatgagcggatgcaagttatggatgcaactggcaatgtggttcctaatttatattgtatcggagatgccaatggtaagctcatgcttgctcatgcagccagcgcacaaggaatctcagttgtggagcaaatcagtgggagggacaacattttaaatcacctaagcatcccagctgcttgtttcactcaccctgagatcagtatggttggcttgacagagccacaggctagggagaaggctgacaaggaaggatttgaaataagtgttgtaaagaccagttttaaggctaacacaaaggccctggcagagaatgaaggagatggacttgctaagatgatttatcgccctgacaccggagaaattcttggagttcatattttgggcttgcatgctgctgatctcatccatgaggcatcaaatgccattgcccttggaacccatgtgcaggacatcaagtttgctgttcatgcacacccaacgttgtctgaagttctggatgaactcttcaaggctgccaaggttaacacagctggttcgcattctatgaatgagccagttgcggtgtagagaggagccatagttgaaacaatctatctgctgcagccccacaccccagttatattgcctttagtacttaactagcctgctactcagaaaactgattttgtagccatttgcggacattttcgttatgagattcaggattagtgccagcactatctatttcatgagaaaatagaaatccaatgatctgtcccatgtatggaaaaatgtaaattttgtagtccttgtagagtaaatgtagtgcctttacgtggcaaaactcgctcttatgaatctatgattacttcaattcataagatgggcttgtttggtcagcattatgaatttttacagcttaggtcagcagctaccgtatctcattctttatttcattcttatttcaatcttcactttgtaaacggtgttatctatagtataaatcctccatttt

SEQ ID NO: 75961 - DNA, 7391 bp, Zea Mays
atgtttaggctacaggatagtttggctctgataccaattgtaagtagagggactctaactctcatcaagaggatgacactatgagttggggcaattttctgtttatttcctcaaacactacacaatgtcatacccttagaggggttggggacacatatttatagccctaggggctgcactaccacaccttctcacacacactacacaacaggattgtcctctagatgctaaagagactacagaggacagtcaaaaagcaggctgtcctctagatgctaaagcgactacagaggacagtcaaaaagcgactgctgtcctctagatgctaaagaggctacagaggacagtcaaaaagcgactgctgtcctctagatgctaaaggactacagaggacagtcaaaagcaggctgtcctctagatgctcaagacttattccatcaccagcgaccactccagtgaaccccctccggctgggagtttctctgacccccaggttggtcgtccgaagtcccagcgatggagtgacgctagcccggattcttctggagattcttgccgggcgccccattcctataaagaagccctgcttgccacccccacgtttccagtggttgcaactccggggacgacagagttacttgctggtgaggagaagacggaggctggctcacgatctaaggtccagagtcggctggggccccagcgtctaggcgaggacggttggcaggtggtgcagcgcagaagtaagtattgcggtgatcatcttcctcgtcgctggtcccaggtggaccttcggggaaaatgctataactgcttttcttccacacatcttgctgtgacctgtcgccggcctactagatgctttaagtgcttcaagcttggacaccaggccgttgtttgcccttccctcccagcagcagcgaagaagaactctgtgtggcagcggctgagtatccagagtgtgagggcttcggtgtggcaacgtttggcagtgcagcagaaccatccgcctctgttggccgcagactcccatagaagaagggcggtgtggaggaggatcactccgttggagcctgcgctgaaggaagacacttcaaggatgtttgctgttggcgactcccaaagaagcctacgcaacaagaagaaaagacgtcgctccaagcggggcaaaggatcgttggggactgatgctggtccaggtgctatgtccccggtttcctctgatactgctgacgcctccaggaaggtccaaaggtcgacgatgaggtctggaggacaaatggagatattcaagaagtccttgccttcttgtgtgttggaattcaccactgagatggcgcgtgaagaggtatttctccgccgtgccctgtacgtaacagttgttggaactaggccggaggtgcttggagttgaagtgttagaagaagttgcacataattttgaggtccatattgaagccatgcggattcatcaagtccagccagaggattttctcctgattttacctgatgaagaaacagcctcaagagtgcttaatgatggcaaggcttatagggggcctcatttcagtttgaagttcaaacgctggtcgaggtttactcatgcatcttcgaaggtcttgtctggcatggtggaggttgagattagaggaatcccagagcacgcttggtttcgttctacggcagaaaacatcttgagagactcctgctggatatcgaacgtgcatcctgatactttgcaaaagaaagattactcaacctttcgggttagtgcttggtgcttcgatcctggaagactacaacgtgatatggaccttctcatcgtcgagcctggattgcatgcgactgagaagagatgcctcacttacaagatcagtgtgagcgctaccctgtcagatctttccacggcggacctggggcctccaccgcccccacctccggcgtacgacaggaggcctgatggtgatggcggcggcggcgaggaccaggacccccagtctcgtcgttcgaacgggtccctgttccagaggcgaccggttcatcttcgcctgggcccgcagccgtcgtcgggttgcggggcgacatccttggcgcctcgggcggcggttcctgcgctgtccctgttcctgcggcgctcggtacatcttcgcctggaccctcagttgtcgttgggacgcggcgctgcatccctgacgcctcgggctgtgcttccaccgctgtcaatgacctcgggtagggaaacagcatatccggatagagatgcgcggccttctttgcgcattgaagagataccggttcccaaggagccccaggaagacggagagactaccgtgacagttatggggggacagatctcctcggggaagataaacagtccccgaattgattgcgacaggactgctggaacgtcgtctgggttaattgggccgcctgagatggcctggaatgactcggtctcgccgcttcggacaactgggccgcttgagacatggctcccaaggcctgtctcgccccagccttgcccgacgctagagatgaggcttccagcgctggtctcgccccactgcctacctgggctcctgaacacgacgatgactggggatgtctcgccccacattcgagatgggaagcttgagatcgtgtcttctgggcatgtctcgccccgacctcgagttgggccgccagagatgaccccagacgatgttttgtcgtttgaagatactgggacattgaagatggccttgcctgcgcctgtctcacctcagcatccgcctgggtcgcttgagacagctgcttccttgcagacagagccaactagtaagctgaaggtctattaccgcaaaggatcgaaagcacgtcaacgtcaatttcacgacggccaacaagatggaacaggaagggagttactggcattggagaatgggcttacaactgatccaagacctgataccctcacagccctgggtgctccgctggttgcgacaagaaaagaagagttcctcaacaaaatttgtagaagacctgacgcttgtttgctgttaccaaataaaaacagcaagaaagcaactcctccctctccaacaacaactgctgctgcgccaagacgaagccggcgagtcgctggagctggagtggaattcagcatgcaagactggggtggcagggccaccaaaaaagctatgaaagccctgcagataattactgaagatgaaggcatcagtcaggaatccctcaaggcttatgcagagcttttcaagcacccactttctcagctccaggtggaggccttgtccgctcttttcgggtggcccacgccaccagcagggcctgtatgaaacctagtttcctccccctgttctttgtggttgtgttatgtagacagtgatccatgaatccaaacaaaattttatcctggaatgtgagaggaatgaactcttcagtgcggcaagactcagtcagagagcttgtggtctcatctcaagtggatgtggtttgtgtccaggaaactaaaatgcagaacatttcaacaagaactatcctctccatgcttggagctgagttcactgattatgtctacctgccatcaacaggggcaagtggtggcatcttgatcacttggaaaagacatataggtcatactgggcagcaaagaatcgacaatcacagtgtttcagtccagttgcgcatggagcaagggcaggcttggtggcttacctgtgtgtacggccctcagggagatgatgaaaaaattctttttcttcaggaactcagagatgtcagaacagcctgtgctggcccttggttggtggctggggattttaatctcatctataaaacatcagataagaataactccaactttaatagagccatgatgggtcgtttcagggatttgatcaatgacctgggcctcaaggagattccgctggtaggacgcaaattcacttggtctaaccaacaagataactcggtccttgttaagcttgatagagtgttttgtactgtggattgggagctaaccttccccagagttcttcttcatagtgttgcgtcacttgattcggatcactgccctctgctcctgggtctcagtgacaataggcctggaaaacggcggttccatttcgaatccttttggcccaagcttgaaggttttcaggaggaagtgcattctgcatggaactcagtcgaagctgtcagatgccctttccagaccctggagaagaagctaaagatgacagcaagaagactgcaagggtggagtgacaagcaggttgggcatgtaaggttgcagttggctttggctaaggagttgctgcatagactggagatggcacatgatgaaagaccacttaccccagcagagatctggcttataaacaggctcaaaaaacaatccttgatgctgtcatctttcaagcgaacaatggcaagattaaggtcaagaatttcatggctcaaagagggggatgcgaacacaagatttttccatattcatgcaaggcatcgtaagaggaagaattttgtggccatgctggttgatggagatcgtatcctaaccaaccactgcgaaaaggcagcagcagtggatcagttttatacaaacctcattgggcagtgtggaaacagggaaaggactattgatttggacgccattggtctgtctagacataatctggagaatctagactcccctttttcagaacaggaggttttggaaaccattaaaggcttgcctttggataaggccccagggccggatggattcacagggcgattctatagagaatgctggggaagtattaaagcagaggttatggctgcagtaagggcagtttggagcaggaatttcaacaatttccacaagctcaacacggcttttattaccttgataccgaaaaaagagggggcagagcaggtcaaagactttaggcctattagtcttgtgcacagttttgcaaaactgatcaccaagattctcgctaaccggctggccaaaaggctcaatgagttggtctctccaattcagagcgcatttataaagggaaggttcatccaagataatttcatgttggtacaacaaactgcaaggctgtttcaccagcagaaattgcctcgcctgctcctgaaacttgatatcactaaggcctttgactcagtggcctggccattcctaattgaagtcatgcagcagattggttttggtcagatctggagggatattgtttgtgggttattggcctcctccactacacaagtgctgctcaatggttccctgggggaacgtttagcccataggagggggctcaggcagggagaccccctctcccccatgctattcatccttgttatggatgttcttggcctcttattcgctaaagctgaagaagcaggtttgctacagcagttatccagaagaaagaagctccacaggttttctatttatgcagatgatgtggctgtgtttttacatcccactgctgcagaaacttctatcactctagacattctgcaactttttggagatgcttctggcctcattaataatgtgcagaaatcaaatgcatatcctattcaatgctcggaggagattttgatggatgttcagagtttgctgccttgtgagatggcaaccttcccctgcaaatatttggggctacccctttccttgcataaactttctcggcagcagttccagccctttgttgaaagaattgcagatcaactccctaattggaaagctgacttaatgtctagagcaggaaggagaattcaggtgcaacatgttctcacaggcatgacagtttatttagcaatggcaattgacatcccccaatggaccttagatgccattgataagataagaaagggttttctttggagaggcacaaaggaagcaaagggaggacactgtttggttgcctggggaaaggtgtgtcgtccccttcaattgggaggcttgggaatctctagtctccctgagctttgttgggctctccgcatgagatggctgtggttgcagaaaacagatatggggaggccttgggcaaatcttccaatacaggtccctaacaaagctagggcttttttctctatggctcttgtttctatgattggggatgggtcaaacaccttgttctggaatgatagatggctgcatggcactcgaatcgctgatattgcccctagcctgcacaagtcaattccaagaagaattgctaacaaaaggacggtgaaagaagctcttgtaaacaggaaatggatttcagatattaagggggctcttacagtaagagtcttggttgattatctaaacctttgggaatccctttcaggaattgagttacagccaaacattagggataagcatgttttcagccttgctgcagatggtaaatacacagcgaaagcagcttataatggtctgtttttaggatctgcctcctttgatcactacaaaagaatctggagatcttgggccccctcaaagtgccgttttttcatgtggttggtggcccacaacagatgttggactgctgatcggttggccaaaaagggcctgaatcacccgcaaaggtgtcttctttgtgatcaggatgatgaaaccatgaaccaccttcttatctcctgcgtcttcacaagaattttctggtatatgctcctaaggaaatttgggttacatgccctggccccacagcctgcccttacatccttcttagagtggtggaaaggggctgctgaggcagtgcagggaatggtcaagaaagggctgaattctctcatcatgttgggtgcctggaagatatggaacctccgcaatagatgtgtgtttgatggagagacccccagcctctctcgaatcctgcagcaggctgaagaggagagaaatctttgggtgctagcaggggccaagggtctctcctttttggctgcccctttgttggtagtctgaattcctaatggatttgttcctttatgtttgtttctggcctccgtaaggagagctattgtattatgtactatgtactatttctcctcttcttaatataattaaaggcgcagttcccctgcgctttcgaggaaaaaaaaagagtaaatgagctccctggtgacagatagatacttgtgttttattgttatatttgagggcaagttgggccctgttattatttcttgtttaaaacatctgagataagaaatgcacagttgcactccacttcggttaaatgacgagcaatttcatatattcaatatgctactccgtctgatcagagatcaactacttttggacgtcgacacagtctacaagattgaaatttgacccgctcacttctatagaattatgatatttataaaaaaaggattgttactttagtagaagtactttctaat

SEQ ID NO: 75962 - DNA, 5054 bp, Zea Mays
atgcggcgcaagcttcccggagacgcgccgctgtcggcggcgagggccggtcatgcttcgtccgcatccgcgccgtccgaggcggacctggctcagctctccgcggccatcgcagccggggaggacctgggccccttcgtgcgccgggccttcgcgtgcggccgccccgagccgctgctcgcctcgctccgcggcgcggcgcgggaccgagaggccgagatcgaggagctctgccgcgcacacttccacgatttcatccgcgccgtcgacgaccttcggtccctcctggccgacgccgatgcgctcaagggctccctctcggcgtcccactccgtgcttctctcctcggcggccccgctgctcgcctcgcttgagtccttcctcgctgcgcgcttgctcgcggggaacctctcctccgcgctagcctcctcccgacggtgcgtacggctgctcgcgctcgcggcgcgggcgaacgcgcacctccaggccggcaaccatgggctctacctcgccctgcgcgccgtcgacgccatcgaccgtgatctcgcctcgggatccgagctgctgccgctacccgcgctccgccgcatgcttctcagcgtcgtccctgcggtgcgcgcgcatgccgagcgcgagatctccagggagttttccgactggatggttagcatccgcgctgcttcgaggcacctcggtcaggtggccatcggccgctcggctgccgccaggcagcgccaggaggagctccgctccaagcaccgcccgctggagggctgcatcaccttggatgacgatggagttggtgacctcgatgattttgcggcagccgcggcaactgctgacgcggcagatggtgctgctgcagcctcttttgaccttacgccgctctatcgagcgatgcatatacaccagacgctggcgctgggtgagcggttcaagaagtactacctggaaaacaggaagctgcagctgacatcggacttcgatgtcattgcggcgacgccattcctagagtcccaccagatgtagatgcactttgggatgctgctgtggggaagatggtctctgtgatggaagacaacttctccaggatgcagacagcaaatcacttgcttctcatcactgattatgctgctttgctttcggccacaatgcggcggtacggttatccagtaggaatgctgctcgatgtgctggctaagcacagagacaagtaccatgatttgctgcttgcagattgccgtaggcaggtggcagaggcactggctgcagataagtttgatcagatgctcatgagaaaggagtatgaatactcaatgaatgtccttgcatttggaattcagagctcagacatcaccccagctttcccatacgttgcaccgttctcctgcactgtcccagatatttgccgtattgttcgctcattcattgaagattctgtgagcttcatggcacaagggggtggtggggatacttatgcagcagtgaagaagtaccttggccgtatcctttctgaggtggtggatgcttccattcaaaaacttgttgattcaggcagtggtctaagtgtgtcccaggcaatgcaggtcgctgctaacatgtctgtgatggagcgggcatgtgagttcttcacacgccatgctgcacaactgtgtggtgtgccactgcgtgctgtggaccgtggtcggcgggacttcccacttcgcaggtcacgtgatgctgcggaggcgctcctgctgcggctcctatgtgctaaggttgatgagttcatgcggcaatctgatggtgttaactggatggctgatgacgctcctcctggcggcaatgagtatgccaacgaggtcatcatctaccttgagacgctcacatcaactgcacagcagatccttccccttcccgtgctccgccgtgtacttgtggcagtgcttgcccacatctctgaaaggatcattgagctcttcttgaacgattcagtgaagcggttcaatgccaatgcggtcactggaatagatactgatctcaaaatgtttgagacgtttgcagagggcatgtctagcctgttcgtggactcaggtcaagaatctgcaaaaaatgaaatgaaggctgcacttgtggaagcaaggcagctagtgaatcttcttatgagcaatagtccagagactttcctaaatccagtgattcgtgaaaagagctataacaagctagattatagaaaggttgcaatcatctcagaaaagtttagagatacctcagagagttatttctcaacattcggaacaaggggtgccaggcagaacccaaagaagaaatctctggataccctgatcaagaggctcagagaagccagttagatatcctccctgctgtaagattatatacatgcaactggcttctcacatcctgattttttcatgaaagtctgtatcttgtttgtgttatgcctgtttcttgttaatcttgtgctgtaactttgctgttgttagattctatgtttcaaatgtgtggatatcttcctgttgattctattgccatttactatatgatcgagaatctcataatggttaatttttcctgtgaggagaaagtgcttgataagctcactattttatatttttcttcagaagatagggatgcttttatttcctccctccagttccatgcacttggtgacaagcgacttgatgttatatatttgaaagttataaaggtaaactttggtaagagatcaacaaattcttgtagctttatactgctaggaagtgattacttcataagtagcaacacattagtatttgtagcaagttagtgaaggctgtgcaggcacacctaggtgatctaagtttagtctttgtcatagcatgtctagtttttctgtaagtccgtaatataaagcttcctttctcctgagttggtttatttattttaaaagtagttatgaattgtttattatattagaagatacagatttccatttgttgctttgacacaacactactcatattgatttgaacttcaaggttgactgacaaattattggactgtgggaaccatacaaatgacatgaaatgtctcttcaatcctttagctcactgttggctatcttttaaaaattctgaaaaataatgtacaaacctaatttaaatggagtaaaatgtttgttgagttttgagtacagttgcacatgtatatcaacttcgtccaaattatgcctcacattgattgtcatcccttttttggttgcatttaggggctttggagttcaatttacctcgctgtttaggtatattgaaattggatgatgactaacagggtagatgattgtttggagctgcagaacctcagtcatttttccttaccaattcagaaatagcgaatctttaaatcaacagaggattttcctaccaatatagagaaaccagatccataaagaatatggtatcctctttttatacttgttttgtatcatatttgtagtactttttatataactttggccaaacttaaatcgtttgactcctcgaaaagtgacaatcgctcttttttgtggatggagagagtaataattgataacttgttgtatataaattttaaaattcaagttccaaactagggcaagtgtatggtgaacatttttttcattacttatgttttaataatttgtgcattttttatccatgtatagcagtaaaagttatgttgccattgccaagcttgaggcatttaatttaccttctgtttctgccctatgggcttatgactttccacaatactgccacacatagtcttttatactgtcttgcactgtctttttctgcaccactaaaatagttccaccagccatgtgaagccttagaaggctaatccagacagttagtcataggtttttgcaaatttgtttgggggaaacagacaaccatatctctatactgcaagctttgctaatttagacagctttgatccatttctttactatatgtgtatggctactttgtgtagcttactggttagtgttactgtctgtgtgtggctactttgtacagcttactggccagtgtcctatggtctattagagctgaaataacttcttgcaatcactggttgaatcttggttgttacggtagtaactaaggccactttggatgagtcatttacctgaaccctttatgtgtaactaatttaagtcatccgaatatgtcaattggcctataacagtgaaatatgttataagttgttctttagaattactcccattactgttttgtggtttcccttcaactcaactcattttgcaattattgtacaatgctatcaattcatctgcagcttttgcataagcatacctccataagctttgtgagctgtgttcatgtccaaaaggactcgcaaagagaacagggactacaagttggtattgtcattcggtgaaaatatggtcattgcacaaaagcgtcccatctgcgcacataattttcaactgtgatcatggcacaaaaagaaaatgttcaagcctgtgcacatttattcatgttggaagtgtgatgatcagctcatttgttacaaataagatgaagtttaaccatttagttctgcaattcatcgcctttgtagtggcaagaattgttgatttatctttaaatcaggattgttgattttcatctatgttcatgggatgggtgcagttttgacttctaaacgattaaacaaaatttaaacgtagttttaaataacataggaaaaataccgatatatcatgatttcagataataacataaagctaagtaccaaaatagagaggttagtggcttactaaaacttcactagtaagctggctaacttcacccatgagccggattggatcccaaaagtaactaatagactgtgcctaaaagtaactaatggtttaaaacgcatgaaacaccatgttttacagtttagaacgctaaaactgtgttttgcagtttagaacgtcaaaacgcagtttcaaccctaattagagttttgacgtttaaatgtagttttaataacactgaaactattactaatgtttggttgtg

SEQ ID NO: 75963 - DNA, 3992 bp, Zea Mays
atgcggcgcaagcttcccggagacgcgccgctgtcggcggcgagggccggtcatgcttcgtccgcatccgcgccgtccgaggcggacctggctcagctctccgcggccatcgcagccggggaggacctgggccccttcgtgcgccgggccttcgcgtgcggccgccccgagccgctgctcgcctcgctccgcggcgcggcgcgggaccgagaggccgagatcgaggagctctgccgcgcacacttccacgatttcatccgcgccgtcgacgaccttcggtccctcctggccgacgccgatgcgctcaagggctccctctcggcgtcccactccgtgcttctctcctcggcggccccgctgctcgcctcgcttgagtccttcctcgctgcgcgcttgctcgcggggaacctctcctccgcgctagcctcctcccgacggtgcgtacggctgctcgcgctcgcggcgcgggcgaacgcgcacctccaggccggcaaccatgggctctacctcgccctgcgcgccgtcgacgccatcgaccgtgatctcgcctcgggatccgagctgctgccgctacccgcgctccgccgcatgcttctcagcgtcgtccctgcggtgcgcgcgcatgccgagcgcgagatctccagggagttttccgactggatggttagcatccgcgctgcttcgaggcacctcggtcaggtggccatcggccgctcggctgccgccaggcagcgccaggaggagctccgctccaagcaccgcccgctggagggctgcatcaccttggatgacgatggagttggtgacctcgatgattttgcggcagccgcggcaactgctgacgcggcagatggtgctgctgcagcctcttttgaccttacgccgctctatcgagcgatgcatatacaccagacgctggcgctgggtgagcggttcaagaagtactacctggaaaacaggaagctgcagctgacatcggacttcgatgtcattgcggcgacgccattcctagagtcccaccaggtgtttttctcgcagattgctgggttttttattgttgaggaccgggtgtttagaacagggggtgggcttacatctcggccagatgtagatgcactttgggatgctgctgtggggaagatggtctctgtgatggaagacaacttctccaggatgcagacagcaaatcacttgcttctcatcactgattatgctgctttgctttcggccacaatgcggcggtacggttatccagtaggaatgctgctcgatgtgctggctaagcacagagacaagtaccatgatttgctgcttgcagattgccgtaggcaggtggcagaggcactggctgcagataagtttgatcagatgctcatgagaaaggagtatgaatactcaatgaatgtccttgcatttggaattcagagctcagacatcaccccagctttcccatacgttgcaccgttctcctgcactgtcccagatatttgccgtattgttcgctcattcattgaagattctgtgagcttcatggcacaagggggtggtggggatacttatgcagcagtgaagaagtaccttggccgtatcctttctgaggtggtggatgcttccattcaaaaacttgttgattcaggcagtggtctaagtgtgtcccaggcaatgcaggtcgctgctaacatgtctgtgatggagcgggcatgtgagttcttcacacgccatgctgcacaactgtgtggtgtgccactgcgtgctgtggaccgtggtcggcgggacttcccacttcgcaggtcacgtgatgctgcggaggcgctcctgctgcggctcctatgtgctaaggttgatgagttcatgcggcaatctgatggtgttaactggatggctgatgacgctcctcctggcggcaatgagtatgccaacgaggtcatcatctaccttgagacgctcacatcaactgcacagcagatccttccccttcccgtgctccgccgtgtacttgtggcagtgcttgcccacatctctgaaaggatcattgagctcttcttgaacgattcagtgaagcggttcaatgccaatgcggtcactggaatagatactgatctcaaaatgtttgagacgtttgcagagggcatgtctagcctgttcgtggactcaggtcaagaatctgcaaaaaatgaaatgaaggctgcacttgtggaagcaaggcagctagtgaatcttcttatgagcaatagtccagagactttcctaaatccagtgattcgtgaaaagagctataacaagctagattatagaaaggttgcaatcatctcagaaaagtttagagatacctcagagagttatttctcaacattcggaacaaggggtgccaggcagaacccaaagaagaaatctctggataccctgatcaagaggctcagagaagccagttagatatcctccctgctaagatagggatgcttttatttcctccctccagttccatgcacttggtgacaagcgacttgatgttatatatttgaaagttataaaggtaaactttggtaagagatcaacaaattcttgtagctttatactgctaggaagtgattacttcataagtagcaacacattagtatttgtagcaagttagtgaaggctgtgcaggcacacctaggtgatctaagtttagtctttgtcatagcatgtctagtttttctgtaagtccgtaatataaagcttcctttctcctgagttggtttatttattttaaaagtagttatgaattgtttattatattagaagatacagatttccatttgttgctttgacacaacactactcatattgatttgaacttcaaggttgactgacaaattattggactgtgggaaccatacaaatgacatgaaatgtctcttcaatcctttagctcactgttggctatcttttaaaaattctgaaaaataatgtacaaacctaatttaaatggagtaaaatgtttgttgagttttgagtacagttgcacatgtatatcaacttcgtccaaattatgcctcacattgattgtcatcccttttttggttgcatttaggggctttggagttcaatttacctcgctgtttaggtatattgaaattggatgatgactaacagggtagatgattgtttggagctgcagaacctcagtcatttttccttaccaattcagaaatagcgaatctttaaatcaacagaggattttcctaccaatatagagaaaccagatccataaagaatatgcttttgcataagcatacctccataagctttgtgagctgtgttcatgtccaaaaggactcgcaaagagaacagggactacaagttggtattgtcattcggtgaaaatatggtcattgcacaaaagcgtcccatctgcgcacataattttcaactgtgatcatggcacaaaaagaaaatgttcaagcctgtgcacatttattcatgttggaagtgtgatgatcagctcatttgttacaaataagatgaagtttaaccatttagttctgcaattcatcgcctttgtagtggcaagaattgttgatttatctttaaatcaggattgttgattttcatctatgttcatgggatgggtgcagttttgacttctaaacgattaaacaaaatttaaacgtagttttaaataacataggaaaaataccgatatatcatgatttcagataataacataaagctaagtaccaaaatagagaggttagtggcttactaaaacttcactagtaagctggctaacttcacccatgagccggattggatcccaaaagtaactaatagactgtgcctaaaagtaactaatggtttaaaacgcatgaaacaccatgttttacagtttagaacgctaaaactgtgttttgcagtttagaacgtcaaaacgcagtttcaaccctaattagagttttgacgtttaaatgtagttttaataacactgaaactattactaatgtttggttgtg

SEQ ID NO: 75964 - DNA, 3736 bp, Zea Mays
ccacccctaccgcctgcctcagatctcgatgcggcgcaagcttcccggagacgcgccgctgtcggcggcgagggccggtcatgcttcgtccgcatccgcgccgtccgaggcggacctggctcagctctccgcggccatcgcagccggggaggacctgggccccttcgtgcgccgggccttcgcgtgcggccgccccgagccgctgctcgcctcgctccgcggcgcggcgcgggaccgagaggccgagatcgaggagctctgccgcgcacacttccacgatttcatccgcgccgtcgacgaccttcggtccctcctggccgacgccgatgcgctcaagggctccctctcggcgtcccactccgtgcttctctcctcggcggccccgctgctcgcctcgcttgagtccttcctcgctgcgcgcttgctcgcggggaacctctcctccgcgctagcctcctcccgacggtgcgtacggctgctcgcgctcgcggcgcgggcgaacgcgcacctccaggccggcaaccatgggctctacctcgccctgcgcgccgtcgacgccatcgaccgtgatctcgcctcgggatccgagctgctgccgctacccgcgctccgccgcatgcttctcagcgtcgtccctgcggtgcgcgcgcatgccgagcgcgagatctccagggagttttccgactggatggttagcatccgcgctgcttcgaggcacctcggtcaggtggccatcggccgctcggctgccgccaggcagcgccaggaggagctccgctccaagcaccgcccgctggagggctgcatcaccttggatgacgatggagttggtgacctcgatgattttgcggcagccgcggcaactgctgacgcggcagatggtgctgctgcagcctcttttgaccttacgccgctctatcgagcgatgcatatacaccagacgctggcgctgggtgagcggttcaagaagtactacctggaaaacaggaagctgcagctgacatcggacttcgatgtcattgcggcgacgccattcctagagtcccaccaggtgtttttctcgcagattgctgggttttttattgttgaggaccgggtgtttagaacagggggtgggcttacatctcggccagatgtagatgcactttgggatgctgctgtggggaagatggtctctgtgatggaagacaacttctccaggatgcagacagcaaatcacttgcttctcatcactgattatgctgctttgctttcggccacaatgcggcggtacggttatccagtaggaatgctgctcgatgtgctggctaagcacagagacaagtaccatgatttgctgcttgcagattgccgtaggcaggtggcagaggcactggctgcagataagtttgatcagatgctcatgagaaaggagtatgaatactcaatgaatgtccttgcatttggaattcagagctcagacatcaccccagctttcccatacgttgcaccgttctcctgcactgtcccagatatttgccgtattgttcgctcattcattgaagattctgtgagcttcatggcacaagggggtggtggggatacttatgcagcagtgaagaagtaccttggccgtatcctttctgaggtggtggatgcttccattcaaaaacttgttgattcaggcagtggtctaagtgtgtcccaggcaatgcaggtcgctgctaacatgtctgtgatggagcgggcatgtgagttcttcacacgccatgctgcacaactgtgtggtgtgccactgcgtgctgtggaccgtggtcggcgggacttcccacttcgcaggtcacgtgatgctgcggaggcgctcctgctgcggctcctatgtgctaaggttgatgagttcatgcggcaatctgatggtgttaactggatggctgatgacgctcctcctggcggcaatgagtatgccaacgaggtcatcatctaccttgagacgctcacatcaactgcacagcagatccttccccttcccgtgctccgccgtgtacttgtggcagtgcttgcccacatctctgaaaggatcattgagctcttcttgaacgattcagtgaagcggttcaatgccaatgcggtcactggaatagatactgatctcaaaatgtttgagacgtttgcagagggcatgtctagcctgttcgtggactcaggtcaagaatctgcaaaaaatgaaatgaaggctgcacttgtggaagcaaggcagctagtgaatcttcttatgagcaatagtccagagactttcctaaatccagtgattcgtgaaaagagctataacaagctagattatagaaaggttgcaatcatctcagaaaagtttagagatacctcagagagttatttctcaacattcggaacaaggggtgccaggcagaacccaaagaagaaatctctggataccctgatcaagaggctcagagaagccagttagatatcctccctgctgtaagattatatacatgcaactggcttctcacatcctgattttttcatgaaagtctgtatcttgtttgtgttatgcctgtttcttgttaatcttgtgctgtaactttgctgttgttagattctatgtttcaaatgtgtggatatcttcctgttgattctattgccatttactatatgatcgagaatctcataatggttaatttttcctgtgaggagaaagtgcttgataagctcactattttatatttttcttcagaagatagggatgcttttatttcctccctccagttccatgcacttggtgacaagcgacttgatgttatatatttgaaagttataaaggggctttggagttcaatttacctcgctgtttaggtatattgaaattggatgatgactaacagggtagatgattgtttggagctgcagaacctcagtcatttttccttaccaattcagaaatagcgaatctttaaatcaacagaggattttcctaccaatatagagaaaccagatccataaagaatatgcttttgcataagcatacctccataagctttgtgagctgtgttcatgtccaaaaggactcgcaaagagaacagggactacaagttggtattgtcattcggtgaaaatatggtcattgcacaaaagcgtcccatctgcgcacataattttcaactgtgatcatggcacaaaaagaaaatgttcaagcctgtgcacatttattcatgttggaagtgtgatgatcagctcatttgttacaaataagatgaagtttaaccatttagttctgcaattcatcgcctttgtagtggcaagaattgttgatttatctttaaatcaggattgttgattttcatctatgttcatgggatgggtgcagttttgacttctaaacgattaaacaaaatttaaacgtagttttaaataacataggaaaaataccgatatatcatgatttcagataataacataaagctaagtaccaaaatagagaggttagtggcttactaaaacttcactagtaagctggctaacttcacccatgagccggattggatcccaaaagtaactaatagactgtgcctaaaagtaactaatggtttaaaacgcatgaaacaccatgttttacagtttagaacgctaaaactgtgttttgcagtttagaacgtcaaaacgcagtttcaaccctaattagagttttgacgtttaaatgtagttttaataacactgaaactattactaatgtttggttgtg

SEQ ID NO: 75965 - DNA, 3525 bp, Zea Mays
cctcttcacaactcggcaactgctgactgccccgcactcatttgctctccacccctaccgcctgcctcagatctcgatgcggcgcaagcttcccggagacgcgccgctgtcggcggcgagggccggtcatgcttcgtccgcatccgcgccgtccgaggcggacctggctcagctctccgcggccatcgcagccggggaggacctgggccccttcgtgcgccgggccttcgcgtgcggccgccccgagccgctgctcgcctcgctccgcggcgcggcgcgggaccgagaggccgagatcgaggagctctgccgcgcacacttccacgatttcatccgcgccgtcgacgaccttcggtccctcctggccgacgccgatgcgctcaagggctccctctcggcgtcccactccgtgcttctctcctcggcggccccgctgctcgcctcgcttgagtccttcctcgctgcgcgcttgctcgcggggaacctctcctccgcgctagcctcctcccgacggtgcgtacggctgctcgcgctcgcggcgcgggcgaacgcgcacctccaggccggcaaccatgggctctacctcgccctgcgcgccgtcgacgccatcgaccgtgatctcgcctcgggatccgagctgctgccgctacccgcgctccgccgcatgcttctcagcgtcgtccctgcggtgcgcgcgcatgccgagcgcgagatctccagggagttttccgactggatggttagcatccgcgctgcttcgaggcacctcggtcaggtggccatcggccgctcggctgccgccaggcagcgccaggaggagctccgctccaagcaccgcccgctggagggctgcatcaccttggatgacgatggagttggtgacctcgatgattttgcggcagccgcggcaactgctgacgcggcagatggtgctgctgcagcctcttttgaccttacgccgctctatcgagcgatgcatatacaccagacgctggcgctgggtgagcggttcaagaagtactacctggaaaacaggaagctgcagctgacatcggacttcgatgtcattgcggcgacgccattcctagagtcccaccaggtgtttttctcgcagattgctgggttttttattgttgaggaccgggtgtttagaacagggggtgggcttacatctcggccagatgtagatgcactttgggatgctgctgtggggaagatggtctctgtgatggaagacaacttctccaggatgcagacagcaaatcacttgcttctcatcactgattatgctgctttgctttcggccacaatgcggcggtacggttatccagtaggaatgctgctcgatgtgctggctaagcacagagacaagtaccatgatttgctgcttgcagattgccgtaggcaggtggcagaggcactggctgcagataagtttgatcagatgctcatgagaaaggagtatgaatactcaatgaatgtccttgcatttggaattcagagctcagacatcaccccagctttcccatacgttgcaccgttctcctgcactgtcccagatatttgccgtattgttcgctcattcattgaagattctgtgagcttcatggcacaagggggtggtggggatacttatgcagcagtgaagaagtaccttggccgtatcctttctgaggtggtggatgcttccattcaaaaacttgttgattcaggcagtggtctaagtgtgtcccaggcaatgcaggtcgctgctaacatgtctgtgatggagcgggcatgtgagttcttcacacgccatgctgcacaactgtgtggtgtgccactgcgtgctgtggaccgtggtcggcgggacttcccacttcgcaggtcacgtgatgctgcggaggcgctcctgctgcggctcctatgtgctaaggttgatgagttcatgcggcaatctgatggtgttaactggatggctgatgacgctcctcctggcggcaatgagtatgccaacgaggtcatcatctaccttgagacgctcacatcaactgcacagcagatccttccccttcccgtgctccgccgtgtacttgtggcagtgcttgcccacatctctgaaaggatcattgagctcttcttgaacgattcagtgaagcggttcaatgccaatgcggtcactggaatagatactgatctcaaaatgtttgagacgtttgcagagggcatgtctagcctgttcgtggactcaggtcaagaatctgcaaaaaatgaaatgaaggctgcacttgtggaagcaaggcagctagtgaatcttcttatgagcaatagtccagagactttcctaaatccagtgattcgtgaaaagagctataacaagctagattatagaaaggttgcaatcatctcagaaaagtttagagatacctcagagagttatttctcaacattcggaacaaggggtgccaggcagaacccaaagaagaaatctctggataccctgatcaagaggctcagagaagccagttagatatcctccctgctatagggatgcttttatttcctccctccagttccatgcacttggtgacaagcgacttgatgttatatatttgaaagttataaaggggctttggagttcaatttacctcgctgtttaggtatattgaaattggatgatgactaacagggtagatgattgtttggagctgcagaacctcagtcatttttccttaccaattcagaaatagcgaatctttaaatcaacagaggattttcctaccaatatagagaaaccagatccataaagaatatgcttttgcataagcatacctccataagctttgtgagctgtgttcatgtccaaaaggactcgcaaagagaacagggactacaagttggtattgtcattcggtgaaaatatggtcattgcacaaaagcgtcccatctgcgcacataattttcaactgtgatcatggcacaaaaagaaaatgttcaagcctgtgcacatttattcatgttggaagtgtgatgatcagctcatttgttacaaataagatgaagtttaaccatttagttctgcaattcatcgcctttgtagtggcaagaattgttgatttatctttaaatcaggattgttgattttcatctatgttcatgggatgggtgcagttttgacttctaaacgattaaacaaaatttaaacgtagttttaaataacataggaaaaataccgatatatcatgatttcagataataacataaagctaagtaccaaaatagagaggttagtggcttactaaaacttcactagtaagctggctaacttcacccatgagccggattggatcccaaaagtaactaatagactgtgcctaaaagtaactaatggtttaaaacgcatgaaacaccatgttttacagtttagaacgctaaaactgtgttttgcagtttagaacgtcaaaacgcagtttcaaccctaattagagttttgacgtttaaatgtagttttaataacactgaaactattactaatgtttggttgtg

SEQ ID NO: 75966 - DNA, 3573 bp, Zea Mays
gttcgtttcgtcgactaatctccaaacatttttttcctcttcacaactcggcaactgctgactgccccgcactcatttgctctccacccctaccgcctgcctcagatctcgatgcggcgcaagcttcccggagacgcgccgctgtcggcggcgagggccggtcatgcttcgtccgcatccgcgccgtccgaggcggacctggctcagctctccgcggccatcgcagccggggaggacctgggccccttcgtgcgccgggccttcgcgtgcggccgccccgagccgctgctcgcctcgctccgcggcgcggcgcgggaccgagaggccgagatcgaggagctctgccgcgcacacttccacgatttcatccgcgccgtcgacgaccttcggtccctcctggccgacgccgatgcgctcaagggctccctctcggcgtcccactccgtgcttctctcctcggcggccccgctgctcgcctcgcttgagtccttcctcgctgcgcgcttgctcgcggggaacctctcctccgcgctagcctcctcccgacggtgcgtacggctgctcgcgctcgcggcgcgggcgaacgcgcacctccaggccggcaaccatgggctctacctcgccctgcgcgccgtcgacgccatcgaccgtgatctcgcctcgggatccgagctgctgccgctacccgcgctccgccgcatgcttctcagcgtcgtccctgcggtgcgcgcgcatgccgagcgcgagatctccagggagttttccgactggatggttagcatccgcgctgcttcgaggcacctcggtcaggtggccatcggccgctcggctgccgccaggcagcgccaggaggagctccgctccaagcaccgcccgctggagggctgcatcaccttggatgacgatggagttggtgacctcgatgattttgcggcagccgcggcaactgctgacgcggcagatggtgctgctgcagcctcttttgaccttacgccgctctatcgagcgatgcatatacaccagacgctggcgctgggtgagcggttcaagaagtactacctggaaaacaggaagctgcagctgacatcggacttcgatgtcattgcggcgacgccattcctagagtcccaccaggtgtttttctcgcagattgctgggttttttattgttgaggaccgggtgtttagaacagggggtgggcttacatctcggccagatgtagatgcactttgggatgctgctgtggggaagatggtctctgtgatggaagacaacttctccaggatgcagacagcaaatcacttgcttctcatcactgattatgctgctttgctttcggccacaatgcggcggtacggttatccagtaggaatgctgctcgatgtgctggctaagcacagagacaagtaccatgatttgctgcttgcagattgccgtaggcaggtggcagaggcactggctgcagataagtttgatcagatgctcatgagaaaggagtatgaatactcaatgaatgtccttgcatttggaattcagagctcagacatcaccccagctttcccatacgttgcaccgttctcctgcactgtcccagatatttgccgtattgttcgctcattcattgaagattctgtgagcttcatggcacaagggggtggtggggatacttatgcagcagtgaagaagtaccttggccgtatcctttctgaggtggtggatgcttccattcaaaaacttgttgattcaggcagtggtctaagtgtgtcccaggcaatgcaggtcgctgctaacatgtctgtgatggagcgggcatgtgagttcttcacacgccatgctgcacaactgtgtggtgtgccactgcgtgctgtggaccgtggtcggcgggacttcccacttcgcaggtcacgtgatgctgcggaggcgctcctgctgcggctcctatgtgctaaggttgatgagttcatgcggcaatctgatggtgttaactggatggctgatgacgctcctcctggcggcaatgagtatgccaacgaggtcatcatctaccttgagacgctcacatcaactgcacagcagatccttccccttcccgtgctccgccgtgtacttgtggcagtgcttgcccacatctctgaaaggatcattgagctcttcttgaacgattcagtgaagcggttcaatgccaatgcggtcactggaatagatactgatctcaaaatgtttgagacgtttgcagagggcatgtctagcctgttcgtggactcaggtcaagaatctgcaaaaaatgaaatgaaggctgcacttgtggaagcaaggcagctagtgaatcttcttatgagcaatagtccagagactttcctaaatccagtgattcgtgaaaagagctataacaagctagattatagaaaggttgcaatcatctcagaaaagtttagagatacctcagagagttatttctcaacattcggaacaaggggtgccaggcagaacccaaagaagaaatctctggataccctgatcaagaggctcagagaagccagttagatatcctccctgctaagatagggatgcttttatttcctccctccagttccatgcacttggtgacaagcgacttgatgttatatatttgaaagttataaaggtaaactttggggctttggagttcaatttacctcgctgtttaggtatattgaaattggatgatgactaacagggtagatgattgtttggagctgcagaacctcagtcatttttccttaccaattcagaaatagcgaatctttaaatcaacagaggattttcctaccaatatagagaaaccagatccataaagaatatgcttttgcataagcatacctccataagctttgtgagctgtgttcatgtccaaaaggactcgcaaagagaacagggactacaagttggtattgtcattcggtgaaaatatggtcattgcacaaaagcgtcccatctgcgcacataattttcaactgtgatcatggcacaaaaagaaaatgttcaagcctgtgcacatttattcatgttggaagtgtgatgatcagctcatttgttacaaataagatgaagtttaaccatttagttctgcaattcatcgcctttgtagtggcaagaattgttgatttatctttaaatcaggattgttgattttcatctatgttcatgggatgggtgcagttttgacttctaaacgattaaacaaaatttaaacgtagttttaaataacataggaaaaataccgatatatcatgatttcagataataacataaagctaagtaccaaaatagagaggttagtggcttactaaaacttcactagtaagctggctaacttcacccatgagccggattggatcccaaaagtaactaatagactgtgcctaaaagtaactaatggtttaaaacgcatgaaacaccatgttttacagtttagaacgctaaaactgtgttttgcagtttagaacgtcaaaacgcagtttcaaccctaattagagttttgacgtttaaatgtagttttaataacactgaaactattactaatgtttggttgtg

SEQ ID NO: 75967 - DNA, 3634 bp, Zea Mays
caacactcacagacgtgcaggccccactccggccacccaacccaccttctccgaccgccccgttccttccggttcgtttcgtcgactaatctccaaacatttttttcctcttcacaactcggcaactgctgactgccccgcactcatttgctctccacccctaccgcctgcctcagatctcgatgcggcgcaagcttcccggagacgcgccgctgtcggcggcgagggccggtcatgcttcgtccgcatccgcgccgtccgaggcggacctggctcagctctccgcggccatcgcagccggggaggacctgggccccttcgtgcgccgggccttcgcgtgcggccgccccgagccgctgctcgcctcgctccgcggcgcggcgcgggaccgagaggccgagatcgaggagctctgccgcgcacacttccacgatttcatccgcgccgtcgacgaccttcggtccctcctggccgacgccgatgcgctcaagggctccctctcggcgtcccactccgtgcttctctcctcggcggccccgctgctcgcctcgcttgagtccttcctcgctgcgcgcttgctcgcggggaacctctcctccgcgctagcctcctcccgacggtgcgtacggctgctcgcgctcgcggcgcgggcgaacgcgcacctccaggccggcaaccatgggctctacctcgccctgcgcgccgtcgacgccatcgaccgtgatctcgcctcgggatccgagctgctgccgctacccgcgctccgccgcatgcttctcagcgtcgtccctgcggtgcgcgcgcatgccgagcgcgagatctccagggagttttccgactggatggttagcatccgcgctgcttcgaggcacctcggtcaggtggccatcggccgctcggctgccgccaggcagcgccaggaggagctccgctccaagcaccgcccgctggagggctgcatcaccttggatgacgatggagttggtgacctcgatgattttgcggcagccgcggcaactgctgacgcggcagatggtgctgctgcagcctcttttgaccttacgccgctctatcgagcgatgcatatacaccagacgctggcgctgggtgagcggttcaagaagtactacctggaaaacaggaagctgcagctgacatcggacttcgatgtcattgcggcgacgccattcctagagtcccaccaggtgtttttctcgcagattgctgggttttttattgttgaggaccgggtgtttagaacagggggtgggcttacatctcggccagatgtagatgcactttgggatgctgctgtggggaagatggtctctgtgatggaagacaacttctccaggatgcagacagcaaatcacttgcttctcatcactgattatgctgctttgctttcggccacaatgcggcggtacggttatccagtaggaatgctgctcgatgtgctggctaagcacagagacaagtaccatgatttgctgcttgcagattgccgtaggcaggtggcagaggcactggctgcagataagtttgatcagatgctcatgagaaaggagtatgaatactcaatgaatgtccttgcatttggaattcagagctcagacatcaccccagctttcccatacgttgcaccgttctcctgcactgtcccagatatttgccgtattgttcgctcattcattgaagattctgtgagcttcatggcacaagggggtggtggggatacttatgcagcagtgaagaagtaccttggccgtatcctttctgaggtggtggatgcttccattcaaaaacttgttgattcaggcagtggtctaagtgtgtcccaggcaatgcaggtcgctgctaacatgtctgtgatggagcgggcatgtgagttcttcacacgccatgctgcacaactgtgtggtgtgccactgcgtgctgtggaccgtggtcggcgggacttcccacttcgcaggtcacgtgatgctgcggaggcgctcctgctgcggctcctatgtgctaaggttgatgagttcatgcggcaatctgatggtgttaactggatggctgatgacgctcctcctggcggcaatgagtatgccaacgaggtcatcatctaccttgagacgctcacatcaactgcacagcagatccttccccttcccgtgctccgccgtgtacttgtggcagtgcttgcccacatctctgaaaggatcattgagctcttcttgaacgattcagtgaagcggttcaatgccaatgcggtcactggaatagatactgatctcaaaatgtttgagacgtttgcagagggcatgtctagcctgttcgtggactcaggtcaagaatctgcaaaaaatgaaatgaaggctgcacttgtggaagcaaggcagctagtgaatcttcttatgagcaatagtccagagactttcctaaatccagtgattcgtgaaaagagctataacaagctagattatagaaaggttgcaatcatctcagaaaagtttagagatacctcagagagttatttctcaacattcggaacaaggggtgccaggcagaacccaaagaagaaatctctggataccctgatcaagaggctcagagaagccagttagatatcctccctgctaagatagggatgcttttatttcctccctccagttccatgcacttggtgacaagcgacttgatgttatatatttgaaagttataaaggggctttggagttcaatttacctcgctgtttaggtatattgaaattggatgatgactaacagggtagatgattgtttggagctgcagaacctcagtcatttttccttaccaattcagaaatagcgaatctttaaatcaacagaggattttcctaccaatatagagaaaccagatccataaagaatatgcttttgcataagcatacctccataagctttgtgagctgtgttcatgtccaaaaggactcgcaaagagaacagggactacaagttggtattgtcattcggtgaaaatatggtcattgcacaaaagcgtcccatctgcgcacataattttcaactgtgatcatggcacaaaaagaaaatgttcaagcctgtgcacatttattcatgttggaagtgtgatgatcagctcatttgttacaaataagatgaagtttaaccatttagttctgcaattcatcgcctttgtagtggcaagaattgttgatttatctttaaatcaggattgttgattttcatctatgttcatgggatgggtgcagttttgacttctaaacgattaaacaaaatttaaacgtagttttaaataacataggaaaaataccgatatatcatgatttcagataataacataaagctaagtaccaaaatagagaggttagtggcttactaaaacttcactagtaagctggctaacttcacccatgagccggattggatcccaaaagtaactaatagactgtgcctaaaagtaactaatggtttaaaacgcatgaaacaccatgttttacagtttagaacgctaaaactgtgttttgcagtttagaacgtcaaaacgcagtttcaaccctaattagagttttgacgtttaaatgtagttttaataacactgaaactattactaatgtttggttgtg

SEQ ID NO: 75968 - DNA, 1992 bp, Zea Mays
aaaaattaaaacaaaccacattctctattctctcatcgaaagaccgccctctcgctctcgctctccaccgccgctagggtttccaccgcccccggcgatgggcgccctcactgacagccggaagcgtctctcggcggaccgctgcctctcggccgaccatcgcctcccctatccctcgttccccccaccgccccttacccctccctccaagcggaccaagctcgccacattccctgaactcgatccctccacctccgccgtcccgcctatccgtccttctccccaaatcatccactccgccgccgcggcatccgcctccttcacgccgggcccttcctcctcttccaccatcgcttccaccccgcttccgcacaggcgccgactcccgccgccgccgccattgccgcgcccgatccacggcccacagcggatcctccgcgtcttccggcttggtggggctgcacggacccacgctgccggccgctcgttgttctccccgtcatcacccctgccttgttctctcggattccagcagtacgtagagctcgtcaacagcgtctcccacccggcgccatccactcccgccgccacaaccgatgctacgaggcaggcggtgcccctcgaggtggtggccatcgaggaggaggaggagggggaggaggaggaggaggacgaggacgagaggaagcagcaggacgaggaggaggtgaggggcagcgtggtagtgagaagggtgccacagtacaaggagctgtacgagaagtcacggaagcgggatgccaagctcaagacgctcgagtttgaggtgcggctcgcccaggtgggccgtcttagccttgagcggcttgctgaggccctcccgcgaattacgccaaagaaggaggaggtgcctgaaccttttgttcctcttactgatgaggatgaagaaatggttcgtcgggctcttcatggcaagaacagtcgtgagaggttagcagtacatgaaccttcaaatattgtgataacaagggagatcttgcaatgcttgaataaccaggaatggctaaatgatgaggttatcaatttgtatcttgatctgcttaaagagagggaactaagagaacctcgcaagttcttaaaatgccatttcttcaacacctttttctacaagaagctgatttccagtgggtatgattataaagctgttagaagatggacaacaaaaaggaggttagggtacagtctaattgactgtgacaagatatttgttcccatacacaaggaagtccattggtgtttagcagtcatcaacataagggacaaaaagtttcagtatctggattcacttggtggcatggacacgagggtcttgaggatcttggctaagtatattgtggatgaggtcaaagacaaaagtgaccaacagattgatgctctctcatggaagcaggaaagtgtcgaaaatcttcctttgcaggagaatggatgggactgtggcatgttcatgctcaaatacattgacttctacagcagagatatggacctcatttttggacagcaaatgcactacttccgcaggaggacggcaaaggaaatactgagtttgagggctgaataaaccttggaggacatcataggtcattttggttaggttcagatatttgttggaatatgtacttaacaaatggctgcaacggcttaaaggtatagcattgagtggaatgattttgaaaatgttccggatgcacaacggtcaagcaacaggttgaagggaattttgcatgagcacagcagcgcctagttttgacagtgagcctttgcatggtcaagcattagattgcaatgagattcatcaaagatagggaggtatagattaacttggaactatatatatatataccagtgttcttgagcatcctgtgagctgtgaccaagtgagcaatcactgggttaagctgtatgaccggcttcggtgcatagttgtgtgaaatgctcaaatcccttttgttttta

SEQ ID NO: 75969 - DNA, 5111 bp, Zea Mays
ctgccccggcacacgtcgtctctgccactcaccgcgagtccgcaaccaaacaataagaagcagccttccttgctctgcgtcagtgcatctccttcccctcccctccttcccctcccctcctctcgtctggggactgggcgtctggctggcacgcagccaagccacacactccctcgtcagcctctgcatgccacgccgcccctgatcaccagaacccgcccggccgccgcatggccctcgcgtcgcagccgccttggtggctcaccacggaggcttgcgacctcccatccgcgcccgccgcggggctcggggaatgggtcgccttcctcttcctctccacgtgctcgcagcagatgctcctctccgccgcgtccgccgtcttcctcgtcgcgctgctctgcctcggcgccgccaagctcatctccacacggcgacgacgccatggcggcggcgccctcaacggcgacaagcagccgctgctggacagggccggggggcgggccggggttcgggtcggcgccgggttcgtcgtcgcgctggcggcgtccggtgtcctcgccgcgttctacgcctcgctgctcgtcctttccctggtcaacagaggcggcggagagggcgaggccctggaggcggtgttcctggcgctgcagtgcgcggcgcacctggccgccgcggccgtcgtcgcgcacgagaagcggttccgcgcggcggcgcacccgctggccctgcgcctgtactggctggcggcgcccgcgctgacggcgctcctcgccggcacctccgtcgcgcgcctcgtggtggccgccgctaggctcccggacgacgcgctcgcgatcgcggcgctggtcctgtcccttcccctcccggtcctctccatcctcgggtcgacgggcatatccgtggcggtggtcaacgacgccaccggggcggcggaggaggagacggcaagcaacaaggcgacggagaaaaacgtgaccccctacgcgacggcgtcgtgggcttcgcgcgcgacgtgggcttggatgaacccgctggtgcagcgcgggcaccgcgcggcgctggagctgtcggacgtgccgacgctggcaccgtcccaccgcccagagcgcatgcacgagctcttcaccctgcactggccgtcggcgtgggcgtccaaggacaacaacccggtccggcacacgctgttccggaccttctgggcgcagttcctgctgaacgcgttgctggcgctgctccggctgaccgtcatgtacgtcggcccgacgctcatccagagcttcgtggacttcacgtccgccggcgggcagcggccgttcggggagggcgcgcggctggtggcgacgctgctggcggccaagtgcgcggaggcgctgtgcagccaccagtacaacttccactgccagaagctggggatgcagatccggggcgccctcatcgtggcgctgtaccgcaagggcctccggctctcgtgctcagcgcgccagaagcacgggctcggcatgatcgtcaactacatggccgtcgacgcgcagcagctctccgacatgatgctgcagatccactacctctggctcatgccgctccaggttggcgttgctctgggcctgctgtacacgtaccttggccccccggtgacgtcggctctgatcggcgttgccggcgtgatggtgttcgtgctcctgggcacccggcgcaacaaccggtaccagttctcgctgatgaaggagcgcgaccagcggatgaaggcgacgaacgagatgctcaactacatgcgcgtcatcaagttccaggcgtgggaggagcacttcaacgcgcgcatcggccgcttccgccgcctcgagttcggctggctctcccgcttcatgtactccatctccggcaacatcatcgcgctctggagcgcccccgtcgtcgtctccgcgctcgtcttcgccacctgcgtgctcgccggggtgcgcctcgacgccggcctcgtcttcaccgccacgtccttcttcaagatcctacaggagcccatgcggaacttcccgcaggcgatgatccaggcgtcgcaggcgatgatctcgctgcagcgcctcgactcgtacatgactagcgcggagcttgacgagggctccgtggagagggaccccgccgcggcgtcgggcggcatggccgtgcaggtcaaggacggcgtgttcgcgtgggacgacgaggtggacgccggccaggaggtgctgcgcgggatcgacctggacatccgtacgggtgcgctggcggcagtggtgggcatggttggctccggcaagtcgtcgctgctgggctgcatcctcggcgagatgcgcaagttctccggcaaggtttgcggcagcacggcatacgtggcgcagacggcatggatccagaacggcaccattgaggaaaacatcctgttcgggaagcccatgcaccgggagaggtacaaggaggtgatcagggtgtgctgcctggagaaggacctggagatgatggaattcggggaccaaacggagatcggggagcgcggcatcaaccttagtggcgggcagaagcagcgcatccagctcgcccgcgccgtctaccaggacttcaacatctacctcctcgacgatgtattcagcgcggtcgatgcgcatacgggcactgagatcttcaaggaatgtgttagaggtgcactcaagaacaagaccatagtactcgtgacacatcaagttgatttcttgcacaatgctgatatcatatatgtgatgaaggacggaatgatcgtgcaatccggcaagtacgatgagctcctccaggcaggcaccgacttcgcggcactggtcgcagcgcacgacagctcaatggagctcgtggagagcgcggcgccggcgagcgagcgcgagctgcccctctcccggcagccgtcaagcaagaacgcggcgtccaacggcgactcgtcctcgtcctccatcgtggcgcccaaggccgagaaggcgtcggcgcggctgatcaaggacgaagagcgcgcgagcgggcacgtcagcttcaccgtgtacaagcagtacatgacggaggcctgggggtggtgggggccgcttgtggtggtggctgtctccgtggtgtggcagtgctctctcatggccagcgactactggcttgccgaccagacctccgacgggaacgaaacctcgttccagccgtcgctgttcatcaacgtgtacgccatcatcgctgccgtctcggtggtgctcgtcgcggctcgctctttcattgtggcgttcattggcctccagacggcggaccggttcttcaagcagatcctcaacagcatcctgcacgcgcccatgtccttcttcgacaccacgccgtccggcaggatcctcagcagggcgtcgtcagatcagacgaacgtcgatctcttcctgccgttcttcgtctggatgagcgtatccatgtacatcaccgtgatcagtgtgctgatcgtcacgtgtcaggtggcgtggccgtccgtcattgccataatccctctggtgatactgaacatctggtaccggggctattacttgtcgacatcgagggagctgactcgcctcgagtcgattaccaaggctccagtgatccaccacttctccgagacggttcaaggtgtcatgaccatcaggtgcttcaggaaggaggaaaacttcttgcaggagaacctgaaccgggtgaactcaagcctgaggatggacttccacaacaatggtgccaacgagtggctcggtttccggctcgagctgattggaagctttgttctctgcttcacagccgtgctcatggtcacattgccgagcaacttcgtgaagccagagtatgttggtctgtcactatcatatggtctatctctcaaccaggtgttgttctgggccatctggatcagttgcttcattgaaaataaaatggtctcagttgagaggataaaacaattcacaaatattccttcagaggccacatggaggatcaaggactgcctaccagattctaattggccaacaaaaggcgacatcaatgtcattgatcttaagtttaggtataggcacaacactcctctagtgttgaagggcatcacaataagcatacatggaggagagaagattggagttgtcggcagaactggtagtgggaaatcaacactgatccaggcactgttcagaatagtggagccttctgaggggagaataatcatcgacggtgttgacatctgcactttaggactccatgaccttaggtcacggtttggtatcatacctcaggaacctgttctctttgaagggaccattaggagcaacattgatccgcttgagcagtattccgatgatgaaatctggcaggcattgggccgctgtcagttgaaagaagccgtagcttcaaaacccgaaaagcttgatgcttcagtcgtcgacaatggtgagaactggagtgttggacaacgtcaactgctatgcctgggccgggtgatgctaaagcacagcagaatactgttcatggacgaggccactgcttccgttgattcccagaccgatgctgtgattcagaagatcatccgggaagactttgcagcttgtaccattatcagcattgcgcacagaatacctacggtgatggactgcgacagggtcctggttatagatgcaggactagcaaaggagtttgaccggcctgcaaatctgatcgagaggccatctctgtttggagcattggttcaagagtacgcgaaccgttcgtccgacgtttagcatttcagggtggcataattttttgactcgagatttgggaggaaacaatgattggaaatttctcggtgtggtgaacgagcaatgctgcattcatgctccaaataaaactgcgagccctcaaaatttcgcgaaacgtaattgggtcatgtggaaggccagaggagaagccacgatcggatgaaggagacatcgagatgactaggatagtaagtagttatcgagatgtatttgagcggtttaagctgaaattttaagactgagctgaagacgatgtatgaatctatgtattgttcaactagaatattactgcgcatgcaaattttctgccgactagtgttaaaacaaacatacaacaaa

SEQ ID NO: 75970 - DNA, 5116 bp, Zea Mays
ctgccccggcacacgtcgtctctgccactcaccgcgagtccgcaaccaaacaataagaagcagccttccttgctctgcgtcagtgcatctccttcccctcccctccttcccctcccctcctctcgtctggggactgggcgtctggctggcacgcagccaagccacacactccctcgtcagcctctgcatgccacgccgcccctgatcaccagaacccgcccggccgccgcatggccctcgcgtcgcagccgccttggtggctcaccacggaggcttgcgacctcccatccgcgcccgccgcggggctcggggaatgggtcgccttcctcttcctctccacgtgctcgcagcagatgctcctctccgccgcgtccgccgtcttcctcgtcgcgctgctctgcctcggcgccgccaagctcatctccacacggcgacgacgccatggcggcggcgccctcaacggcgacaagcagccgctgctggacagggccggggggcgggccggggttcgggtcggcgccgggttcgtcgtcgcgctggcggcgtccggtgtcctcgccgcgttctacgcctcgctgctcgtcctttccctggtcaacagaggcggcggagagggcgaggccctggaggcggtgttcctggcgctgcagtgcgcggcgcacctggccgccgcggccgtcgtcgcgcacgagaagcggttccgcgcggcggcgcacccgctggccctgcgcctgtactggctggcggcgcccgcgctgacggcgctcctcgccggcacctccgtcgcgcgcctcgtggtggccgccgctaggctcccggacgacgcgctcgcgatcgcggcgctggtcctgtcccttcccctcccggtcctctccatcctcgggtcgacgggcatatccgtggcggtggtcaacgacgccaccggggcggcggaggaggagacggcaagcaacaaggcgacggagaaaaacgtgaccccctacgcgacggcgtcgtgggcttcgcgcgcgacgtgggcttggatgaacccgctggtgcagcgcgggcaccgcgcggcgctggagctgtcggacgtgccgacgctggcaccgtcccaccgcccagagcgcatgcacgagctcttcaccctgcactggccgtcggcgtgggcgtccaaggacaacaacccggtccggcacacgctgttccggaccttctgggcgcagttcctgctgaacgcgttgctggcgctgctccggctgaccgtcatgtacgtcggcccgacgctcatccagagcttcgtggacttcacgtccgccggcgggcagcggccgttcggggagggcgcgcggctggtggcgacgctgctggcggccaagtgcgcggaggcgctgtgcagccaccagtacaacttccactgccagaagctggggatgcagatccggggcgccctcatcgtggcgctgtaccgcaagggcctccggctctcgtgctcagcgcgccagaagcacgggctcggcatgatcgtcaactacatggccgtcgacgcgcagcagctctccgacatgatgctgcagatccactacctctggctcatgccgctccaggttggcgttgctctgggcctgctgtacacgtaccttggccccccggtgacgtcggctctgatcggcgttgccggcgtgatggtgttcgtgctcctgggcacccggcgcaacaaccggtaccagttctcgctgatgaaggagcgcgaccagcggatgaaggcgacgaacgagatgctcaactacatgcgcgtcatcaagttccaggcgtgggaggagcacttcaacgcgcgcatcggccgcttccgccgcctcgagttcggctggctctcccgcttcatgtactccatctccggcaacatcatcgcgctctggagcgcccccgtcgtcgtctccgcgctcgtcttcgccacctgcgtgctcgccggggtgcgcctcgacgccggcctcgtcttcaccgccacgtccttcttcaagatcctacaggagcccatgcggaacttcccgcaggcgatgatccaggcgtcgcaggcgatgatctcgctgcagcgcctcgactcgtacatgactagcgcggagcttgacgagggctccgtggagagggaccccgccgcggcgtcgggcggcatggccgtgcaggtcaaggacggcgtgttcgcgtgggacgacgaggtggacgccggccaggaggtgctgcgcgggatcgacctggacatccgtacgggtgcgctggcggcagtggtgggcatggttggctccggcaagtcgtcgctgctgggctgcatcctcggcgagatgcgcaagttctccggcaaggtaaaggtttgcggcagcacggcatacgtggcgcagacggcatggatccagaacggcaccattgaggaaaacatcctgttcgggaagcccatgcaccgggagaggtacaaggaggtgatcagggtgtgctgcctggagaaggacctggagatgatggaattcggggaccaaacggagatcggggagcgcggcatcaaccttagtggcgggcagaagcagcgcatccagctcgcccgcgccgtctaccaggacttcaacatctacctcctcgacgatgtattcagcgcggtcgatgcgcatacgggcactgagatcttcaaggaatgtgttagaggtgcactcaagaacaagaccatagtactcgtgacacatcaagttgatttcttgcacaatgctgatatcatatatgtgatgaaggacggaatgatcgtgcaatccggcaagtacgatgagctcctccaggcaggcaccgacttcgcggcactggtcgcagcgcacgacagctcaatggagctcgtggagagcgcggcgccggcgagcgagcgcgagctgcccctctcccggcagccgtcaagcaagaacgcggcgtccaacggcgactcgtcctcgtcctccatcgtggcgcccaaggccgagaaggcgtcggcgcggctgatcaaggacgaagagcgcgcgagcgggcacgtcagcttcaccgtgtacaagcagtacatgacggaggcctgggggtggtgggggccgcttgtggtggtggctgtctccgtggtgtggcagtgctctctcatggccagcgactactggcttgccgaccagacctccgacgggaacgaaacctcgttccagccgtcgctgttcatcaacgtgtacgccatcatcgctgccgtctcggtggtgctcgtcgcggctcgctctttcattgtggcgttcattggcctccagacggcggaccggttcttcaagcagatcctcaacagcatcctgcacgcgcccatgtccttcttcgacaccacgccgtccggcaggatcctcagcagggcgtcgtcagatcagacgaacgtcgatctcttcctgccgttcttcgtctggatgagcgtatccatgtacatcaccgtgatcagtgtgctgatcgtcacgtgtcaggtggcgtggccgtccgtcattgccataatccctctggtgatactgaacatctggtaccggggctattacttgtcgacatcgagggagctgactcgcctcgagtcgattaccaaggctccagtgatccaccacttctccgagacggttcaaggtgtcatgaccatcaggtgcttcaggaaggaggaaaacttcttgcaggagaacctgaaccgggtgaactcaagcctgaggatggacttccacaacaatggtgccaacgagtggctcggtttccggctcgagctgattggaagctttgttctctgcttcacagccgtgctcatggtcacattgccgagcaacttcgtgaagccaagtatgttggtctgtcactatcatatggtctatctctcaaccaggtgttgttctgggccatctggatcagttgcttcattgaaaataaaatggtctcagttgagaggataaaacaattcacaaatattccttcagaggccacatggaggatcaaggactgcctaccagattctaattggccaacaaaaggcgacatcaatgtcattgatcttaagtttaggtataggcacaacactcctctagtgttgaagggcatcacaataagcatacatggaggagagaagattggagttgtcggcagaactggtagtgggaaatcaacactgatccaggcactgttcagaatagtggagccttctgaggggagaataatcatcgacggtgttgacatctgcactttaggactccatgaccttaggtcacggtttggtatcatacctcaggaacctgttctctttgaagggaccattaggagcaacattgatccgcttgagcagtattccgatgatgaaatctggcaggcattgggccgctgtcagttgaaagaagccgtagcttcaaaacccgaaaagcttgatgcttcagtcgtcgacaatggtgagaactggagtgttggacaacgtcaactgctatgcctgggccgggtgatgctaaagcacagcagaatactgttcatggacgaggccactgcttccgttgattcccagaccgatgctgtgattcagaagatcatccgggaagactttgcagcttgtaccattatcagcattgcgcacagaatacctacggtgatggactgcgacagggtcctggttatagatgcaggactagcaaaggagtttgaccggcctgcaaatctgatcgagaggccatctctgtttggagcattggttcaagagtacgcgaaccgttcgtccgacgtttagcatttcagggtggcataattttttgactcgagatttgggaggaaacaatgattggaaatttctcggtgtggtgaacgagcaatgctgcattcatgctccaaataaaactgcgagccctcaaaatttcgcgaaacgtaattgggtcatgtggaaggccagaggagaagccacgatcggatgaaggagacatcgagatgactaggatagtaagtagttatcgagatgtatttgagcggtttaagctgaaattttaagactgagctgaagacgatgtatgaatctatgtattgttcaactagaatattactgcgcatgcaaattttctgccgactagtgttaaaacaaacatacaacaaa

SEQ ID NO: 75971 - DNA, 3887 bp, Zea Mays
ctcatacgacaccacaccaccgccgtggctccttcctcattgtggtttcctcagcgactacttttttaacagttgttcatcgcattgaggaagggaggccggctggtgctactgcttttctagtacctgcccacctgcacttgcatctcctgcttccctgagcggcctcccggctgcgaatccaccagcatttcccgaggcccagcgccgcgtgtgcctgtggggcggagtcaggaaatgctcggagctccattccacggctgaaacttctgggaaggtttaagtttagggagaccggcagcactaaagaaactagcctgagcctctctttcagcctctcacccactatcgtgagggcattttgtaccttccaagaaagagagtaaggagaacttgacctcagcgctagagaagaatatggcagccactgaagctgccacggacacaggcagttcaaggaggtcacaagatgacactacaacattagtcccacacagtgggaatttgggagaaccaatccagaagggcgtgaagaccaccagattcaaagatgatgacgaggttgtggaaatcaccattgtacagcgcgattcagtggcaatcgaagatgtcagggtagtcgatgatggtggctcagggcatagtaatgggtttgatggcctgtcacttgtgtcaccttcctcatcaaggagcggcaagctatcatcaaagattaggcaagtgaaaaatggactaaagatgaagaactcaagcactaaggcgccacagacacagttgggaaagaacatgaggaagagattggacagaagcaagagcggggctgctgtagcgctcaagggcttgcagtttgtgactgcaaaagttggtcatgatggctgggctgtagtggagaaacggttcaacgagctacaggttgatggtgtgctgctacgttcaagatttgggaaatgcattgggatggatggatctgatgagtttgcagtgcaattgtttgattcattagcaagaaagagagggataacaaagcaggtgctgactaaagatgagctcaaagatttctgggagcaactcagtgatcagggttttgacaaccgtttacagatattctttgacatggttgataagaatgccgatggaagaatcacagaagaggaggttaaggagattattaccctcagtgcatcagcaaacaaactttccaagctcaaggaacgagctgatgagtacacggcactcataatggaagaacttgaccgtgacagccttggatacattgagcttgaggatctgaaggcacttttgctgcaatcaccttctcaagttgttgcaagatcaacaacgcatagctcgaaacttagcaaagctcttagcatgaagcttgcatcaaacaaggacacaggtccattttaccactactggcaagagttcatgtacttccttgaggagaactggaagcgcatttgggttatgactctctggctctcaatctgcattggcctctttatttggaagttcatccaataccgtaatcgagcagtatttcacatcatgggttattgtgtgaccactgcaaaaggtgctgcagagaccctcaaattcaatatggccctggttctttttcctgtttgccgaaatacaatcacatggattcgatcaaagacaaagatcggtgctgttgtgcccttcaatgacaacataaacttccataaggtaatagcagcaggtgttgcagttggtgttgttttgcatgcaggtgctcacctgacatgtgattttcctctgctgctgcatgcaagtgatgctgcctatgaaccaatgaagcctttctttggagacaaaaggccaccaaattactggtggtttgtaaagggaactgaagggtggacaggtgtggtcatggttgtacttatgactatagctttcgtattggcccagccatggtttcggcgtaataagctcaaggattctaatcccctcaagaaaatgactggcttcaatgccttttggtttactcaccacttatttgttattgtgtatgcactgctcattgtccatgggacctgtttatatctaagcaggaaatggtacaagaaaacgacatggatgtaccttgctgtccctgtgctcttgtatgtaagtgagcgcattcttcggctatttaggagccatgatgctgttaggattcagaaggttgcagtatatccagggaatgttttggctctctatatgtccaagccacctggattcaggtatcggagtgggcagtatatcttcataaaatgcagtgatgtctctccatacgaatggcacccattttcgattacatcagcaccaggagatgattatcttagtgtccacattcgcacaaggggtgattggacttcacgtcttaggactgtcttctctgaggcatgccgccctccatctgatggagaaagtggactccttagagctgacccttccaaggggatcaccgagaccaacgcgaggttcccgaaactcttgattgatggaccatacggtgctccagcgcaagactatcaggaatatgatgtgctcctgctcattggactgggcattggagccacaccattgattagcattgtgaaggatgtacttaaccacatccagcttggaggatctgttgcaggcacggagcctgagggcagtggcaaggccaagaagaggccattcatgacaaagagggcctacttctactgggtgaccagggaagaggggtcctttgaatggttccgaggggtcatgaatgaggtggctgagaaggacaaggatggagtcattgaactccacaaccactgctcgagtgtgcaccaggaaggggatgtacgttctgccctcattgtcatgctccaggagctccagcacgcgaagaagggagtcgacatcttgtctggaactagtgtcaagacgcattttgcacggccgaattggcgaagcgtcttcaaacatgttgcagtgaaccacgagaaccaacgcatcggagttttctactgtggtgagcccgtccttgtgccacagctacggcagctgtcagcggacttcacccacaagacaaatactaagttcgagttccacaaggagaacttctaatggaggaactggagaaaagctctaggcgtggccctctaatggtttcagaatatgtgaattacgatggttgtaacatatatacgagtagaagaataagacgatgggagttgttttgttgtacatgtcaagagtagatgaattgtctttgcaagcatacaaccttaaaagttgtaacacatgtcagctggttttgacaggtctgtttgttttgtctgctcctgttggagtgttgggcatacactgcttctgtcttttaaagcaccaccactacattgaaagccctgaggaaggtattttacggcacaaatgagtcaggttcacttgtgaattgtgatcctcaactcctgatgctgagtaactggttgtgccttccgtaagtttgctcaaaatgtatgttaaattttatgttgcttgatctcttggcacttccaaaaagtttgtgtgataaatgataagaaatgagatttcccctttttttgcagaatgggtaggtgttctgctgtttcattaagttgaaagcatgtgcaatgtgtgcaaggatctgactgcaatactactcggctaaaatgaagaagaaaacgaaaccacaacaccctaccaaaacaaagatgaaagaaaagaaagaaaaggactgaatatagccactgtgactcacatccagcctctacatgctgcatactctgtcgatcactcgaattcttcacaggcaaagcctcaaaaaaatatcagagaaggtgctgcgccgtacgtgacttattgtggaacatgcgtcggca

SEQ ID NO: 75972 - DNA, 3961 bp, Zea Mays
ctcatacgacaccacaccaccgccgtggctccttcctcattgtggtttcctcagcgactacttttttaacagttgttcatcgcattgaggaagggaggccggctggtgctactgcttttctagtacctgcccacctgcacttgcatctcctgcttccctgagcggcctcccggctgcgaatccaccagcatttcccgaggcccagcgccgcgtgtgcctgtggttcgtcctccacttactttgtcctttcgctcattctgttccatccctgaaatctgaagggcggagtcaggaaatgctcggagctccattccacggctgaaacttctgggaaggtttaagccaaaccttgttgcagtttagggagaccggcagcactaaagaaactagcctgagcctctctttcagcctctcacccactatcgtgagggcattttgtaccttccaagaaagagagtaaggagaacttgacctcagcgctagagaagaatatggcagccactgaagctgccacggacacaggcagttcaaggaggtcacaagatgacactacaacattagtcccacacagtgggaatttgggagaaccaatccagaagggcgtgaagaccaccagattcaaagatgatgacgaggttgtggaaatcaccattgtacagcgcgattcagtggcaatcgaagatgtcagggtagtcgatgatggtggctcagggcatagtaatgggtttgatggcctgtcacttgtgtcaccttcctcatcaaggagcggcaagctatcatcaaagattaggcaagtgaaaaatggactaaagatgaagaactcaagcactaaggcgccacagacacagttgggaaagaacatgaggaagagattggacagaagcaagagcggggctgctgtagcgctcaagggcttgcagtttgtgactgcaaaagttggtcatgatggctgggctgtagtggagaaacggttcaacgagctacaggttgatggtgtgctgctacgttcaagatttgggaaatgcattgggatggatggatctgatgagtttgcagtgcaattgtttgattcattagcaagaaagagagggataacaaagcaggtgctgactaaagatgagctcaaagatttctgggagcaactcagtgatcagggttttgacaaccgtttacagatattctttgacatggttgataagaatgccgatggaagaatcacagaagaggaggttaaggagattattaccctcagtgcatcagcaaacaaactttccaagctcaaggaacgagctgatgagtacacggcactcataatggaagaacttgaccgtgacagccttggatacattgagcttgaggatctgaaggcacttttgctgcaatcaccttctcaagttgttgcaagatcaacaacgcatagctcgaaacttagcaaagctcttagcatgaagcttgcatcaaacaaggacacaggtccattttaccactactggcaagagttcatgtacttccttgaggagaactggaagcgcatttgggttatgactctctggctctcaatctgcattggcctctttatttggaagttcatccaataccgtaatcgagcagtatttcacatcatgggttattgtgtgaccactgcaaaaggtgctgcagagaccctcaaattcaatatggccctggttctttttcctgtttgccgaaatacaatcacatggattcgatcaaagacaaagatcggtgctgttgtgcccttcaatgacaacataaacttccataaggtaatagcagcaggtgttgcagttggtgttgttttgcatgcaggtgctcacctgacatgtgattttcctctgctgctgcatgcaagtgatgctgcctatgaaccaatgaagcctttctttggagacaaaaggccaccaaattactggtggtttgtaaagggaactgaagggtggacaggtgtggtcatggttgtacttatgactatagctttcgtattggcccagccatggtttcggcgtaataagctcaaggattctaatcccctcaagaaaatgactggcttcaatgccttttggtttactcaccacttatttgttattgtgtatgcactgctcattgtccatgggacctgtttatatctaagcaggaaatggtacaagaaaacgacatggatgtaccttgctgtccctgtgctcttgtatgtaagtgagcgcattcttcggctatttaggagccatgatgctgttaggattcagaaggttgcagtatatccagggaatgttttggctctctatatgtccaagccacctggattcaggtatcggagtgggcagtatatcttcataaaatgcagtgatgtctctccatacgaatggcacccattttcgattacatcagcaccaggagatgattatcttagtgtccacattcgcacaaggggtgattggacttcacgtcttaggactgtcttctctgaggcatgccgccctccatctgatggagaaagtggactccttagagctgacccttccaaggggatcaccgagaccaacgcgaggttcccgaaactcttgattgatggaccatacggtgctccagcgcaagactatcaggaatatgatgtgctcctgctcattggactgggcattggagccacaccattgattagcattgtgaaggatgtacttaaccacatccagcttggaggatctgttgcaggcacggagcctgagggcagtggcaaggccaagaagaggccattcatgacaaagagggcctacttctactgggtgaccagggaagaggggtcctttgaatggttccgaggggtcatgaatgaggtggctgagaaggacaaggatggagtcattgaactccacaaccactgctcgagtgtgcaccaggaaggggatgtacgttctgccctcattgtcatgctccaggagctccagcacgcgaagaagggagtcgacatcttgtctggaactagtgtcaagacgcattttgcacggccgaattggcgaagcgtcttcaaacatgttgcagtgaaccacgagaaccaacgcatcggagttttctactgtggtgagcccgtccttgtgccacagctacggcagctgtcagcggacttcacccacaagacaaatactaagttcgagttccacaaggagaacttctaatggaggaactggagaaaagctctaggcgtggccctctaatggtttcagaatatgtgaattacgatggttgtaacatatatacgagtagaagaataagacgatgggagttgttttgttgtacatgtcaagagtagatgaattgtctttgcaagcatacaaccttaaaagttgtaacacatgtcagctggttttgacaggtctgtttgttttgtctgctcctgttggagtgttgggcatacactgcttctgtcttttaaagcaccaccactacattgaaagccctgaggaaggtattttacggcacaaatgagtcaggttcacttgtgaattgtgatcctcaactcctgatgctgagtaactggttgtgccttccgtaagtttgctcaaaatgtatgttaaattttatgttgcttgatctcttggcacttccaaaaagtttgtgtgataaatgataagaaatgagatttcccctttttttgcagaatgggtaggtgttctgctgtttcattaagttgaaagcatgtgcaatgtgtgcaaggatctgactgcaatactactcggctaaaatgaagaagaaaacgaaaccacaacaccctaccaaaacaaagatgaaagaaaagaaagaaaaggactgaatatagccactgtgactcacatccagcctctacatgctgcatactctgtcgatcactcgaattcttcacaggcaaagcctcaaaaaaatatcagagaaggtgctgcgccgtacgtgacttattgtggaacatgcgtcggca

SEQ ID NO: 75973 - DNA, 3772 bp, Zea Mays
gtcaagctgtcaatccatccagcgtttgttagggagaaaagacaaatgcacattgttcatcgcattgaggaagggaggccggctggtgctactgcttttctagtacctgcccacctgcacttgcatctcctgcttccctgagcggcctcccggctgcgaatccaccagcatttcccgaggcccagcgccgcgtgtgcctgtggggcggagtcaggaaatgctcggagctccattccacggctgaaacttctgggaaggtttaagagagtaaggagaacttgacctcagcgctagagaagaatatggcagccactgaagctgccacggacacaggcagttcaaggaggtcacaagatgacactacaacattagtcccacacagtgggaatttgggagaaccaatccagaagggcgtgaagaccaccagattcaaagatgatgacgaggttgtggaaatcaccattgtacagcgcgattcagtggcaatcgaagatgtcagggtagtcgatgatggtggctcagggcatagtaatgggtttgatggcctgtcacttgtgtcaccttcctcatcaaggagcggcaagctatcatcaaagattaggcaagtgaaaaatggactaaagatgaagaactcaagcactaaggcgccacagacacagttgggaaagaacatgaggaagagattggacagaagcaagagcggggctgctgtagcgctcaagggcttgcagtttgtgactgcaaaagttggtcatgatggctgggctgtagtggagaaacggttcaacgagctacaggttgatggtgtgctgctacgttcaagatttgggaaatgcattgggatggatggatctgatgagtttgcagtgcaattgtttgattcattagcaagaaagagagggataacaaagcaggtgctgactaaagatgagctcaaagatttctgggagcaactcagtgatcagggttttgacaaccgtttacagatattctttgacatggttgataagaatgccgatggaagaatcacagaagaggaggttaaggagattattaccctcagtgcatcagcaaacaaactttccaagctcaaggaacgagctgatgagtacacggcactcataatggaagaacttgaccgtgacagccttggatacattgagcttgaggatctgaaggcacttttgctgcaatcaccttctcaagttgttgcaagatcaacaacgcatagctcgaaacttagcaaagctcttagcatgaagcttgcatcaaacaaggacacaggtccattttaccactactggcaagagttcatgtacttccttgaggagaactggaagcgcatttgggttatgactctctggctctcaatctgcattggcctctttatttggaagttcatccaataccgtaatcgagcagtatttcacatcatgggttattgtgtgaccactgcaaaaggtgctgcagagaccctcaaattcaatatggccctggttctttttcctgtttgccgaaatacaatcacatggattcgatcaaagacaaagatcggtgctgttgtgcccttcaatgacaacataaacttccataaggtaatagcagcaggtgttgcagttggtgttgttttgcatgcaggtgctcacctgacatgtgattttcctctgctgctgcatgcaagtgatgctgcctatgaaccaatgaagcctttctttggagacaaaaggccaccaaattactggtggtttgtaaagggaactgaagggtggacaggtgtggtcatggttgtacttatgactatagctttcgtattggcccagccatggtttcggcgtaataagctcaaggattctaatcccctcaagaaaatgactggcttcaatgccttttggtttactcaccacttatttgttattgtgtatgcactgctcattgtccatgggacctgtttatatctaagcaggaaatggtacaagaaaacgacatggatgtaccttgctgtccctgtgctcttgtatgtaagtgagcgcattcttcggctatttaggagccatgatgctgttaggattcagaaggttgcagtatatccagggaatgttttggctctctatatgtccaagccacctggattcaggtatcggagtgggcagtatatcttcataaaatgcagtgatgtctctccatacgaatggcacccattttcgattacatcagcaccaggagatgattatcttagtgtccacattcgcacaaggggtgattggacttcacgtcttaggactgtcttctctgaggcatgccgccctccatctgatggagaaagtggactccttagagctgacccttccaaggggatcaccgagaccaacgcgaggttcccgaaactcttgattgatggaccatacggtgctccagcgcaagactatcaggaatatgatgtgctcctgctcattggactgggcattggagccacaccattgattagcattgtgaaggatgtacttaaccacatccagcttggaggatctgttgcaggcacggagcctgagggcagtggcaaggccaagaagaggccattcatgacaaagagggcctacttctactgggtgaccagggaagaggggtcctttgaatggttccgaggggtcatgaatgaggtggctgagaaggacaaggatggagtcattgaactccacaaccactgctcgagtgtgcaccaggaaggggatgtacgttctgccctcattgtcatgctccaggagctccagcacgcgaagaagggagtcgacatcttgtctggaactagtgtcaagacgcattttgcacggccgaattggcgaagcgtcttcaaacatgttgcagtgaaccacgagaaccaacgcatcggagttttctactgtggtgagcccgtccttgtgccacagctacggcagctgtcagcggacttcacccacaagacaaatactaagttcgagttccacaaggagaacttctaatggaggaactggagaaaagctctaggcgtggccctctaatggtttcagaatatgtgaattacgatggttgtaacatatatacgagtagaagaataagacgatgggagttgttttgttgtacatgtcaagagtagatgaattgtctttgcaagcatacaaccttaaaagttgtaacacatgtcagctggttttgacaggtctgtttgttttgtctgctcctgttggagtgttgggcatacactgcttctgtcttttaaagcaccaccactacattgaaagccctgaggaaggtattttacggcacaaatgagtcaggttcacttgtgaattgtgatcctcaactcctgatgctgagtaactggttgtgccttccgtaagtttgctcaaaatgtatgttaaattttatgttgcttgatctcttggcacttccaaaaagtttgtgtgataaatgataagaaatgagatttcccctttttttgcagaatgggtaggtgttctgctgtttcattaagttgaaagcatgtgcaatgtgtgcaaggatctgactgcaatactactcggctaaaatgaagaagaaaacgaaaccacaacaccctaccaaaacaaagatgaaagaaaagaaagaaaaggactgaatatagccactgtgactcacatccagcctctacatgctgcatactctgtcgatcactcgaattcttcacaggcaaagcctcaaaaaaatatcagagaaggtgctgcgccgtacgtgacttattgtggaacatgcgtcggca

SEQ ID NO: 75974 - DNA, 3952 bp, Zea Mays
ctagcagcagactagcagcccgagggagtcaagctgtcaatccatccagcgtttgttagggagaaaagacaaatgcacagtgagtaaaatttatagagataaaatactgtaaaagtggtatcagcaagcagcagccaacaaacctcaactcgccgcaaactgacacgaacaccagcgctactcatacgacaccacaccaccgccgtggctccttcctcattgtggtttcctcagcgactacttttttaacagttgttcatcgcattgaggaagggaggccggctggtgctactgcttttctagtacctgcccacctgcacttgcatctcctgcttccctgagcggcctcccggctgcgaatccaccagcatttcccgaggcccagcgccgcgtgtgcctgtggggcggagtcaggaaatgctcggagctccattccacggctgaaacttctgggaaggtttaagccaaaccttgttgcagtttagggagaccggcagcactaaagaaactagcctgagcctctctttcagcctctcacccactatcgtgagggcattttgtaccttccaagaaagagagtaaggagaacttgacctcagcgctagagaagaatatggcagccactgaagctgccacggacacaggcagttcaaggaggtcacaagatgacactacaacattagtcccacacagtgggaatttgggagaaccaatccagaagggcgtgaagaccaccagattcaaagatgatgacgaggttgtggaaatcaccattgtacagcgcgattcagtggcaatcgaagatgtcagggtagtcgatgatggtggctcagggcatagtaatgggtttgatggcctgtcacttgtgtcaccttcctcatcaaggagcggcaagctatcatcaaagattaggcaagtgaaaaatggactaaagatgaagaactcaagcactaaggcgccacagacacagttgggaaagaacatgaggaagagattggacagaagcaagagcggggctgctgtagcgctcaagggcttgcagtttgtgactgcaaaagttggtcatgatggctgggctgtagtggagaaacggttcaacgagctacaggttgatggtgtgctgctacgttcaagatttgggaaatgcattgggatggatggatctgatgagtttgcagtgcaattgtttgattcattagcaagaaagagagggataacaaagcaggtgctgactaaagatgagctcaaagatttctgggagcaactcagtgatcagggttttgacaaccgtttacagatattctttgacatggttgataagaatgccgatggaagaatcacagaagaggaggttaaggagattattaccctcagtgcatcagcaaacaaactttccaagctcaaggaacgagctgatgagtacacggcactcataatggaagaacttgaccgtgacagccttggatacattgagcttgaggatctgaaggcacttttgctgcaatcaccttctcaagttgttgcaagatcaacaacgcatagctcgaaacttagcaaagctcttagcatgaagcttgcatcaaacaaggacacaggtccattttaccactactggcaagagttcatgtacttccttgaggagaactggaagcgcatttgggttatgactctctggctctcaatctgcattggcctctttatttggaagttcatccaataccgtaatcgagcagtatttcacatcatgggttattgtgtgaccactgcaaaaggtgctgcagagaccctcaaattcaatatggccctggttctttttcctgtttgccgaaatacaatcacatggattcgatcaaagacaaagatcggtgctgttgtgcccttcaatgacaacataaacttccataaggtaatagcagcaggtgttgcagttggtgttgttttgcatgcaggtgctcacctgacatgtgattttcctctgctgctgcatgcaagtgatgctgcctatgaaccaatgaagcctttctttggagacaaaaggccaccaaattactggtggtttgtaaagggaactgaagggtggacaggtgtggtcatggttgtacttatgactatagctttcgtattggcccagccatggtttcggcgtaataagctcaaggattctaatcccctcaagaaaatgactggcttcaatgccttttggtttactcaccacttatttgttattgtgtatgcactgctcattgtccatgggacctgtttatatctaagcaggaaatggtacaagaaaacgacatggatgtaccttgctgtccctgtgctcttgtatgtaagtgagcgcattcttcggctatttaggagccatgatgctgttaggattcagaaggttgcagtatatccagggaatgttttggctctctatatgtccaagccacctggattcaggtatcggagtgggcagtatatcttcataaaatgcagtgatgtctctccatacgaatggcacccattttcgattacatcagcaccaggagatgattatcttagtgtccacattcgcacaaggggtgattggacttcacgtcttaggactgtcttctctgaggcatgccgccctccatctgatggagaaagtggactccttagagctgacccttccaaggggatcaccgagaccaacgcgaggttcccgaaactcttgattgatggaccatacggtgctccagcgcaagactatcaggaatatgatgtgctcctgctcattggactgggcattggagccacaccattgattagcattgtgaaggatgtacttaaccacatccagcttggaggatctgttgcaggcacggagcctgagggcagtggcaaggccaagaagaggccattcatgacaaagagggcctacttctactgggtgaccagggaagaggggtcctttgaatggttccgaggggtcatgaatgaggtggctgagaaggacaaggatggagtcattgaactccacaaccactgctcgagtgtgcaccaggaaggggatgtacgttctgccctcattgtcatgctccaggagctccagcacgcgaagaagggagtcgacatcttgtctggaactagtgtcaagacgcattttgcacggccgaattggcgaagcgtcttcaaacatgttgcagtgaaccacgagaaccaacgcatcggagttttctactgtggtgagcccgtccttgtgccacagctacggcagctgtcagcggacttcacccacaagacaaatactaagttcgagttccacaaggagaacttctaatggaggaactggagaaaagctctaggcgtggccctctaatggtttcagaatatgtgaattacgatggtctgtttgttttgtctgctcctgttggagtgttgggcatacactgcttctgtcttttaaagcaccaccactacattgaaagccctgaggaaggtattttacggcacaaatgagtcaggttcacttgtgaattgtgatcctcaactcctgatgctgagtaactggttgtgccttccgtaagtttgctcaaaatgtatgttaaattttatgttgcttgatctcttggcacttccaaaaagtttgtgtgataaatgataagaaatgagatttcccctttttttgcagaatgggtaggtgttctgctgtttcattaagttgaaagcatgtgcaatgtgtgcaaggatctgactgcaatactactcggctaaaatgaagaagaaaacgaaaccacaacaccctaccaaaacaaagatgaaagaaaagaaagaaaaggactgaatatagccactgtgactcacatccagcctctacatgctgcatactctgtcgatcactcgaattcttcacaggcaaagcctcaaaaaaatatcagagaaggtgctgcgccgtacgtgacttattgtggaacatgcgtcggca

SEQ ID NO: 75975 - DNA, 979 bp, Zea Mays
gcaagtactgcgagaatgtcatggggatgttgcgacagttcctgatgatgattcaattgaccaatcagatggcaggatccatgactatgaaggcaaggtgacattagctactgatgttaatgaatatgttacttctgcggcaaacaacaacgaggagaatcttgatattacatcagtacagcaatctgaagtcactagagctgatttcttggatgtcacaagcaatactgaatacaacctaacagcaactccagattatgcaacttcaaatttgagatcgagcgaagctaagcttttcatcaagatggcgctttttcgacttgtggtgtggcatgtcatgatggcctcaaatcatcagggctcaggcctccttgagaaagcgaaagaagaattcggaagtcacttcgacgactacttccaaattttaggggttgtctgcatctcattttgctctgagaaagaaacttatctctcgggttcacttgaccatactgttctcttatgggatcaacgggctgaaaaatcacaggtttgaccatataatatatatccctactactatataagcacgatgtgtaatggttctagaatgtcatcgaaatctgcattattccccatatagtgctgggaactacaattctcacgctcgtgtacccgcctgcatttacatggttcactaccagattccccttccaaggctctatgcagctgttcagctatttctcccttcgatgtcggtgtttgtcactgctctgtgtgttggatcaccattgagaataaatatcaaggttgtttgtcgcattttggattaaccataccgttgctccttttttcattccacacctcatcttttgtagttggttatcatcttgctggtacttggtttcttaagccagatgatgtaaaggcactacaaaggacaatatcttttgagacaggtgaagtcctctcctattacatgaggatatgttctttctaa

SEQ ID NO: 75976 - DNA, 1616 bp, Zea Mays
caaaaactgacataaggaggggtactgaaatccaacttatatggggtctgaatggagatgtatctacagcgacaacacaatttgatcatttgactctgcatgggggacgccttctaggcaagtactgcgagaatgtcatggggatgttgcgacagttcctgatgatgattcaattgaccaatcagatggcaggatccatgactatgaaggcaaggtgacattagctactgatgttaatgaatatgttacttctgcggcaaacaacaacgaggagaatcttgatattacatcagtacagcaatctgaagtcactagagctgatttcttggatgtcacaagcaatactgaatacaacctaacagcaactccagattatgcaacttcaagtgcactgttgcaagattctgcttcatagagtttaaaggaaaaccgacaattccagaacatctctcctttctcaagcttcatgttcatcacactccacgccgccgctgcctcgaccaggatggtgtcgatctcatggaggacgtccacctaagtcccaagaacacccacgcacatgcccttctagatttgagatcgagcgaagctaagcttttcatcaagatggcgctttttcgacttgtggtgtggcatgtcatgatggcctcaaatcatcagggctcaggcctccttgagaaagcgaaagaagaattcggaagtcacttcgacgactacttccaaattttaggggttgtctgcatctcattttgctctgagaaagaaacttatctctcgggttcacttgaccatactgttctcttatgggatcaacgggctgaaaaatcacaggtaaaactaatgatgctgtgcacaattgtttgacacaagctaaacttcagattctgcttcacaacatgtttatgtcagctaaacgaactgcagttttagctgaggaaccaaacatgtaacattgttgcaactgaatcattaaaacccttgttaattgttattacctacttcagtatttctgttacttatgggatggtgaatgttggatttcagacattcttgtaaatttagaatcttgggcatggtcattttatttatcaaaaatctgtaacatcttctctgtccaatccagaatataacatgctttaggatttttgctgctgaaaccttttcaggtttgaccatataatatatatccctactactatataagcacgatgtgtaatggttctagaatgtcatcgaaatctgcattattccccatatagtgctgggaactacaattctcacgctcgtgtacccgcctgcatttacatggttcactaccagattccccttccaaggctctatgcagctgttcagctatttctcccttcgatgtcggtgtttgtcactgctctgtgtgttggatcaccattgagaataaatatcaaggttgtttgtcgcattttggattaaccataccgttgctccttttttcattccacacctcatcttttgtagttggttatcatcttgctggtacttggtttcttaagccagatgatgtaaaggcactacaaaggacaatatcttttgagacaggtgaagtcctctcctattacatgaggatatgttctttctaa

SEQ ID NO: 75977 - DNA, 2709 bp, Zea Mays
cttaggacaagttcactaatctaaatttgcaatttaaaagtaccaggatctaaataagaactcgagattaggacaagtttgaggactgccaataaaatttactatttgttaagaatctttacttcactgccatttgatgagaaaagcacaactgacggtggtatcctaactcctatgtctatgaaaagattgcattggcatgtgccaaattgtgctaaagtcttgatgattgtttcatgacagtaccactatctctggtttttctggctgcctttgttggtgtcaccatcaattttaaatcatgctccatggttctacacactgttgtcatcccatgtgccctcgcaccatgtccattgcatcctcatccttgtcgctacagctaagtgtatctgagtagcccctgcactgcaaggaggaaaatataatgtctagaccctggcgtggccaaggccacctgtagctccaccagctgctactctagatgattcatggcgttagttgctacttgcacaattgcagaccataagtgcaatcccatcttttcacatggcactcattactctcttggtggaataattaacattaggctattgagaataaatgttaaatccaacatcaaataaggagtctataatttccatggccataaaaggaaccactcatatactagcgttaaataggaagttgtttctttgaaatgatgtttgtcactgtaacaccgatatcctatcgatttttttgttgagaactgcatgatatgctctaccactacaactttatggatccggttgtttttcaaactataataatgcgccttttgtcatcacaagcccccaaacagtagaactcttctccaacaaagagcatataaggtttcagtctttatgacttggctaatgttgcgccaacacttgcaaagttctatcatcaagcagtgaatcctatgaactagcttgcactcgccacatgagctcactcgtttatcttatatgtgaacatattcaaattttcttgtgggatattgtatttctctgatagatccaaggtttcatttggacctttagcagcaatttgagaggttattttagttcaaccggaaagtcaacgaattgacatacactattgcttctaagaaggtgagctaactttattatatgatatatatcgtagttgagattggaagttacaataaatgagctttgaatattcatttttctattaagttgtctaacttttattgtcaaaattcacatatatcgttttagctggggttgtcaaaaactgacataaggaggggtactgaaatccaacttatatggggtctgaatggagatgtatctacagcgacaacacaatttgatcatttgactctgcatgggggacgccttctaggcaagtactgcgagaatgtcatggggatgttgcgacagttcctgatgatgattcaattgaccaatcagatggcaggatccatgactatgaaggcaaggtgacattagctactgatgttaatgaatatgttacttctgcggcaaacaacaacgaggagaatcttgatattacatcagtacagcaatctgaagtcactagagctgatttcttggatgtcacaagcaatactgaatacaacctaacagcaactccagattatgcaacttcaaatttgagatcgagcgaagctaagcttttcatcaagatggcgctttttcgacttgtggtgtggcatgtcatgatggcctcaaatcatcagggctcaggcctccttgagaaagcgaaagaagaattcggaagtcacttcgacgactacttccaaattttaggggttgtctgcatctcattttgctctgagaaagaaacttatctctcgggttcacttgaccatactgttctcttatgggatcaacgggctgaaaaatcacaggtaaaactaatgatgctgtgcacaattgtttgacacaagctaaacttcagattctgcttcacaacatgtttatgtcagctaaacgaactgcagttttagctgaggaaccaaacatgtaacattgttgcaactgaatcattaaaacccttgttaattgttattacctacttcagtatttctgttacttatgggatggtgaatgttggatttcagacattcttgtaaatttagaatcttgggcatggtcattttatttatcaaaaatctgtaacatcttctctgtccaatccagaatataacatgctttaggatttttgctgctgaaaccttttcaggtttgaccatataatatatatccctactactatataagcacgatgtgtaatggttctagaatgtcatcgaaatctgcattattccccatatagtgctgggaactacaattctcacgctcgtgtacccgcctgcatttacatggttcactaccagattccccttccaaggctctatgcagctgttcagctatttctcccttcgatgtcggtgtttgtcactgctctgtgtgttggatcaccattgagaataaatatcaaggttgtttgtcgcattttggattaaccataccgttgctccttttttcattccacacctcatcttttgtagttggttatcatcttgctggtacttggtttcttaagccagatgatgtaaaggcactacaaaggacaatatcttttgagacaggtgaagtcctctcctattacatgaggatatgttctttctaa

SEQ ID NO: 75978 - DNA, 1430 bp, Zea Mays
cctgtgccccctccctccgctccatccataaccacgactatgctcgtcgccccgcccttgcccctttctcccccgctcgagatgccgtcatgcccgcgtccgagatcggcgccccctgtgccccctagccactttcacccccactcgagccgccaccgcaccccccaaaacccttctcccgccacatcctcatcgcccccgatgccaaacctgatgtcggacccgactaccactgcctccgtccccttctagcgatctccctctccccgcctttgccgacaccaccacgatcgaagatctgaaaggataaggataaggataccaaggaggcacccctgatgatggaggagatcggtcaagccatgtggatgctgcttcacaccatcgcaggctcgttccctaacgaaccaacaaggtgacaaagacgagatgcaaaggagttggtctgaatggagatgtatctacagcgacaacacaatttgatcatttgactctgcatgggggacgccttctaggcaagtactgcgagaatgtcatggggatgttgcgacagttcctgatgatgattcaattgaccaatcagatggcaggatccatgactatgaaggcaaggtgacattagctactgatgttaatgaatatgttacttctgcggcaaacaacaacgaggagaatcttgatattacatcagtacagcaatctgaagtcactagagctgatttcttggatgtcacaagcaatactgaatacaacctaacagcaactccagattatgcaacttcaaatttgagatcgagcgaagctaagcttttcatcaagatggcgcttagaagcttcaaggggatatgaagtaagattttgaaaagatcttgcacaagggctcaggcctccttgagaaagcgaaagaagaattcggaagtcacttcgacgactacttccaaattttaggggttgtctgcatctcattttgctctgagaaagaaacttatctctcgggttcacttgaccatactgttctcttatgggatcaacgggctgaaaaatcacaggtttgaccatataatatatatccctactactatataagcacgatgtgtaatggttctagaatgtcatcgaaatctgcattattccccatatagtgctgggaactacaattctcacgctcgtgtacccgcctgcatttacatggttcactaccagattccccttccaaggctctatgcagctgttcagctatttctcccttcgatgtcggtgtttgtcactgctctgtgtgttggatcaccattgagaataaatatcaagttggttatcatcttgctggtacttggtttcttaagccagatgatgtaaaggcactacaaaggacaatatcttttgagacaggtgaagtcctctcctattacatgaggatatgttctttctaa

SEQ ID NO: 75979 - DNA, 1120 bp, Zea Mays
ccaccccttcctcccccgctcgagctgccgccacacccccgttcgagattggtgtcccctgtgccccctccctccgctccatccataaccacgactatgctcgtcgccccgcccttgcccctttctcccccgctcgagatgccgtcatgcccgcgtccgagatcggcgccccctgtgccccctagccactttcacccccactcgagccgccaccgcacccccgtccgagatcggcggagatggacgtggacgggcatctgcgatgggcggagcggtggatggtgtcacgcgcgtcgttcgacacaaaccgcagcagcgtgcgcggggccacgacggcgcctgggcacgcgtccgtggaccaccacccagacccgatgaccaccgcctccatccgcgcgccctagcaaggtcgatgccgcgggctgccatccttggcgtccgtgccccagcacgcgaccacgggagcaaaacccttctcccgccacatcctcatcgcccccgatgccaaacctgatgtcggacccgactaccactgcctccgtccccttctagcgatctccctctccccgcctttgccgacaccaccacgatcgaagatctgaaaggataaggataaggataccaaggaggcacccctgatgatggaggagatcggtcaagccatgtggatgctgcttcacaccatcgcaggctcgttccctaacgaaccaacaaggtgacaaagacgagatgcaaaggagttgatacatataatctcaagactatatccttgcaaagaatgtgttgatcacttcaagaaattttgaagtaagcttttctcaccaacaacttgagccatgccaaacacccacttaagagccatcattttttaagttgttggtggagggtgcacccttttgaaacttgcagtatgggtttctcctctcagctaggtgcaaatttggtggcaaagatgatgtattagaggacagattttgtgatcttgaggttccactgctagctggtcaaaacgatgttggactgacatctgaagatagttttgttgagaatgctcctcatgattttggcttgcctgatgtggatgcttattcaatacttgagaaggggcacattagatggt

SEQ ID NO: 75980 - DNA, 843 bp, Zea Mays
ccaggccataagaaggtgctggacagtttcctcccgttgatcacataaaggacatttctctggatgatctaacccctggcgggctaaacgatcagctgtccaacatctaatgagggtgtcaaaccagtcttctggcgccacatatttcttggggcataatgtgggagatggcaaaactatggatgaaaggatacaaggttatcatcctggacatcccgctgttgtttgagaccaagatagatcgatggacaaatccagtaactgtggtctgggttaacccagaaacccagattcagaggttgatgtcaagagacgggtgttctgaggaacaagctcagaacagggtcaacgcacaacttgcgttggactggaagaggtcggaagccgacatagtgatcaacaactctggatcactggatgacaccagactgcagttccaggatgtcttgaggaaagtttctgagccattaacatggaaggaacgcttgagatcccgagatggcctgatctccgttgtcgtgtgtacggcagtgggcgtattgcttgctcggaagaatctactatgattctgataaggttcaggaagctaagaacagtgatatgtcgttttagagtagaggacgtacacaattaagcttgtctggtgcctgtgcctgacaaggaaattgaacggctgtatgtggagctttgattgatgaaataatttttttgtttgacgtattgttttttgcaatagaaattgccacagtaacacaatgcatatataggttggctgaagttacctgcccagtgtaatatttttaaagcatgtttgtaacaggaatgacagaggggcgggtattc

SEQ ID NO: 75981 - DNA, 954 bp, Zea Mays
ctcaatctcaagtctcaactagagaagaaaaaaaaaagccccgacggacccgctcccttcaactaacccatcgctgccgccgagcgccttcgactgcggcacctccagcgagaggggggaacccgaggagatgaggctggtcggcctgacgggcgggatcgcgtccgggaagagcactgtctccaacctattcaaggacgccggcgtccccgtcgtcgatgcagacatcgttgctcggtcttctggcgccacatatttcttggggcataatgtgggagatggcaaaactatggatgaaaggatacaaggttatcatcctggacatcccgctgttgtttgagaccaagatagatcgatggacaaatccagtaactgtggtctgggttaacccagaaacccagattcagaggttgatgtcaagagacgggtgttctgaggaacaagctcagaacagggtcaacgcacaacttgcgttggactggaagaggtcggaagccgacatagtgatcaacaactctggatcactggatgacaccagactgcagttccaggatgtcttgaggaaagtttctgagccattaacatggaaggaacgcttgagatcccgagatggcctgatctccgttgtcgtgtgtacggcagtgggcgtattgcttgctcggaagaatctactatgattctgataaggttcaggaagctaagaacagtgatatgtcgttttagagtagaggacgtacacaattaagcttgtctggtgcctgtgcctgacaaggaaattgaacggctgtatgtggagctttgattgatgaaataatttttttgtttgacgtattgttttttgcaatagaaattgccacagtaacacaatgcatatataggttggctgaagttacctgcccagtgtaatatttttaaagcatgtttgtaacaggaatgacagaggggcgggtattc

SEQ ID NO: 75982 - DNA, 1653 bp, Zea Mays
gtccgagccgagctgctgcgagcccgagtcagctcgtcgagttccaactttttttttcagcacctaaagtgtgatgtcgtgtcgtggctcgttaaaacatgtggtctcacctgttgtatatctattgctctgctaatagaaatggagcgccttaaaataaatctcctgctgcagggtaatttccaccttcccgaaagccaaagaggaaaaaggaattgcgcctcccgctacgctattaccgccggcggccgctgccatggacgttggcgcgaaggaggaggagatgggtcaagtgtggtggggccaccgcgcgtggtccctcctctccgctgttcgtgcacgggcgccgctagtgcagtgcatcaccaacctcgtctcaatggacatcgccgccaacgtgctcctcgccgcgggcgcctccccggctatggtccactccctccgcgaggtgcccgactttaccccgcgctgcgacgccgtgtatgtcaacgtcggcacgctctcggaggactggctcccctccatgcgcgccgccgcctccgccggccgcccctgggtgctcgaccccgtcgccgccgccgcctccgggttccggatgaaagcctgcctcgagcttctgtcgctctgcccagcagtcgtcagggggaacgcctctgaaattctcgcgctcgcttcccgctcaaccgccgcctcttccaatttcaagggtgtggacagttcacattgctctgttgatgctattgaagctgcaaaagcgttggcactgtccagcagtgctgttgtcgcggtatctggagctgttgatttcgtcactgatgggaagcaggttatcagcgtgagcaacggtgtgcccatgatgcagaagatcaccgcaacagggtgcgctgtgactgctcttattgctgcatttgttgccatggaaccttctgatgccatagttgcagcggcatgcgctcttgccatctttggtctggtgggagagattgggatggagtcagccaaggggcctgcctctcttaggatgcacctcatcgacgctctctactgcctcaatgaagaaacagtcacttctcgggttaggatttccttgcgaccatgatgcgcggacgcatgccatggctactgttttttcagtccaagctgaagacatggaggcacgatggaataatgcacgtagctggatttgtgttatatgattataatcatatggtgccatggaaacatagaggcacgttgagatgctaaagccatgcagacactagacacaactgacaccttatgatgataaatagcagtagtaaatagaacaaatgtgattcacttgacgcccaacatttgttctttatcagtccaagttggagacatggagtctccttgtcacgataaagagtggtagccaatagaggaaatacgatttaactgtcactatcaattgcaagttttgtaatgaggtcctgagcctcagaatcataggtgtatgaatcagaaatctcagtaatccactttggattgcatgatgataaagcagagtccagaacgagcgacaatgttgggcataggaacaacctaatctagtgttaattgttccattttgaataggaacaacctaatctagtgttaattgactgcacccaacaatttccagaaaagcag

SEQ ID NO: 75983 - DNA, 1841 bp, Zea Mays
gctggtccgagccgagctgctgcgagcccgagtcagctcgtcgagttccaactttttttttcagcacctaaagtgtgatgtcgtgtcgtggctcgttaaaacatgtggtctcacctgttgtatatctattgctctgctaatagaaatggagcgccttaaaataaatctcctgctgcagggtaatttccaccttcccgaaagccaaagaggaaaaaggaattgcgcctcccgctacgctattaccgccggcggccgctgccatggacgttggcgcgaaggaggaggagatgggtcaagtgtggtggggccaccgcgcgtggtccctcctctccgctgttcgtgcacgggcgccgctagtgcagtgcatcaccaacctcgtctcaatggacatcgccgccaacgtgctcctcgccgcgggcgcctccccggctatggtccactccctccgcgaggtgcccgactttaccccgcgctgcgacgccgtgtatgtcaacgtcggcacgctctcggaggactggctcccctccatgcgcgccgccgcctccgccggccgcccctgggtgctcgaccccgtcgccgccgccgcctccgggttccggatgaaagcctgcctcgagcttctgtcgctctgcccagcagtcgtcagggggaacgcctctgaaattctcgcgctcgcttcccgctcaaccgccgcctcttccaatttcaagttcacattgctctgttgatgctattgaagctgcaaaagcgttggcactgtccagcagtgctgttgtcgcggtatctggagctgttgatttcgtcactgatgggaagcaggttatcagcgtgagcaacggtgtgcccatgatgcagaagatcaccgcaacagggtgcgctgtgactgctcttattgctgcatttgttgccatggaaccttctgatgccatagttgcagcggcatgcgctcttgccatctttggtctggtgggagagattgggatggagtcagccaaggggcctgcctctcttaggatgcacctcatcgacgctctctactgcctcaatgaagaaacagtcacttctcgggttaggatttccttgcgaccatgatgcgcggacgcatgccatggctactgttttttcaggtaaatatggagtttcgaataataggaaggctgagttcattttctgaaatgtcttgataaccatgaaaatcatagacactcctttaaccttcacgactgtacgaaatacctagatgtgatgcccaagttgtgcctgaattgtcagctgtacatatttaatacagtaaaatggggaaccttgtttctttttttcagtccaagctgaagacatggaggcacgatggaataatgcacgtagctggatttgtgttatatgattataatcatatggtgccatggaaacatagaggcacgttgagatgctaaagccatgcagacactagacacaactgacaccttatgatgataaatagcagtagtaaatagaacaaatgtgattcacttgacgcccaacatttgttctttatcagtccaagttggagacatggagtctccttgtcacgataaagagtggtagccaatagaggaaatacgatttaactgtcactatcaattgcaagttttgtaatgaggtcctgagcctcagaatcataggtgtatgaatcagaaatctcagtaatccactttggattgcatgatgataaagcagagtccagaacgagcgacaatgttgggcataggaacaacctaatctagtgttaattgttccattttgaataggaacaacctaatctagtgttaattgactgcacccaacaatttccagaaaagcag

SEQ ID NO: 75984 - DNA, 123 bp, Zea Mays
tcggcggcggagatggtctcctctgctggattgcgtgggtttgaacggcgtcgtcggagtcaggagtgggtgggtgtagaacgtgagacggcggtccggcggggtgactagagtcgagaatcg

SEQ ID NO: 75985 - DNA, 615 bp, Zea Mays
ttagaacgaatatgtgctggagctcctctcgtgacgctcttctctcccggcgctggagctcccctatcaagtcttgtccgacggcgctccggggcgctcctctccctggtcccggcggtgctcctcttcctgatgttgatgattactcggcccagccagcagtgcttccccgccagcagtgcttccccgccagtgcttcctcgctcctggctgtgcttccccgcgaccggttatcgttccctgagacgctcggtctcgctcccgacctcaacaatggagaccccgccaggagcgatgacgtcggcaccggctgttgtcatccccgatgacaaccatggtccgtcactattgaagatgttgaccactcattgattaaggcaccaacaacgcttgaggagatcggtgctctgcctcctatggatgttgtaaagcttcgttaatggtcaatggccaatgagagtgttatgtacccaatgagagtgttatgtaccttaaacttgtatttctaagtactataagtgaactttcagtgaacttgttgttttcagtgagctttcagtgaactgttaaccggtattagaatcaatgaactttcattgaactgtgaactaggct

SEQ ID NO: 75986 - DNA, 1746 bp, Zea Mays
acaaatacttgcaaccacaatttgttctgtttgcaagccacaaatatttgcaagccacaagccaagccaagcaaaaccctaagaaacccaccctccctccagtctcctcgacccccgccgccgccgccgccatcacaacccagagcaccccctccccaccccaccctgtcccgatggctgcggacgccgccgctgcggcgatgtccgcgacttccctctgcgacgatctcgagcccgccaccgtgcgcacccgcatccgcgatgtcctggccgcaggtgccgcgcgtgccggggaccgcgtcgtggtcggtgggtgggtccggacgggccgggagcaggggaagggctctttcgccttcctggagctcagcgacgggtcctgcgctgccacgcttcaggccatcgttgacgccgccgtgcacccgctagcgcgcctcaccgccaccggcacctccgtcctcgtcgagggcgtgatcaaggagccgcccgaggggaccaagcagaacgtcgagctgaaggtcagccgcgtgcttgaggtcggcgaggtcgatgccgccgtctacccgctgcccaagggcaaggtcaaactcacgctcgagaagctcagggacgtcgttcatctccgttcgcgcaccaacacgattggagcggttgctaggattaggcaccagttagcctatgcatcacacaggttctttgatgagaatggatttctctatgtacatacaccaataataactacgagtgactgtgaaggtgctggtgagatgtttcaagtgacaactttatttagccaggctgagaaaactgagaaggaattgagagagaacccaaaaccttctgattctgaaattgaggcagctaaagttcttgtcaaggaaaaaggtgatgtggtcgcacagcttaaagctgcaaaagccagcaaacaagagatatcaactgctgtcgatgagcttaatagggcaaaggaaattgtttcaaaactggaggagaggttcaagttaaagcctgggattccacgcaaggatgatggttcaatagcttttgaaaatgacttcttcaaacgtcaagcttttttgacagtgtctggacagcttcaggttgagacatatgcatgtgctcttagtagcgtttatacctttggaccaacattccgggcagagaactcacatacgtcacgacatttggcagagttttggatggttgaaccggaaatcgcatttgcaaacttgcaggatgacatgaactgtgcagaaaaatatgtacagtacctttgcaagtggctgcttgaccattgccaggaagatatggagtttatggtgaaaaattatgataagagtgcaattgaacgcctggagcttgtttcgtcaactccttttgtgcggatttcatacacaaaggctgtggagctcttgaaaaatgttaccgacaagaagtttgacaacaaagttgaatggggaattgatttagcctctgagcatgaaaggtatttaacagaggatatatttaagaagccagttattgtctataactatccgaaaggaataaaggcattttatatgagactcaatgatgatgacaagacggtggctgcaatggatgttcttgtgcctaaggttggtgaattgattggtggaagccaaagggaggaacggttagatgttctgaaacagagccatcgcctacacctacatgccaagacacggtggaatctagcatattttacttggcagttgataacatgac

SEQ ID NO: 75987 - DNA, 625 bp, Zea Mays
agaaaatggccgatgccgaggatatccagcccctcgtctgcgacaacggaactggcatggtcaaggctgggttcgctggcgacgacgccccaagggccgtcttccccagcatcgtggggcgcccgcgccacattggtgtcatggtcgggatggggcagaaggacgcctacgtcggtgacgaggttctgcaaaccgatcatgacaaaaccaaaggtagctttgaagccgcagactctgtctccacaacctgaagcccaagcacctcatgatcctcaaacaccagagcaacaacaaagcgggactggtgtaggcgtgtagctggtgagccgggtagtgaaggaggtgtgtagcaggcctccagtgagcaaatgggcatggtgccagatgcatctgcggccggtggcaggaaggtcgagctggatggggacatgcggtggacatcacaggttggcccctccagtgatccatctcaaacactagccaggtttcctcctttgtcaccctcctttggcagttctcttcctaacgtcgccgtaggttcccttccctgctgtttttgtctcccatagctcttaaaattttaagttccctgtttgcataaaggccacaggaaaaacgttgaatc

SEQ ID NO: 75988 - DNA, 2329 bp, Zea Mays
caacctccgcggactctgccttcttggagcatataaactcgtcgccaccatcaactccctctgtgggcgccaaactcaaccacgcaacgccatggagtccagctctaatttcttgcccttctctgctctcagacccgattgccctcgcgtgcaaaaatcccctgcgtccgagtcgcgctggtgaagaaaagagagagagagagaatcgagcaccaccatggctgcgggataaaggttgccgccaccatcgaacacgggttgtgctttagcccaatgctcggaatgcggtggcggtgcttcggggtagaacactcagtcgcgcggaagccctcgataaaacacggagatcaaccagctgcgggggaatccctcgtcgtcgttgtacaacatgctggttctgctcctcctcgcgagcgcgtgtatctgcgctgtcgaccccgtgaggacacgtgtcatctgaggagcaagttggtacctggaatctcaagtccgaggcaagttgtgcccctgatcacttctttttactcactcatgttctaattaatcataatgatctgcataggttaattttgatgggattggttaccatagtttgactatctttataccttgtttaccattgaattttttgttagtacctactattgctttatgtggttttaggtatagagatacacattattcatgattatacttttattatcagttgttatttattgttcatgttaagatcattatgttaattggaacatggagaaccacccgggaaaacagtgctaccacaagggtggtatgggatgcccttggctgactaattaggaaagctagtagaggactaccttacccgaaaggggcaagggtagtaggggagtggtcagtgtagggaggtccttgggttcattttgttgcgatggcggtcaggcgagggatccctacactggagcttcctataaactgtagcgggatttctgatgctaatggaactttgtaaaggcctagtagtgttaccctgcgtcgcctcctcggtagaggtgtatgggattggccgtctcttggcagatgggtaacattacttgtgggtaaagatgtgcaacctctgcagagtgtaaaactggtatactagccgtgctcacggtcatgagcagctcggaccctcacatgattaatttatggaactaaattcaatttgtcatatgcattgcattgagggtgttgttattacttttgttctactacttaattgggttggtatttacttatacttagtaactgctaataaaattttgaccaacattaaaagcaatgctcagcttcaaccatcctctttggtaagccttacacttcacgtgagctcccacctttggcgagttcatgcacattattccccacaacttgttgagcgatgaacgtatgtcagctcactcttgctgtctcattccccataggtcaagaacaggtaccgcaggatgaggcgcatggaggatgctgtgacgagttcgtgacaggtttaggacatcgtctcccagtcaactttgggttgctggatcgttgtctccttatgatgtaattatttatttattttgtacataactcctatttagtaaagatgtgacattcgtttctgttgggggtcttcttctccaccgaaggtcctcaaggaataaacaccttttgcaagacagtacaaaggcaggtgtgatatgaagatataagccgaagttgatgcgaacaaaagtcaaagctatgactgaaagagcttagtcttggtattgtgataaaggcgaagaacgataccgacttaaagaagaaaagactatatagcccttaatagtttacattatgattataattagttaacaaggacatggatgtaattttgtccgagctgtgtcccgtgcctataaatagatgaacagtacccccgtactgttcatgttgcattgtaatcgctctcgcgtcactctcacattttcaccttctgacgagccgaaggtatcgatgaaatataaatattgtgaatatttatttaagtttatgaaatgagaatgtaaataatttattgatatatcatcattatttacattctttacatcctattgtgtttcatgtaccttcatttatatttatttaccgagatgatgaaggtatgtccttcacgaccttcgtctgaagatcattatacccgaaaggagataatgtttcgaaggacgaaggtctttaatcattaacaattgtgttgctttgttcttgatgtatagcattaaagaacaaggaccaacattggcgcccacctccggtgaactcacttccacagttgcgacgatggctt

SEQ ID NO: 75989 - DNA, 942 bp, Zea Mays
caacttgcataaacttcagtcctcagtccaacacactacaactaaaaacagaactcagagtgtccacagttatgtctgttgctaactcattcaagatcacccatctagtcgtcatcgctattatcatcaacaacatttgggatattgctctcgtcattatcactggcatattgccatcctgtttcatcttcttcgtcctcaaaataatcttcttcatccctttgtctatgtagatcttcaactacacttgcatctataatatcaacattttgtaccccaacaatatcattgtttatatccacttcagtatgctgaatattagaagcaacacattcatcgtcttggtaagaaagcgacacaccatttggtatttcatcactacaattttcatcaacattccaaaggtgtctatgcgcaaatttttgaactacactccagctacctccatatttggtgtcttgcaaataaaaaccatagtagcctgtggcgcaagaatgaaaggatcatttttgtaccaacaactagaacggttgatgcttttcaataatccatcatcttttattcttcccttcttgctttctgtgtcaaaccaatcacatcgaaaaataaccactcaccggtgtccacccttgtctgcattatattgcaactgaattatttctcttaaggaaccataaaattcaatatcttcaccattatgtgtgccttgtgccattacaccactattttgtgtcctcctatatttctcacggtcgacagtgtggtatcgaacaccatcaacaatacatgctgaataaactcttattcgcagatcaggttcacatgacaaagctaatagatcagaacagagatcttctcctcgctcatgccaaagtgttccaatctgtatatataaaatttgtatacaatgagaataacttcaagtaataaaggattaaaatg

SEQ ID NO: 75990 - DNA, 857 bp, Zea Mays
ttacaggccccaacattagcacaaagaacacaatagaccactgatttcacaatgaaaagggagacaatgccttcatggctagaactgttgcttgcaacacaattctttacgacttgtgctaaccatcttcttgctagtcgcaatgaatgtaacctattttgcacccagtgtgagaccaaaccagctgctttctgtaactattgtcgttcaagtgatcattccacccaccgtgtaatccagataaggcgttcatcgtaccatgacgttgtgagggtgtccgagattgaggatatccttgatgtcagcgatgtgcaaacttatgtaatcaatagtgcaaggattgtattcctgaatgagcggccacaactgcgtgcttctagtgtccccatttgtaaggcacccacatcatcaacacagctgcaatgacaagaactacgaagaaccaccaccaaaaagggttgctcgtcacagacgcaagggaattccccaacgtgcgccattcttctaatctgaacatcatgacaatgtccagtaaatgttgtgggaaataagaagagataatatttgtcatgggtgaaatgaatgaatgaaataaataaaagaatgaatgaatggccccagttctatgtaggattgatttcttcacattgcgagcctttcaaaaaaaattactagagcatctagcgattgttctctcaaagcatgtaattgttataccggaagcacacagttttaatcatagcctttatgacttaagtagttctaaccgtaggtttactttgaatcataaacactacaagacacaagatcattttcggcggccagaagccaccgaaaataagacatacaccgccgaa

SEQ ID NO: 75991 - DNA, 2297 bp, Zea Mays
ctccttttctctaccgcggtctctcctttctctccctcacggtgccttcttcatcacgcggcgctcacatcttccagccggagctctgctcctctctcttcctcactgttcacgcgcgtccccagctcctatgccgcgcccggcctgctcctcttcctctgccgcacgccatggaactctctgcgtcgcacccttgtcttcagcccggcgctcatctctctactcgtcttctccctgctgtgcgcgccggctccctgcacgcagccgggccacgcggctctctggtgctcgcccctagccccagccgttcctcctcctgtagctcgaccctgcgcgttgtggtctccctcctccaagctcccatggcgtccgactctgctctcccatgcagcagcgatccaccacgcactcctccttcctcctcctcgccgcgctctgctgcccagctacttgatgcgcgcgcggttctctgctcccctgcgcgcagacttcttctgctagctcgccctaacgccggctcggcctctcctatggcgtccggcgcttttatcgagctccatctctcatccaccctccctgtgccagctcgatggccatgactcgtcctggaagctatctgtcgagcctatcttctccttgctacagtgttcgtcggcgtcaagcacctgtgccccggtcttctaattcggctgcatgccctccgattcgatttcggtagctgaccactgtcgcatatgtcctgggccgttccttctcgtcttcctttcaagatgacgccacgctccttcctattcatcgcagtctagctcgaagtgtgttgccggagcccctcacgttcattgtagatgtcgagacgtcggtcgtcaagatctgctcagtcgtcgttctcctttgtgctcgctatccgtcgcgacgtcccaaatctgtcgcgccatactcggatctcgccaatcgcatcttggccggtcgtcgatttcctatacgtcagggtacaactctgttgttaaatccggtctccaacccaccatggcgttcgtcgtcctctggtcccaatctgacccatccgtgcactcgctcctcatccatcaggcttcgcgcgtgctcacgtttgccatcgagctattgaacccatcctcccttgctcgtgacttcatcgttgccagagtcctcactgaattcttgtcctctccagctcactccagactcgatctcgtcgtcgttctgtgcgtcgtcaagaaatcccaagcgtcaggtgaagacgaagctagccggatgatattcatcaagtgctcgacaaaagctcgaacaagtcgccgatcatcatcctcgtctacgccaagctctgagaagattaggcgcagaggaaaataaatcagtacatggccagagaattctcgatgtggacaaagaagaagcacaattcgacgcagcactcaccctattttcggtgaaatgttgagctgaaaggcgtcgtcaatttcgtggtttcaagtcgcatgtcataagggtaagttgattcgtattctagtcaactaggtctataaatagattaaatagaagtgttggtcacaacaaatgttattaatttagcatgcgtatatggtgatgatcgatttagataaatcggtaaatcaagtcattaaaatacacagtttaaagagttaataaaaagctaggaataaaaatagattttctagtgttattatgtcaatttggttaatggatgaagtcgatgccctgcttaattagttagtttattctaggtttggtgtttaattcgctgtcgtataagtattatttaggtttgcgatattcctccttatatgcatacatgtgcattatgcatatcatccaggtacgttaattaatcacgtgatgcggaagacaaaccaagtcgaccccaagcgcgggctaatccgtaggataatgctgatggatgaaccagcctgatcaagtgctaggacaaggatgatcgtcaagtggactgaagcgcttctccgagggccacgacatcacatgaacagggcagcaacacccctccaacagccacgtcgacatgtacacagggctctggctcctctccgctaggcacgttagcatattgctacacccccattgtacacctgggccttctccttacaactataaaatgaaggtccagggccctcgtacgagaaggtggccgcgcgggagaacgggctgacacacaaggctctcgctctctctctccctcgcgaacgcttgtaaccccttactgcaagcgcatccgccctgggcgcaggacaacacgaggccgc

SEQ ID NO: 75992 - DNA, 5148 bp, Zea Mays
ggattagctaataaaaaggagagattatctctagttagttagataagattagataaggattagctaataaaaaggagagattatctctagttagttggataaggattagaagagatctcatagctctaatccttagatcagataaacatcagttgggatataaatacttgtaagaggtcatctatggaattaagcagaatcagattattctggcttccctgagggagccaggagttggaatcaatctctcttgcccgcgcagcctaggtcagccatggcgccccagcgccgccgcccccatctcccttgcgcagctgttcatccttataggctaagggagatccctgctaggatccgcaatcctaccaatttggtaccagagaccttcgatcctccggccaccatgagttcttcgtcgcaatccccaccggcctccatggccgctgcgcctccagccaccgcgccacgcaggccctgacctccacgctgggccttcccaccaccgggtcgtcatacaatctgcccacgatgacgaacgaacagctcacagcggacatcctccatttctccacgaacttggcagcgctgcaagctggtctgtccgagatcaagctccacctggcgggcacccagccgcagcccacactgtcgtcgtcgtctgtggccagcgcgacaatggcggcttcaccgcagccggccctaacggcgccatttgtaccgctccatcagttgcagttcccgcgctcgccgtcggagatcccagcatgggcgcgagggcctgaaccgtcaccggtcttttcgacgacaccgccgatcaccaccgccgtgccgcaactgccaccaggcgtcctgttcaggggggtggatgggactctttcccccccccccccaccaccaccacgacagggctgtcacggatccaatcccgccaaaattctacaagctggagttcaccacgtatgacggcaccgaggaccccttgaattggctcaatcactgtgagtagttcttctgtggccagaggacgccggccacagatcgcatgtggcttgcgtcctatcatcttcggggcgcggctcagacatggtactacaccctggagcaggataccgggataccgacatgggagcgcttcaaagagctatgccacctacagtttgggcctcctgttcgggattcgcgcctcgcggagctcggtcggctacagttccgcacgacggtacaggagttcacagagcggttcaacgtcgtcctctgccacgctcgcaacctcaacgcagttcagaaggcggagctgtttgtggggggcttaccggaccacatccgtgttgatgtggctttgcgcgcaccccaggatcttcatacggcggtctacttggccggcgccttcgagctacgcgccaacagcctcatggcgcagtttccgacgggaccccggcgcgtggcgcggcgcagcagcgggtcacccaggccccgaccgcgtagagtggcgctccacagtcggccgcggctgccctaccgccgatccgacaatttcgtcgcctcacgccggcggaacagcaggaacgtcgtcgccaaggcatgtgtttcaactgcgatgagccctacgtcagaggccaccattgcaaacgactcttctacttggagtcgagcgacttcgacatggaggacggcgcggtggacgctgcaccgaacgccaagccagacgacaacctgccgccacaggacgtcactacggccactgcgtgtgtggtctctctacatgcactcgagggcatccgtacggagaacacgatgatcatgctcgtggtgctcaagggcgtgcgcttcctggctctcctcgacaccggctccacccataattttctacagggcgccgcgatggcccgactaggcctcaccccgctcaacggcgaccagctacgggtcaccgtggccaatggtgatcgccttcggtgcgctgggattgcacgccacgtgcccatctccatcgcaggcgacgagtacaccatcacctgggtcgacatcgacttgggctgctttgacttcctccgcaccctcggcgacatcacgtggaacctggagactgtgacgctagccttccagtgcgacgttcaccgcatcgtgtggaacggggtccagggcaaggaggcgacgtgtacgacgacaccgacgacggtcgtggcagtggccgagccgcagcagccactgctggaccgactacttcaggagcacagcgccatcttcgaggaaccgcgaggtcttccacccgcgcgaccgtacgaccaccgcatccacctgctgtccggcacggcatttgtagtcgtgcgcctgtaccgctacccccagctccagaaggacgaactggagcaccagtgcgcggcgatgctggcacagggcatcatccgccccagcacgtccccgttctccgcactgatgctcctggttcgcaaggcggacaagacgtggcgcttctgcatcaactacaggtccctgaacgctaagacgtcgaaggacaaattctcgatctcgatggttgacgagctacatggcgcccacttcttcaccaagctcgacctccgctcagggtaccaccaggtgcggatgtggcccgacgacatcgccaatacggcattccacacccaccatagccactacgagttcttggtcatgcccttcagcctctccaatgcaccagcaacgtttcaggcgcttatgaatgacgtgttgcgccccctacctgaggcgatttgtcttggtattttttgatgatatactgatctacagctcatcgtgggcgacacacctccagcacatcgccatcgtcctcaccgcgttgcgggcgcatcacccccacctaaagcactcgaaatgctccttcgggtcaccctcggtggcctacttgggccacatcatctccgtgtagggcgtggccatggacgacgccaagattacggcggtgcgcgagtggccgacaccgcactcggcccacgatcttcggggcttccaccgcctcgtcggatactacaagaagttcatcaaggacttcggcgtcatagccgccccactcacacgcctcctacggtgtgacgcgtttgtgtgggacaacgaagcgaccacggcattccaggcgctgaaggaggccctcaccacgggaccgatccttcagatgcccgacttcaacaaactcttcatggtggactgcgacgcgtcgggcacaggcttcgacgttgtgctccaccagggggcggggcccctggcgtacttcagtcggcccttcgcagcccatcatctcaagctcgcaacctatgagcgtgagctaatcgggctggttcaggtcgttcgacactggcgcccgtatctacgggggcgcgccttcttggtgcgtaccgatcactatagtctaaagtttttgcttgaccagcgtttgttgattgttcctcagcaccagtggatcagcaaactctttggctacaacttcgaggtggaatacagaccggggcgtctcaatgtcgcggtggacgctctatcccgccgcgattacgcggacgatgatgcgccctgggccacaagcgcagtattggccatattcgggctatcgttcgccttcctggaggacgtgcgcagggccacggcagccgcaaccgacgctcagcagctgctaggccgcctccgcgccggtgacctgggtgcgccatggcgcgaggaagcgggacttctactacatggccggcacatttacgtgtcggactccagacttgtgccaccaagccctcctactaactcactcggccgggcataagggcattcagaaaacactgcatcgactccgcgccgacttctacattccgagagatcggttcctagtcgcggactgggtccggtcttgcgtcacgtgccagcgcaacaagaccctgactttattgtcggctgggttgctacagccccttgaggtgtcgtcctaggtgtgggccgacatctccatggacttcatcgaatggctgcgtaaagtcgggggcaagtctgttatcctcacggtggtcgatcgcttctccaagtatgcgcatttcatcgcgctcggccacccatacacagcatcatcagtcatccgagcttcctttgatggccgtataaactgcagctaccgaccgactcacgccttcatgacgtcttccatgtggggttgttgaagccccaccgtggtgatcccccggaggcgccgggtgctttgccactggtccaagacgggcgtatactgccgacgcccgaacgagctctccacgcacgcaaacgacgcgatgtctggcaggtccttatcaagtggcacggacttggggacgaagatgcaacgtgggagctcttggaggatttccgagcgacataccctgactttcagctcaaggacgagctgtttcagcaggcggggagagatgttatgaccgacatcccctacaccaggcgcagggacattagtggctaggagggctaaggcccacggccaggccacaggccacatgcggattagataaggattagctaataaaaaggagagattatctctagttagttggataaggattagaagagatctcatagctcttatccttagatcagataagcatcagttgggatataaatacttgtaagaggtcatctatagaattaagcagaatcagattattctggcttccctgagggagccaggagttggaatcaatctctcttgcccgcgcaacctaggtcagccacggcaccccagcgtcgccgcccccatctccctcgcaactgttcatccttataggctaagggagatccctggtaggatccgcaatcctaccagttaagcaccaagattacgattgacatgctaaacaatatattgcaaaattatgaggaagtaatgtccaatagactggaaaacaggcaacaaacacacacaaaatagcagaagttgaggaaacttcaatatctagtgcaaattacaataataataatttggatgagaaataccatgaggtaagatataattccataaaatggagccattggttagctttcaaaaaacaagaaatttacaagtgcggcattcttggaatccttggctccctaggcttcgctggtgcaccttggcgaagcgcttgcttaaag

SEQ ID NO: 75993 - DNA, 1269 bp, Zea Mays
aaatagtcaaataccaatataccaactttatcttatttactttatttttcttagaatagacttacgtttagccttagcagtagctttccaatctagtcttcacctccttcacatctacgtcatcttatgatactttgatggtctgattctgaagcaattttagaaccattcatctctgacgagatcccttctaaaaggtgggacctaggtctcgtttgaaatcctcgtcacggacaattcgcagagaggacattaaagctctacatatcacagatattataggataatgcacacattatccaatgcaagaatatgagatattgaacggcgtcatcaacactgggcttttccatttctccaacgtccacgagacgccgccacgccatcggcatgggcagggcagcagcaccacttctaccgcgtcccattattgcccagttccatctccatccccaccatctcgtccaccagtcgtgtcttccctatctccacgctaccgcacctgtcgccgccgcctccgccctctttgctcccggccccacttcaagcccaagcgtccgcgtctcccgcccgcgccgccacgcctcgatgtccgccgccgccgattcctcctcctccattgtatcgggtgatgcagcggttagctcgctctcgcccgatagcatcgagcacaacgatctgctcatagttgggcctggcgtgctcggacgaattcgtcgctgagatgtggaaacaggaatatccaggttgcaaggtttatggccagactgcaaccacagatcatcacagtgaattgactgatattggtatcattccctccttgaaggggtccgtaccgggtccaaaatttccatatgttatcttctgtgctcctccatatcgttctgaggattatgctggagatctgaggtaaataattgtaagctttcaatcataattgtctccgttattcatgttctatgccactcatagtctgacatatatgctctgcattttatcttcaacagaaaaaaatattgaaatctctgtagtcaatacttggaagttatgtaagagcatctccaatagttcaaaaaatgacaaatcaatgagtttccaaagtggttaaaaaagtcaggagcacatttgttaggttcccccaacgatttccaaaactcgctcctaaaatattgaagtcaattttacatcaggaatcccgaactattttcaaaccagcctaaccaattttatacttaatttctctcttataaattttgtcggtgtttagac

SEQ ID NO: 75994 - DNA, 16416 bp, Zea Mays
ctcacccatgcaagttgctctgccggttcgtgttccggtgtggcaacgtctcaagtggcgggctacgcataaagagccttcctggcagcgcatcaaggtcatgcctcagccacaagtgatggagaaacgtaaacaagtgtggaagagaattacccccctgtcagctggacaggatagggtagtgcacacctcccctatgtcggcaggggcctctgttcagggaagggcctctttttaggatcaagcctccccttccaagcgtggaagaaagcgacggaggcgccctcaccataagagcacggaagcacacctctctcaggcagcctgctttggaggtggaggtgggtgctgatctccagtgtgatccgcacccggtagatagtagcaccacggttccggctgctccgggacgcagatgtgtgatggaattctaccctgccatcgcacgcgaagaaatcaggctaagggcagctttgttcgtcaccgttgtgggtacaaggccatcagtaacaccttctgaggtaattttggaagttgcacaaatatatgatctgcctgaatcaagtttcaccattcacaaggcctggccagaagatttcatgctagtttttcaagatgaggatactgcagtacgggtgtttgataatggaagagtgcttcactgcccggattttgagttgaagttcaagaaatggtcacggtttgctcattccactggtgtttccttgccagttttggtggatgtggaactttgtggcatcccagctcacgcatggagtaagtctacagtagacaaaatgctcggggaatcttgttggatttcagagttgtcttcagaaactgtggccaaatgtgatctttcatccttcacttcagaaaccttcgcctcctcaactctgcctttatcacattgttgccaaaaagggagggcgctcatggtgctgctgattttcgccccattagcctgattcacagttttgctaagttcatgacaaagatcttggccaacaggctcggggaaaagctggattgcttaatttcaaaaaaccaaagtgctttcatataacactataaaaaccatcaactaaaataatgcatttagattattaatggtaataaattttcttcctaatttttgatttttatttgcatctagaataatttttgtttgctcatattcgatttttggatgtttagtagaatttctttcttaacgaaaatccaattgattaatatagaaataatggtccaaaaataaatattttagttataaataaatttcggtataattattatgatttttgaattattttaaaaaatatatatttatatttttaaaatagaaaagaaaaggaaaaaaacacaaaccctagccgccagcccactaaccggcccagccgacccctctcccattcccccccaccgctctctctatggcgcgcgggccgcacccgtcagggccccgcggccccttctctttttccacccagcgccgccgcctggccgtgcgcgcgccgcgcccgcgtcccctcctcttccctgcaccagtaacagccgccgccacctcccccactccctccccacttaatctcttagttagtgaagaaatggctgccatcaacgttgaggtaatggtcgcctccattaatggccggccgaccgttttctctccccctggcgccctctccctctctataaaaggactcgaccgagctctcctctctctccctccctacccgtgctccctgtctctctcccctacccgcgccgtcgccggagccgcgccctgctcgccgccggaactcgccgtcgtgcctcgccgttcgtcgttcggttgctggagacgtgcccgagccccgctgaacctagtcgtgcccgcgcagtccgtcgtcgaccgcgtcgtgcccgcaccgtgcccccgtgcctcaccaccgtctgttcgtccaaggttgaagacaacccaaaattttgatttatttttcaaagcgtgttttgaattagtttatgaatttgtaattattgtgttgtaatatgagaatgttgtgattcagaattcatgcgtatgtgaactattgatttttggtatatatgcgatgaattagtggattattattagacatgatattggtttacgatttctttagaatttgggattgaaatgaactatgacaaaattggtagacatatgttggtaataaaaacactcgataagtaatttcatagttaaatttgtttacgttgaattttagaatttatctaaaagtttataattataggttcatttaaaccccctaaatagataatagaagattttcttaacatagaattagtaagtggtatagaattcatagcaatacaaatattatagtctaatcagtggtttaatttattattagatgtttggacctctgattattataatgacattttcttttagaaaggataagattaaaaggatatgtttattcataatagaaataattaattggtaattaatttatttctgtagaattggttaagtcatttcatctaagttatattgttagggcctaaggagacccatggaggggctgcagcagcaacagccatgggccctccaagggggattagataaggatagttaaagataagattaaaagattagttgagattatttaggagattagttgagattatctaagaaggttatcagttagtagtttgttgagagtttttaggagagttttaaggagataaggatctctagctagataggggcggccagccgatctatttatgtaatcaatggatgagaaataaagcagacaaaaattagaaaggagaaatcctcctcttgctcggccgtgggcagaggcccccagccgacgtttctggacgccggcgtgcccatccccaggtacaacgccaaattttgtcacatcatcttcgttgatggcatctccgtcccatccccatgggcgacaccactaggggcagccccggctcaacaatcaccagattcatcgatgagggatttgtggaccaacataagggctgatctcgcaaagatgtaagccacgctccagaaggttaagcaagggctgctgcaaatcaaggcagcagtgcaacatgagcagcaccagctggcgttgtccgcacggctccagacgtaagcggctgtgggcatacaagctgctgctcgtggcttccttgcacgacggagagtgcaggagatgcatcggcgaatgcttgaggcagccttggtgacagttgatctcggcacacgggggcgcaacctcgccttgtcggatggccatcagcagcggcactgtagcatcccaaaaattcaaatcttagaattttctcaaactcgctctaaattcaaaatgaattttaaatttcatttcaaaatgtttgtttgtgagttgatatcaacaaataaaatatagtggtctatattttctccaaaatcctcctcaaaatatcctacaaatgtttctccagtgactcctgtcaaattctttccagaaatactacccagatattaccccagtgatccccgtcaaattctgttcagaaatactgcccaaatattccaccaatacttctctaagtattttcctcctgagagataccttcaaaataatttttacaggccctacaaatattttcttcataactttcctcatgctcatacgtatatgtatgcctccggtgtcatacgttgaactctacaagctaatctcacttatacaagacaaatacatgctaatctctcactaatcctcccatcctcccactaatcctctcatccctccccctaatccccccaacatggctataaatagaggggcaagggcctcctctcaagccaccccaagtcatttcatggcaactctctcctcccccccccacacacgcccactccacttcccacacaagcacacactagcacaaggatcgttcagtcgtttttcgatcgttcgtccacctgttcttagtttgttcgttcgttcgtctgatcgttcgatcgttcgtccgatcgttcatggttcgttcatccgttcgtccgatcgttcgatcgttcgtccgttcgttcgtccaaataatctttttcctgccgttatgctgccgaaattccgatcgttcgttcgttcgatcattcgatcgttcatcgttcgttcatagttcctattcatcgttcgttcatagtaactattcatcgttcgtctagataatctttgtcttgccgttatgctaccgaagtttcgatcgttcgttcgtccgatcattcgatcgtttgtccgttcgttcatagttcctattcatcgttcatcgttcgttcatagtcactattcatcgttactattcatcgatcatccgatcaccccaaatttcaattactcatccgtcatgctgtccagtccacctaagaccagccagaccaatattccagtcatacgaactacggtgactgtgattttccttgcagtagggaacttcccatctggtcacccatcacaggtttctccaagttgagcacgcttaactttgagattccttcgaaccaggcttccaaactcagattccaataattcttgtttctaaattcttatcaaactattccctatccaaccatgtcatcccttaagcatggttcatgttccagaaaactcccaaaatactcttgtcccgtattctgcctatagctctcctgttcatactaagtcaaacgattcattcgtcactattctcaccaacagtgaacttcgcatgtgctacaccacatacacccagctataaatacactcagctaccatctccctctccacacacactcaacaccctcagccaaggcaaacaccccacccactcagttactccgctctgccggctacatgcatagtgtcgcttcgcctctagtccaccctcctggtaagcacctccgctccaccacaagtagtatctcaacaccacatgacacagattctactcaagactctacccatccatatatcgctattctgaccactatactaaatatctgttgatatacttgctggtttgtatgtttgcttatccatgttgcatagttatcggagcattcgtgccgtctcgtggaggccagatctgcaagtctacgccaggcagtggagctagaagccagttccgcgagctccccttcccccttcgccggataagcacgacaagctcactggatcattttgatgcataaattacctatgctttttaaaccacaaccctcagcctgttattttatgcatgatatgattttgagacaagttattatggccacccagccgcttgccgcaatcaatccttgatatatttgttacaaatgatttgagaaaaggtgtgagttttcaaaagaaaatgttttccaaaatgagtatgatgaagggttttaacccttatcacctttgagtagggatgatcagggactccctagtttaggggagggcctaaggtgatggctcagccgggttaggtgtgagcagaaggattgtcctctcatataaggaccggtttgtcatccttcactacctatactcatgataagtacaaccactcgagactgtatgggcagtcactcaatctgaactcgtacggtccaaaccctagggttatgaaggctggggagcaccgggaggataaggagggggaaagttttgtccggtttggacatggcggtggcctgactccttccggtataaccgttaagataaggacgtgcgaggaaagaaagagattcggtttcgggtctcattggccatgagatcgcagaaccggactagtgggtaaagtgtacacctctgcgcagagtttgaaaacctattcgaataatccgtatccactggaatggacgagtctggtgtggtatgacaattagtgttttgttttccaaaaagaagtgcttttgaaaagtggttccggcggttgagccgtcagctatggtggacgagaagtccagtagctatttttgaaaatgaaaaccagtgggaaactgctgagatacctggatggtttagtctaggggattttgttctatattgaaaaacttcctgctcctttgggagaggatgtggtttgcaaaatacaaaatgttttacaaaacaaccctgcataaaatattgttgtttctgcaaaatatcctgagctccacatattccatgcattatatctgatttccccattccgcgggtgaaggtgggctgctgagtacgtttgtactcacccttgcttatttgttgtttttcagaaaaaggagatcgagtaagagttatgcttgttcccaaccttgcctgtgtctgttggaccgctgatttgcttcgctgcgtatatcgggctgcttcagccccactctaatgatatgtcccgagttgtggaccaactcttaaagttgttcgccacctttatagatttgtgtcgtttaagcagatttgtaatcatctgatgtataaatgtgtttactagcctcctgggactagtaattatatcacatttgagtcccagaggatctgggacgcttcaggcaccgggccgctatctccaagtgcgagcatggtacgtgtcccgcggacgacgaacttcaactctacggcagcggcggtaaggaaggcactccctttgtcatcggcaagggcgcactatttagcgccaccacattccgctaccggtcgccacgagggcgcctccgctggttattgttacgacctattccatgtgtccgtctatgtgctctcctttcgtccagatggcgtccatgggatccaggtggctgcacacgtgcaagtccaatgcgcggagggtgtccgccttatcttatggggtctaaaaaatcagattcggaataataagataagccgagatgtaaaaggtttgtcttctaggtttctcgttttaggtcgagtagattcggtctttgagcacctgtcatgctgcagctcgaggacgagctgcttgtccaggaggggtgtagcgttagggtctaaggaggcccatggaggggctgcagcagcaacagccatcggccctccaagggggattagataaggatagttaaagataagattaaaagattagttgagattatttaggagattagttgagattatctagaaaagttatcagttagtagtttgttgagagtttttaggagagttttaaggagataaggatctctagctagatagggcggccagccggcctatttatgtaatcaatggataagaaataaagcaggcatgaattagaagggagaaaccctcctcttgctcgagcgtgggcagagacccccgaccgacgttcctgtccatcgatacctctctccaatccctcaccgatttagcgaccataacatatataaaatactttcataatcacatgtccatgtaactttcaccagtagtgatccaaagtaggagttaaaattcacatatgtcagtacatgtagactaatgctgtgaatacaaatttggttttattctaggcactattatacgtataggttgtgtggtgtatgcttgttcatgtaatggtgaatgttgttcatgtgatggtgtatgttatttattcggcgtatgtattctttttgtatgtacgatacgcaaatcgatgctagaagttgactgtggggtagacgaaccaaactcgttcgaggacgacccacaggacacttacaagcaaggcaagagggggagcggcagtggtggcagctaatgttaacatggggacgtattcttggctaaggtacctcgcccaaagggcctccacaccgacttggaaaccttagcaggttgctttgtattaagtgtattttgtgaaaacctcatagtggatccctagccattcacctcggcagtgtttaagggtctgtacaacccaggctagatgggatacacatcttgtgggtaaagttgtaccacctctgcagagtgtaaaactgatatgtcagccgtgctcacggttaagagcaaactagaccctcatatgataattgaacttaaagatggacaataaatcgagatctgatgatctgccaataatttgcttaagtggtttcacttaagtgtttttaatatactcttatacctttgtttaataattgggatacttgggatacacactgatttgtaagacaggtgttgctaatataatattgaccaactaaaatgcttaccgcttaaccttagtcttatcttgttaaacttgcattaattttcccccacttgttgagccccgaccataagtgagctcacccttgctaatattttgatcagagggtgatgaagaaaaccttgatagatatttcgatgaatactgagtctaacgatgcgtcggtcatcttcctgtgggagattactcatgttatttctgatttactttgatgatactgtttaagatactattgtctgaatgttgtaataaagactactctactctctttacgcctttattgcattgtcttttgatatattacacttgtgacgtcaacatatgtgtggaaaatagatcctggtacacatatgctatgcattcagttttgcccttaaaaaccgggtgtgacatttcattaaaagtagatttatacaggataactttatgatggtgcagcaaactgctagatatcttcatgcttagaaacagcccagaatcctccttaaattagacatttctaaggccttcgacatcgtatcttggccctttcttttggaggtgttgaaaaaattggggtttggatatgtgtggagagatattattagtggcatcctttctacttcctcaacacatatcctgttgaatggtgtcccaggtgactacatctctcatcatagagggttgaggctaggagattccctctctccgatgcttttcatagttatggatactcttaacctgctgatttctagagcagccgaagctggtcttctccatcccctctcctcgagatccaatcttcataggctctctttgtacgctgacgatgtggtcctcaacccttcctgagaccttcacctgcagagaatgagctgattctaaagatcttacaactatttggggaggcctatggactgaagacaaacattcagaagagtagtgtgcttcctattcattgtgcgccaaaactaatagaatccattcagaatcagcccccttgtaaggtggatggcttcccttcaaatatcccgggttgcccctatctttgaagaagttgtccaaggcacaacagcaatttctggtagtcaaggtagctgacctttttcctggctggaccggctgatctaatgactacagctgggagagctgttctggttcagtatgtgctaactgcaactataatttatcatgctatggctctggatcttcctcagggaataattcatgtcattgataaaatcaggcgaggattcttatgttgaggcagaaagaatgctgaaggagggcattgtcttgctgcttggaagaaagtaacaaggcctaaggagcttggtcttgggatttcgaatcttcaatgccttaactggtctctcaaattaagatggttgtggctcaggaaaaccgagccggacaaaccttgggctgttttcaaactgcatgcagcttccacggtccacagtttcttctctttggccacggtaactaagctaggtgatggtaagtcaacgctattttgaaaaggtaggtggctgtggggcaaacgtttacaagattgggctcctcatcttctcagatcggtttccaagagaattatcaataaaagaactgtagccaaggccttggctgattggagatggttgagggacattcatggaacccttactttgcaaatcctacaggagttcttgcttatcttggagcagttagagggaataatcctgcagcaaggaattcctgacaaacacctgtggaggctctctaattcagggcaatacacggccaaatcagcctatgatgcctttttctaggtttaaccttatttgggacagctgacctattgtggaaagggtgggctaccccaaaatgttccttcttcatgtggcttgttgctcataaccgttgctggacagcagaccggttggctaaaaggaatctcccccaccccactctttgtgtgctatgcgatcaggaaaaggaaactattaaccaccttctagctaagtgtttttgctaggcaattttggttctactttctgcaaaggttgggtctgtctgtcctctcacctcaacccgggtcggagtccttggagtggtggctgcaggcagtgtctgtgaccgataaagctttgaaatggggattaaattctctcatcattttaggggcctggatcttgtggaaacacaggaatgatattatcttcaacggtgccactccccatctctctactgctctctccaatgctggagaggaggcctggtgttggagcaaggctggtgtaaaaggcctccagctccagttggtgcaggatgtggaggatgtaggttttttaccttagagtcatcaggttgctggctgctgttgctggtttttttcctaaccggctctctgtagtccaacctgtgggtagtgtgtttgtctgtgtgccttagcctttggctgggcgtgtgtaatttctttcctttcatcctccttttaatgaaatgatatgcagctctcctgtgtattcgagaaaaaaagtattaaagcaggagatattcagttcaggatctgataggataggctatccttcttgtttggaaggttctctgattgggggtctaatagataagagatcctttctatttaggtagtcctggttctaggagatcaatcagaccctatttctataagccgtttgatctctatatatcctgtgaacctctgtgcatctattcatcaaccatatctacagcatatctcccctcatggtatcacgagtttgggttctcgttcctcactcttccactgtttagcgcgcctctccggcgctgctgtatcgcgcctcctagcgctgctccttggcagttgctgcttcatgcgcactatcccatggccggtgtacagacgttgtccatccctatcacttccgacagcgctctcgctacagatcataccaacgccaccgaagaggacatgcgcctccgcgccgcccaactcgctcacgacgctgagcgcgaagcggccgcagccaccagggagcgcaacgccattgacacctgcatccgcaccgctctagcgcacacggcctaggcttgtgccgccattggactcattcctgacgccgagccgcgcctgaagacgacgctacctccacccagtctaatctccatgcatcaggagatgcacacgctgccctcctcatccacgaggcagccaccctcctcaacctccatgcacaggccgtggcggttcagaacctctcggctctcacccctgttgttcttgacatctcctccttctacactaggtggcgcgactcctccctgcttgttgtcggcaagtacacgctgacagatcacgtgctcactgacacatctgcatcctcttctcgttgggtgcaaatggactgcgtcgtcaagtcatggatcgtcggcaccatcaccaccgagcttggtgctgccatgctcatatgtgacgcctctgctcgcgacgattggctcgccatcgggtcccagttcctcgagaatcacgaaactcgggctctcttccttgacgcggagtttcgcaacttccgccaaggcgacctctccatcaccgactactgccgcaagctcaaagagatggctgacgctctcggtctcggcgatctcggcgagccggtccatgacgacactctcgtcctcaacgtcattcgtggtctaaatgagtgcttcgccagcattgggcttcaccatcggtgcaggtgacccctccctaccttcctagaggttcgaaatgacttgttacttgaggaactaacccttgtacatcactcctcagtaccagcttctacccgcctcgccaccggcgccaacaagactccaatcagcaagccaaagccaccgctgctgcagcatccccctagcagctccaagcgcgggacgcatgctggaaagagaggtgggcgtctagggctgaaaaaactcgaagctcgcgagctggctcgagcacggagcgacttagctcagctcggagcggctcgcgagcctcgagcgagccaagccgagctaggttttcgtgctcattgaggcaaagagccgagtcgctctagctcgctaactactcaaaattaatcaacgattgatattggatacaattataatttagattacttgtaatgtcgcattatgattatttatttcacatttatagactattagttcactatataatgtaatattattttttgaaggccctgtcaccggtaccacggacctatcgcgccgctctcgctgatccaaattggcgaaaggctatggaggaagagttctcctccctactaggtaatcatacatggggtctagtgcctcgtccccagtctgccaatattgtttcttgcaagtggattttcaaacgcaaattcaatgttgacggttctcttgagaggtacaaggcaatgtggcttcttcgtggtttttcgcagcgccctagtattgactttgatgagacttttagtcctgttgttttttttttctcgaacacgcaggagaactgcgcgtcattatattgaaagagagaaaggtccgaaatggaccaaagtacaaagccctaacaggcaaaaatacaaagaaactaaaacagtgtagcctcatacactaggaaaagccctagcccccctagcaaatgcagccagaagcccaagactctcgagctgcttcgcaccagccaaacaccagcactccacctcatccaagaaaagcctctgaatggtgcttaatgacggattgacaccatcaaaaaccgccctattgcgatgcagccataaacaccaggcccccaggataatgagactatggaaaccttttctgatatgtttggggacccttctatgcaccttgccccaccaatccacaaaagagcccgcctccctagtaggcgtaagatgacccatcctcaaagctgaaaatataatatgccaaaattgtctagcgaaactgcaggagcacaagaggtgcaatatagtttcctgctcttgatcacaaagtggacagaccaccgggtgaggtaatcctttcctctgaagtctatccgcagtccaacatttatccttatcgccagccaaataaaaaatttgcatttggggggtgcccacgacttccacacccatttccatggctggaaaataatagctcccataaacaacgccgaataacaagatttggaagagaaaacaccagagctcgagtgcacccacacatgtctgtcctcctccagattaagcaccactccacttaaagcatcccacagctgcaaatactgatgaagaccaatcaaagataaaggattcgtgatatcgcgaatccattgcccattatgcaacgcctgagcaacagttctcgaactaaatggcttgctgctcaccatattaacaacttcaggtgcaaaatcctgtatcctctgcccattcagccatctgtctgaccagaaaaaagtattggtcccattcccaacaacagagatcaccgaagcattaaaaaattgtctaacttgctgctgcacagggatacacaaaccaagccacggccgagttggatcagtcttctctagccaaagccacttagcctgcagtgcccaactcatcaattgcaaattaggaacaccaagaccccctaaacttagtggccttgtcacactctcctagggaacagcacaacttccaccattcacctcctttcgccctttccaaagaaaccctctgcgaatcttgtcaattgatttaataacccatttgggaattttaattgcaataaggagataaattgggatggctgataagacaaaccgcaccaatgttgtcctgccggccaggttcaataaacgagccttccagttagggagtctgtctgcaattttatctatccacatcttaagatcatttcgcttcagcttcctgtctgagattggcagccccaagtaagagcaaggaaatgaggccaaactgcacctcagcacattgcagccctcttgaaccacatgctcctcacatctgataggaatagcataactcttattcaaattggtaaccaatccagaggctgacccaaaacaattcagaattaatctaacacatttcagatcttcctcaataggtttaacaaacaggaccacatcatcagcgtagatagaaagcctattacggactcctgccctttccaaactatgcagcaatcccctacattcagcagccctaaatagactgctaagcacgtccatgatcagcacaaacaacataggagagagagggtctccctgacgaagacctctccgatgctttatatggattccaggagacccatttaataacacttgcgtagaagctgtagccagcagatttgaaatcaaattgcgccaaataggaccgaaacccaggtgagataaaacttcaagaaggaaagcccacgataccgagtcaaaggccttggaaatgtcaagcttcagaaacaggctgtcaacctttctcttgtgaagggatttaatcgattgttggaccaacataaaattatcatgaatcgatctacctctgataaaagcactttgattagcttcaaccaattcatgcagacgagggcccaaacgattagcgagtaattttgtgaccaatttagcaacactatgaattaggctaattggcctgaaatcaccagccgacgaagcatccatctttttaggaatcaaaataatgtaggaggaattcagttgccccaatctctgaaaattgccctggtgtatgatagacagagccgccagcagatccaccttaatgatactccaacaagatttatagaacctccctgtaaacccatcaggcccaggagccttatcagacggaaggcacgcaattgtgtccaacacttctttctctgagaaggggcactcaagatcactgagatccacggcctctctgtgacaactcgataaattaatagtgctttgcctcagaaaatcagcacccaaaagaccggaaaaaaatccatctagcacctcctgcatatcctcatggttagagaccactctaccttcatcttctagatatgaaatgaaatttcttttcttcctgaaacgagcctgcatatgaaagaatttagtatttgcatccccctcttttaggtacttaatcctggacctcaatcttgcaattgttctttccatagaagcataaacaaaacaatgttgcttcagctttccaatcagccaaaactcatcttctgacaaaactctaaagtcctgtgctgattccaacctatgcatcacctctctagcaagacccaactggttactcacatttcccacctctctatgcccccaggactgcagctgtttagcaagccttctgagctttagggacagcctttccaaagggcaggttgccaacattggctgattccatgaatcagccaccacctcattgaaaccagggagcttgggccagaaaccttcaaaatgaaatctgcgcttccctctacaatcctctcgaaatttgagagttaaagggcaatgatcagagcaaacagaggcgttgctatacagcagacaatcagggaaaaaatcctcccaactagaagtgcaaaaaacatgatcgagcttcacaagggtgggatcctgtctctggttcgaccaagtaaattttctgccaatcaaaggaatttctttcagctccatggagttaattagactcctgaaattacccatcaaagtcctattgatgttggaattattcttatcctcgggcttgaaaatcaaattaaaatcaccacataacagccatggtccaatacaaacatctctgatttctcttaattcttgcaggaaagaaagtttgaaactgtcctgatgaggcccatacactccagtaaaccaccaagcagcaccagactcatcctggaattgaactgatatcgaataatcttttataatagacgcaaccgaggagaaagtaccatcacgccaagcaatcagcactccccccctagaaccctgagctggtttaaaaacaaagttactgaaaccagccccaaggatggagagtatatcataatctgaaacgatacttaatttggtttcctgcaaacaaatgattgaaggcctaaggtcaaccaccacagatttaaccgaatccctctttgctcggtcattaaggcctctcacattccaacacaaaaaacagcgatctatcattgacataaagaaatccaccaaaagagataaaccagcaacaggccctaacactgccccacaagagg

SEQ ID NO: 75995 - DNA, 982 bp, Zea Mays
agaaacgatagtaatgcagagagaagcaagagaaggcataaataggtagtgtagaccaggcgcttttagtagaagagagcattaagcatgcaaaagaagctattatgctggatattagagatggcaattcttggtataatatgggcaatgcttatctcactagcttctttgtgggaggagcctgggatcacactaagcttcatcattcagtgaaagcatatcaaaatgctgagaaggataaaactatgaatttaaatccagacctctactataattgggccacaggacaattacgatccaaaagattagcatcatttgtgtcatccttgagtggagtcaaattgaaatcatcgcacaagaaagccaccataagcactctatcagtgggtttgaacaaagccgttgctgttttgggaaaagtaattctgttcataagacatgacaatgttgctccgctgtattatttaatatgtgacttggaacggtcatattttatactgtcagtgtatgggctacataatgatgcaattaaagacggtgatcaagtggtattatttgaaccatactaccgaatccttgatgcatcatgtaaagacaagcactatcagttcaaatcaatacgagtggactttccagaacaaattctagttaacgagagagttccagcacctcatcatgttgcacgggcatcaatccatgcacacaacaaatcttgaccggtgaaaatttgggtactgtgtggcgtcaataccgtgagcaactgccagctgggcatatcatgtgtactcgcgtaaatgtgtagtgacatgttaccctatggctcaaaatgtgtaaggaagacttgggaacatattaaccatctcatttctccaattttcgttagttgttttcatcaaccttagaccatgatgacacctcaagccgtaagaatcacaagtagtttgcgtgcgtccatgcacgtgtgaagtttttacaattccac

SEQ ID NO: 75996 - DNA, 1262 bp, Zea Mays
gggtcttgcaggcgcagtttgaagttagtctgtttgctggcctctgaacaaaagaagtctcgacaactgcgtggtgtttatgaatttttgaggggaaaaatactggatgtctttcctgattatcataaggaggctgaagatcatttatccaaagcagtaaagttgaacccatctcttgtagatgcatggttatgtttgggtaactgcatttggaagaagggggatctatctgcagcaaagaattgtttttcattagcactaagcaagggttcagataagaaaatactgtgccagatctccatgcttgaaagaagtatggctcaaggtagtgtagaccaggcgcttttagtagaagagagcattaagcatgcaaaagaagctattatgctggatattagagatggcaattcttggtataatatgggcaatgcttatctcactagcttctttgtgggaggagcctgggatcacactaagcttcatcattcagtgaaagcatatcaaaatgctgagaaggataaaactatgaatttaaatccagacctctactataattgggccacaggacaattacgatccaaaagattagcatcatttgtgtcatccttgagtggagtcaaattgaaatcatcgcacaagaaagccaccataagcactctatcagtgggtttgaacaaagccgttgctgttttgggaaaagtaattctgttcataagacatgacaatgttgctccgctgtattatttaatatgtgacttggaacggtcatattttatactgtcagtgtatgggctacataatgatgcaattaaagacggtgatcaagtggtattatttgaaccatactaccgaatccttgatgcatcatgtaaagacaagcactatcagttcaaatcaatacgagtggactttccagaacaaattctagttaacgagagagttccagcacctcatcatgttgcacgggcatcaatccatgcacacaacaaatcttgaccggtgaaaatttgggtactgtgtggcgtcaataccgtgagcaactgccagctgggcatatcatgtgtactcgcgtaaatgtgtagtgacatgttaccctatggctcaaaatgtgtaaggaagacttgggaacatattaaccatctcatttctccaattttcgttagttgttttcatcaaccttagaccatgatgacacctcaagccgtaagaatcacaagtagtttgcgtgcgtccatgcacgtgtgaagtttttacaattccac

SEQ ID NO: 75997 - DNA, 1850 bp, Zea Mays
gccgtcccattttgtaagctccccttccccgtctggccgtctcgactgccccagtcctttctcagatccatgtctacccagaatctgctaactggcgcgtgcacgagctccgccccggccccgtccgaggcggaggaaggggacaggacgcctttggctgacgctgcgaacgcggcggaagagctgtaccgcctccgtgacacctttttcccccgggacccttccgagaaagtcgccgcactccgcgcccgcgccgacgccgccctcgcgctcctcgacgccttcccgtccgaacaaaagaagtctcgacaactgcgtggtgtttatgaatttttgaggggaaaaatactggatgtctttcctgattatcataaggaggctgaagatcatttatccaaagcagtaaagttgaacccatctcttgtagatgcatggttatgtttgggtaactgcatttggaagaagggggatctatctgcagcaaagaattgtttttcattagcactaagcaagggttcagataagaaaatactgtgccagatctccatgcttgaaagaagtatggctcaaggtagtgtagaccaggcgcttttagtagaagagagcattaagcatgcaaaagaagctattatgctggatattagagatggcaattcttggtataatatgggcaatgcttatctcactagcttctttgtgggaggagcctgggatcacactaagcttcatcattcagtgaaagcatatcaaaatgctgagaaggataaaactatgaatttaaatccagacctctactataattgggccacaacaaatatttagagaattatgaaagggcccttcgtggttttgaagttgcagctttaaaagatcccgggcttggtgctaatacagaagttcagaagatcatcagtctccttgataagcttgataatgcaatgaagggacaattacgatccaaaagattagcatcatttgtgtcatccttgagtggagtcaaattgaaatcatcgcacaagaaagccaccataagcactctatcagtgggtttgaacaaagccgttgctgttttgggaaaagtaattctgttcataagacatgacaatgttgctccgctgtattatttaatatgtgacttggaacggtcatattttatactgtcagtgtatgggctacataatgatgcagagtacgcaggggagagacaagtggatgagaggaacaggagagagatcgcaaggcgtagggggaagggcaatcatcgtcaccggcctagctgtgatgatcagccaggacgatcgaagattaaagacggtgatcaagtggtattatttgaaccatactaccgaatccttgatgcatcatgtaaagacaagcactatcagttcaaatcaatacgagtggactttccagaacaaattctagttaacgagagagttccagcacctcatcatgttgcacgggcatcaatccatgcacacaacaaatcttgaccggtgaaaatttggtattgtgatttagttggtagccagtacttattttgtttttgatgtttattagacttattacaggaaaaccattctgcaagtttttatcagggtactgtgtggcgtcaataccgtgagcaactgccagctgggcatatcatgtgtactcgcgtaaatgtgtagtgacatgttaccctatggctcaaaatgtgtaaggaagacttgggaacatattaaccatctcatttctccaattttcgttagttgttttcatcaaccttagaccatgatgacacctcaagccgtaagaatcacaagtagtttgcgtgcgtccatgcacgtgtgaagtttttacaattccac

SEQ ID NO: 75998 - DNA, 1730 bp, Zea Mays
gccgtcccattttgtaagctccccttccccgtctggccgtctcgactgccccagtcctttctcagatccatgtctacccagaatctgctaactggcgcgtgcacgagctccgccccggccccgtccgaggcggaggaaggggacaggacgcctttggctgacgctgcgaacgcggcggaagagctgtaccgcctccgtgacacctttttcccccgggacccttccgagaaagtcgccgcactccgcgcccgcgccgacgccgccctcgcgctcctcgacgccttcccgtccgaacaaaagaagtctcgacaactgcgtggtgtttatgaatttttgaggggaaaaatactggatgtctttcctgattatcataaggaggctgaagatcatttatccaaagcagtaaagttgaacccatctcttgtagatgcatggttatgtttgggtaactgcatttggaagaagggggatctatctgcagcaaagaattgtttttcattagcactaagcaagggttcagataagaaaatactgtgccagatctccatgcttgaaagaagtatggctcaagcaaagacatctagaggcaccagtgcctagtaggatcctaagaaacgatagtaatgcagagagaagcaagagaaggcataaataggtagtgtagaccaggcgcttttagtagaagagagcattaagcatgcaaaagaagctattatgctggatattagagatggcaattcttggtataatatgggcaatgcttatctcactagcttctttgtgggaggagcctgggatcacactaagcttcatcattcagtgaaagcatatcaaaatgctgagaaggataaaactatgaatttaaatccagacctctactataattgggccacagcagacaaatatttagagaattatgaaagggcccttcgtggttttgaagttgcagctttaaaagatcccgggcttggtgctaatacagaagttcagaagatcatcagtctccttgataagcttgataatgcaatgaagggacaattacgatccaaaagattagcatcatttgtgtcatccttgagtggagtcaaattgaaatcatcgcacaagaaagccaccataagcactctatcagtgggtttgaacaaagccgttgctgttttgggaaaagtaattctgttcataagacatgacaatgttgctccgctgtattatttaatatgtgacttggaacggtcatattttatactgtcagtgtatgggctacataatgatgcaattaaagacggtgatcaagtggtattatttgaaccatactaccgaatccttgatgcatcatgtaaagacaagcactatcagttcaaatcaatacgagtggactttccagaacaaattctagttaacgagagagttccagcacctcatcatgttgcacgggcatcaatccatgcacacaacaaatcttgaccggtgaaaatttgggtactgtgtggcgtcaataccgtgagcaactgccagctgggcatatcatgtgtactcgcgtaaatgtgtagtgacatgttaccctatggctcaaaatgtgtaaggaagacttgggaacatattaaccatctcatttctccaattttcgttagttgttttcatcaaccttagaccatgatgacacctcaagccgtaagaatcacaagtagtttgcgtgcgtccatgcacgtgtgaagtttttacaattccac

SEQ ID NO: 75999 - DNA, 1476 bp, Zea Mays
gccgtcccattttgtaagctccccttccccgtctggccgtctcgactgccccagtcctttctcagatccatgtctacccagaatctgctaactggcgcgtgcacgagctccgccccggccccgtccgaggcggaggaaggggacaggacgcctttggctgacgctgcgaacgcggcggaagagctgtaccgcctccgtgacacctttttcccccgggacccttccgagaaagtcgccgcactccgcgcccgcgccgacgccgccctcgcgctcctcgacgccttcccgtccgaacaaaagaagtctcgacaactgcgtggtgtttatgaatttttgaggggaaaaatactggatgtctttcctgattatcataaggaggctgaagatcatttatccaaagcagtaaagttgaacccatctcttgtagatgcatggttatgtttgggtaactgcatttggaagaagggggatctatctgcagcaaagaattgtttttcattagcactaagcaagggttcagataagaaaatactgtgccagatctccatgcttgaaagaagtatggctcaaggtagtgtagaccaggcgcttttagtagaagagagcattaagcatgcaaaagaagctattatgctggatattagagatggcaattcttggtggacaattacgatccaaaagattagcatcatttgtgtcatccttgagtggagtcaaattgaaatcatcgcacaagaaagccaccataagcactctatcagtgggtttgaacaaagccgttgctgttttgggaaaagtaattctgttcataagacatgacaatgttgctccgctgtattatttaatatgtgacttggaacggtcatattttatactgtcagtgtatgggctacataatgatgcagagtacgcaggggagagacaagtggatgagaggaacaggagagagatcgcaaggcgtagggggaagggcaatcatcgtcaccggcctagctgtgatgatcagccaggacgatcgaagattaaagacggtgatcaagtggtattatttgaaccatactaccgaatccttgatgcatcatgtaaagacaagcactatcagttcaaatcaatacgagtggactttccagaacaaattctagttaacgagagagttccagcacctcatcatgttgcacgggcatcaatccatgcacacaacaaatcttgaccggtgaaaatttgggtactgtgtggcgtcaataccgtgagcaactgccagctgggcatatcatgtgtactcgcgtaaatgtgtagtgacatgttaccctatggctcaaaatgtgtaaggaagacttgggaacatattaaccatctcatttctccaattttcgttagttgttttcatcaaccttagaccatgatgacacctcaagccgtaagaatcacaagtagtttgcgtgcgtccatgcacgtgtgaagtttttacaattccac

SEQ ID NO: 76000 - DNA, 1763 bp, Zea Mays
cacaaagctataattatctgctctgccaagaattatctgaagggtgggtatataattagcaaactataattactgcattgtctcctaaatacagataggatatgtaatgcaatgttaccaatacatattgtagtatattgtttactatgcacaaagcttgtctattttagtgcacaatcaccatgcccaaatccacaaattatttccattcgataggcttactgtgctgtattcatgacctgactgttttatctaactgtggtttgattagctgctcctgccaagaagggtgatgccaagaccaggccttgaaggttgtcaaggctgtgaagtctgggccaggaaagaagaagaccaagaagattcgcacatccgtgacatttcaccgccccaagaccctgaagaaggctagggaccccaagtacccaagaatcagcactaccagaaggaacaaccttgatcagtaccaaattctcaagtatcccctcaccacagaatcagcgatgaagaagattgaagataacaacactctggtcttcattgtcgacctcaaggcagacaagaagatcaaggctgctgtcaagaagatgtatgacattcaggccaagaaggtcaacaccctgatcaggcctgatggaaagaagaaggcttacgtgaagcttccatgcatgggcgtcgcctatgagacgactaagagtggtgtcggcgtcgcctccatgggcgtcatgcgcctcaagcttgtcatgaagtccatcgtcctcatcgtcatggccagagtcctcggcatctatgacctcatcatcgccgccatcatctctgccgggatcaaccccaaggccaagcccaagccctacttcttagacggctacgcacacctctccttcgaactcgcatgcagccttgctggcctcgttgccggcatggccatcagcatcgtcagagacaccagagtcagtgtagcagattgcgagggttacccttacctttttctgtctatctcgattgaatggaatggaggctcggatactatggatgaaattcttgttaggatacaacaactggaagaagcagtagtaaagcgtgagcgagctatggcgtacacgttcaaccatcagtggagagcaaggtctgccacaagtctaggaaacttcagctatgaagtcggtaagggtggctggggctggagctggatggaccgctggatcgtagcacgcccatgggagtcgcgatccatggtccaccctgagaacccgaagaaagcacaggcgaagaaagagaacaccacaaacccattagctctcaagctacaaggctccattaccctaagcaacaatatcaatgaccggaaaaccctgaaaaagaagccattgccttcagcttctcttactgatcagaagaagccatcaccgtcgccttcttccgatcagaagaaaccagtaccgaaggagcagagagcaaaggcagctggcactcctccaaaaccaaaggccaaatatatgaaggggagtcaagagaaaaagccacaaccacaacagagagtgtctcctccgctgagccaagaagcaaaggcgtacgctcaagagaatggtctcttcttcatggaaacttctgccaaaatagctaccaatgtgaacgacgtgttctatgagattggaggaatccaatgggaagcggtgcatatcgaccaagcgcggtggcatggaggacaacccgagaatggtggaaagaagcaggggaaggacaacgcaacgaagcccccctag

SEQ ID NO: 76001 - DNA, 1651 bp, Zea Mays
ttgtctcctaaatacagataggatatgtaatgcaatgttaccaatacatattgtagtatattgtttactatgcacaaagcttgtctattttagtgcacaatcaccatgcccaaatccacaaattatttccattcgataggcttactgtgctgtattcatgacctgactgttttatctaactgtggtttgattagctgctcctgccaagaagggtgatgccaagaccaggccttgaaggttgtcaaggctgtgaagtctgggccaggaaagaagaagaccaagaagattcgcacatccgtgacatttcaccgccccaagaccctgaagaaggctagggaccccaagtacccaagaatcagcactaccagaaggaacaaccttgatcagtaccaaattctcaagtatcccctcaccacagaatcagcgatgaagaagattgaagataacaacactctggtcttcattgtcgacctcaaggcagacaagaagatcaaggctgctgtcaagaagatgtatgacattcaggccaagaaggtcaacaccctgatcaggcctgatggaaagaagaaggcttacgtgaagcttccatgcatgggcgtcgcctatgagacgactaagagtggtgtcggcgtcgcctccatgggcgtcatgcgcctcaagcttgtcatgaagtccatcgtcctcatcgtcatggccagagtcctcggcatctatgacctcatcatcgccgccatcatctctgccgggatcaaccccaaggccaagcccaagccctacttcttagacggctacgcacacctctccttcgaactcgcatgcagccttgctggcctcgttgccggcatggccatcagcatcgtcagagacaccagagtcagtgtagcagattgcgagggttacccttacctttttctgtctatctcgattgaatggaatggaggctcggatactatggatgaaattcttgttaggatacaacaactggaagaagcagtagtaaagcgtgagcgagctatggcgtacacgttcaaccatcagtggagagcaaggtctgccacaagtctaggaaacttcagctatgaagtcggtaagggtggctggggctggagctggatggaccgctggatcgtagcacgcccatgggagtcgcgatccatggtccaccctgagaacccgaagaaagcacaggcgaagaaagagaacaccacaaacccattagctctcaagctacaaggctccattaccctaagcaacaatatcaatgaccggaaaaccctgaaaaagaagccattgccttcagcttctcttactgatcagaagaagccatcaccgtcgccttcttccgatcagaagaaaccagtaccgaaggagcagagagcaaaggcagctggcactcctccaaaaccaaaggccaaatatatgaaggggagtcaagagaaaaagccacaaccacaacagagagtgtctcctccgctgagccaagaagcaaaggcgtacgctcaagagaatggtctcttcttcatggaaacttctgccaaaatagctaccaatgtgaacgacgtgttctatgagattgcgaagaaactgcttcaagggcagcaggttcagaacccacaaggcgggatggttctcaaccagagaccacctgaga

SEQ ID NO: 76002 - DNA, 1892 bp, Zea Mays
gtctaatagtggctaatgtgtatcgagaagagaagaatgttctggacctctacatcctcctcctgagatactcgagcttgttgcttgagaccatacccaaacatcgcgattataatgcatttaaggctagagaaaaggaattcctgaagaaaggcccacacaactctgagaaaattcttggtattgtcaatgagctagagtcccttaagccagttgtgcagcaacaaattgccaccggtaatagcaggggtgcagatgaacctaatggtgtatatggaacctatgctgcaagtagtgagttggagcaccataccccaggcccatatgtgtcgaagtccttgtctggaagccctactagactactgcagaaaccattacctggttcaaagcatcaagcagctatgtcgcagaatgttcaaccttatagacatgctatgaaaccatctaccaacatgctgtatccaaaagaggaaacattatcgagacactcgatactaggacctaatgggcttcaggggaatctgggtcaatgggcaagacctgttactggtatcaggattgagtatccacataatcctgaattaacccaaagtgacatttctagtttaatgccaacaaccttgaaccaagatggtttgcgtggtcccagtacagcatctcagggcaaaagtgacgatatgctgtctgttctatcgcttgatgatggcaggtggtcattaccattagaaccagcctcagtgtctcctggtttggaagcagagttctctcacctgaatattagacaaccttctcccccacctgtcctagctcaagtgcaccctgagcatggtcaaattcctccatcaagagttgctgatccaagaccaggacttgctacatctgcaaccggacgctatcagaatttgcatgtgccagtggcattaatggagtgtttcctgaggctcgctgagttaaataccgcaaagaatttggaaacctgtggaattcttgctggtactctgaaaaagagaaccttttatgtgacaacattgataattcctaagcagaaatcaacatctgattcatgtcaagctacgaatgaagaagaaatatttgaagttcaggacaaaggctcccttttatctcttggttggattcatacacatccaacacagacctgcttcctatcttccattgatcttcataatcattacgcatatcagattatgcttccggaagcgattgcaatagttatggctcctacggatacaacaaggtattattttcactgatgttgcaccctcagttttttggtcattgtaatatggcggcatgctagccaagaagagaagtcaataatgctaatcagcactgatcattatggactttttgtcgtatttattaagggtgccaatgaaaacatggcatatttcatctaacggagccatgtggcatgggcgtgatccatgattgtgatgcaactggattccaccctcatgaggagcccctagatggaacaccaatctatgagcattgctcccatgtgtacatgaacccaaatgtcaggtttgagatgacagacctacgtgaagcatgaaaagcgatattgacgactgttgcagattccaaaacccacaatgacttgcacatatctcatctgttccactcctgtgtacacaagttttgttttgaaacggcagtttgttttaatcttgagggaagcgatcattaatttgtagtaatcaatttatcaaaacatgcaacatggtgcttatttgttctcggaccctttaatggttgcttatcttttgttttctttattataatacatgtttgtgtgttgcagttgaagaaaaaaatctactaatcatccatgaaaaacagaggatgtgggtgttatttctctatttaag

SEQ ID NO: 76003 - DNA, 1646 bp, Zea Mays
ctttgatcgatcccatggccttcttttgctggagctattagctttgcgtctaatagtggctaatgtgtatcgagaagagaagaatgttctggacctctacatcctcctcctgagatactcgagcttgttgcttgagaccatacccaaacatcgcgattataatgcatttaaggctagagaaaaggaattcctgaagaaaggcccacacaactctgagaaaattcttggtattgtcaatgagctagagtcccttaagccagttgtgcagcaacaaattgccaccggtaatagcaggggtgcagatgaacctaatggtgtatatggaacctatgctgcaagtagtgagttggagcaccataccccaggcccatatgtgtcgaagtccttgtctggaagccctactagactactgcagaaaccattacctggttcaaagcatcaagcagctatgtcgcagaatgttcaaccttatagacatgctatgaaaccatctaccaacatgctgtatccaaaagaggaaacattatcgagacactcgatactaggacctaatgggcttcaggggaatctgggtcaatgggcaagacctgttactggtatcaggattgagtatccacataatcctgaattaacccaaagtgacatttctagtttaatgccaacaaccttgaaccaagatggtttgcgtggtcccagtacagcatctcagggcaaaagtgacgatatgctgtctgttctatcgcttgatgatggcaggtggtcattaccattagaaccagcctcagtgtctcctggtttggaagcagagttctctcacctgaatattagacaaccttctcccccacctgtcctagctcaagtgcaccctgagcatggtcaaattcctccatcaagagttgctgatccaagaccaggacttgctacatctgcaaccggacgctatcagaatttgcatgtgtgtcaagctacgaatgaagaagaaatatttgaagttcaggacaaaggctcccttttatctcttggttggattcatacacatccaacacagacctgcttcctatcttccattgatcttcataatcattacgcatatcagattatgcttccggaagcgattgcaatagttatggctcctacggatacaacaagaaaacatggcatatttcatctaacggagccatgtggcatgggcgtgatccatgattgtgatgcaactggattccaccctcatgaggagcccctagatggaacaccaatctatgagcattgctcccatgtgtacatgaacccaaatgtcaggtttgagatgacagacctacgtgaagcatgaaaagcgatattgacgactgttgcagattccaaaacccacaatgacttgcacatatctcatctgttccactcctgtgtacacaagttttgttttgaaacggcagtttgttttaatcttgagggaagcgatcattaatttgtagtaatcaatttatcaaaacatgcaacatggtgcttatttgttctcggaccctttaatggttgcttatcttttgttttctttattataatacatgtttgtgtgttgcagttgaagaaaaaaatctactaatcatccatgaaaaacagaggatgtgggtgttatttctctatttaag

SEQ ID NO: 76004 - DNA, 1669 bp, Zea Mays
ttccccttctccttcccacgttttccttcaagcacgcccgtcctaccccgcttccgtgtccgtgatcgcccgtcgacttttgcgctgccgtagcgggttgaagcggagatccatcgcctggcctgccgcggagtcagtcccaccccacctgagatggcttcggaactatctcacggcactaggagagacgtatgcatcgagtccatggcgcggcctatcgccgtggaccaccgcataagcatccactactatttccgcatcgctgacaacctcctccgccaggctaatgtgtatcgagaagagaagaatgttctggacctctacatcctcctcctgagatactcgagcttgttgcttgagaccatacccaaacatcgcgattataatgcatttaaggctagagaaaaggaattcctgaagaaaggcccacacaactctgagaaaattcttggtattgtcaatgagctagagtcccttaagccagttgtgcagcaacaaattgccaccggtaatagcaggggtgcagatgaacctaatggtgtatatggaacctatgctgcaagtagtgagttggagcaccataccccaggcccatatgtgtcgaagtccttgtctggaagccctactagactactgcagaaaccattacctggttcaaagcatcaagcagctatgtcgcagaatgttcaaccttatagacatgctatgaaaccatctaccaacatgctgtatccaaaagaggaaacattatcgagacactcgatactaggacctaatgggcttcaggggaatctgggtcaatgggcaagacctgttactggtatcaggccagtggcattaatggagtgtttcctgaggctcgctgagttaaataccgcaaagaatttggaaacctgtggaattcttgctggtactctgaaaaagagaaccttttatgtgacaacattgataattcctaagcagaaatcaacatctgattcatgtcaagctacgaatgaagaagaaatatttgaagttcaggacaaaggctcccttttatctcttggttggattcatacacatccaacacagacctgcttcctatcttccattgatcttcataatcattacgcatatcagattatgcttccggaagcgattgcaatagttatggctcctacggatacaacaagaaaacatggcatatttcatctaacggagccatgtggcatgggcgtgatccatgattgtgatgcaactggattccaccctcatgaggagcccctagatggaacaccaatctatgagcattgctcccatgtgtacatgaacccaaatgtcaggtttgagatgacagacctacgtgaagcatgaaaagcgatattgacgactgttgcagattccaaaacccacaatgacttgcacatatctcatctgttccactcctgtgtacacaagttttgttttgaaacggcagtttgttttaatcttgagggaagcgatcattaatttgtagtaatcaatttatcaaaacatgcaacatggtgcttatttgttctcggaccctttaatggttgcttatcttttgttttctttattataatacatgtttgtgtgttgcagttgaagaaaaaaatctactaatcatccatgaaaaacagaggatgtgggtgttatttctctatttaag

SEQ ID NO: 76005 - DNA, 2019 bp, Zea Mays
ttccccttctccttcccacgttttccttcaagcacgcccgtcctaccccgcttccgtgtccgtgatcgcccgtcgacttttgcgctgccgtagcgggttgaagcggagatccatcgcctggcctgccgcggagtcagtcccaccccacctgagatggcttcggaactatctcacggcactaggagagacgtatgcatcgagtccatggcgcggcctatcgccgtggaccaccgcataagcatccactactatttccgcatcgctgacaacctcctccgccaggctaatgtgtatcgagaagagaagaatgttctggacctctacatcctcctcctgagatactcgagcttgttgcttgagaccatacccaaacatcgcgattataatgcatttaaggctagagaaaaggaattcctgaagaaaggcccacacaactctgagaaaattcttggtattgtcaatgagctagagtcccttaagccagttgtgcagcaacaaattgccaccggtaatagcaggggtgcagatgaacctaatggtgtatatggaacctatgctgcaagtagtgagttggagcaccataccccaggcccatatgtgtcgaagtccttgtctggaagccctactagactactgcagaaaccattacctggttcaaagcatcaagcagctatgtcgcagaatgttcaaccttatagacatgctatgaaaccatctaccaacatgctgtatccaaaagaggaaacattatcgagacactcgatactaggacctaatgggcttcaggggaatctgggtcaatgggcaagacctgttactggtatcaggattgagtatccacataatcctgaattaacccaaagtgacatttctagtttaatgccaacaaccttgaaccaagatggtttgcgtggtcccagtacagcatctcagggcaaaagtgacgatatgctgtctgttctatcgcttgatgatggcaggtggtcattaccattagaaccagcctcagtgtctcctggtttggaagcagagttctctcacctgaatattagacaaccttctcccccacctgtcctagctcaagtgcaccctgagcatggtcaaattcctccatcaagagttgctgatccaagaccaggacttgctacatctgcaaccggacgctatcagaatttgcatgtgtggcattaatggagtgtttcctgaggctcgctgagttaaataccgcaaagaatttggaaacctgtggaattcttgctggtactctgaaaaagagaaccttttatgtgacaacattgataattcctaagcagaaatcaacatctgattcatgtcaagctacgaatgaagaagaaatatttgaagttcaggacaaaggctcccttttatctcttggttggattcatacacatccaacacagacctgcttcctatcttccattgatcttcataatcattacgcatatcagattatgcttccggaagcgattgcaatagttatggctcctacggatacaacaagaaaacatggcatatttcatctaacggagccatgtggcatgggcgtgatccatgattgtgatgcaactggattccaccctcatgaggagcccctagatggaacaccaatctatgagcattgctcccatgtgtacatgaacccaaatgtcaggtttgagatgacagacctacgtgaagcatgaaaagcgatattgacgactgttgcagattccaaaacccacaatgacttgcacatatctcatctgttccactcctgtgtacacaagttttgttttgaaacggcagtttgttttaatcttgagggaagcgatcattaatttgtagtaatcaatttatcaaaacatgcaacatggtgcttatttgttctcggaccctttaatggttgcttatcttttgttttctttattataatacatgtttgtgtgttgcagttgaagaaaaaaatctactaatcatccatgaaaaacagaggatgtgggtgttatttctctatttaag

SEQ ID NO: 76006 - DNA, 2020 bp, Zea Mays
cgacattccccttctccttcccacgttttccttcaagcacgcccgtcctaccccgcttccgtgtccgtgatcgcccgtcgacttttgcgctgccgtagcgggttgaagcggagatccatcgcctggcctgccgcggagtcagtcccaccccacctgagatggcttcggaactatctcacggcactaggagagacgtatgcatcgagtccatggcgcggcctatcgccgtggaccaccgcataagcatccactactatttccgcatcgctgacaacctcctccgccaggctaatgtgtatcgagaagagaagaatgttctggacctctacatcctcctcctgagatactcgagcttgttgcttgagaccatacccaaacatcgcgattataatgcatttaaggctagagaaaaggaattcctgaagaaaggcccacacaactctgagaaaattcttggtattgtcaatgagctagagtcccttaagccagttgtgcagcaacaaattgccaccggtaatagcaggggtgcagatgaacctaatggtgtatatggaacctatgctgcaagtagtgagttggagcaccataccccaggcccatatgtgtcgaagtccttgtctggaagccctactagactactgcagaaaccattacctggttcaaagcatcaagcagctatgtcgcagaatgttcaaccttatagacatgctatgaaaccatctaccaacatgctgtatccaaaagaggaaacattatcgagacactcgatactaggacctaatgggcttcaggggaatctgggtcaatgggcaagacctgttactgattgagtatccacataatcctgaattaacccaaagtgacatttctagtttaatgccaacaaccttgaaccaagatggtttgcgtggtcccagtacagcatctcagggcaaaagtgacgatatgctgtctgttctatcgcttgatgatggcaggtggtcattaccattagaaccagcctcagtgtctcctggtttggaagcagagttctctcacctgaatattagacaaccttctcccccacctgtcctagctcaagtgcaccctgagcatggtcaaattcctccatcaagagttgctgatccaagaccaggacttgctacatctgcaaccggacgctatcagaatttgcatgtgccagtggcattaatggagtgtttcctgaggctcgctgagttaaataccgcaaagaatttggaaacctgtggaattcttgctggtactctgaaaaagagaaccttttatgtgacaacattgataattcctaagcagaaatcaacatctgattcatgtcaagctacgaatgaagaagaaatatttgaagttcaggacaaaggctcccttttatctcttggttggattcatacacatccaacacagacctgcttcctatcttccattgatcttcataatcattacgcatatcagattatgcttccggaagcgattgcaatagttatggctcctacggatacaacaagaaaacatggcatatttcatctaacggagccatgtggcatgggcgtgatccatgattgtgatgcaactggattccaccctcatgaggagcccctagatggaacaccaatctatgagcattgctcccatgtgtacatgaacccaaatgtcaggtttgagatgacagacctacgtgaagcatgaaaagcgatattgacgactgttgcagattccaaaacccacaatgacttgcacatatctcatctgttccactcctgtgtacacaagttttgttttgaaacggcagtttgttttaatcttgagggaagcgatcattaatttgtagtaatcaatttatcaaaacatgcaacatggtgcttatttgttctcggaccctttaatggttgcttatcttttgttttctttattataatacatgtttgtgtgttgcagttgaagaaaaaaatctactaatcatccatgaaaaacagaggatgtgggtgttatttctctatttaag

SEQ ID NO: 76007 - DNA, 3857 bp, Zea Mays
ctttggatcaataacatgatggtaagggatgcaatatgggctgaattcaatgagtgtgatgaccattttgggctttgcccaaagggggcaaaaaaaaacccaatatttatttccggggtccccaaaaacaatgaggaagaggtggctagtattgctgccatcactgaacagtctgcaggtgttcaaaatggacatcaagggaaggaaaaagcagactgcaagtcacacaagtgcacatatttcacccacacaaattgacatggaatcctggcccggacttccttccctgaatcctacacttgatagaaactatagtgatgacaacatagcatccacatatctggatttttgtgctgcaaccagtttacaagaagtgaccagaaattctacagagcaactagatggtaaatcagaagtgtttggtaatgatcaagaagaaaagagtaacagtttccttgattgcgactggggcaatattggaggttttgatgattttgaccgtctatttagccatagtgactccatatttggtaatgagatagttgccaacgacagtgattttctttctgcatcttcgaatttgatggatactgctgtgctatcaatcccagttccggtcgaagcacataagaggccagtgtggtcacgtagaaaaccagaggaaagaggtaaaagtaaaatatccagcagtacaagtggcttctcccacagcaaagtagagagttcatcgacgaatttgcaaactcctatggaacctgtacagactcctcaatatgcactgttccaggatagcaagaagataggagaagttcagcatgctaatcagtttatgtttcctggatatgggtatcctcctgcatatccatttcctaccattccgttagtgtcaaacattcaagctgaaggctatcagacaaaaccagctggcacaagctaccgaacttcggaagattacctaaaacagtcaagttccacagaaatgtcacaagatataccatcaagaccactaacaatgacaccacaagaaaagatagaaaagcttaggcgccggcaacaaatgcaagcactgatagctattcagcaacaacagcaacagtttggtcaacagggtcctggcagtgacacaatggtgtctcaagcatacacccctggtaacaaaaatccggattccttagggagttcaattgtcatagatgaaaacacaaataagttggataccaaaactcgactatgcattcgagatagtttgcttcgtttggtccatagtgcaacagagagaaagattgatggtgataggagcactaacaagactaataaagatgaagatgaagcttcggaagacgcatctactaggaaaacaaggtctccaaacaaggaagcagaaacaaccactaatccaattgatcgtatagtggcccatttgctgttccacagacattgctccaaggttgcaaaagcaacaaaagaaataatatcgtcaatccccttgactctagaacctgagccgaaggtacccttgggaactcctagggttccatcaaaagatcaacgagatgagcaagaaattgtgttgcaaccatcacaataatgtgagatgtgctagaagataaggttttactcaatttgagtaaacttatttgcatttagttagcctatgaatctaatgtcgtccttctaacgagtatacacatgctgattaatcaactgttcaggataaaaagttatgcaaatccagtgatgatggcagtcttatgatcgcctgtggccctggagatcgcttgtgtaatatgtagccatttcaacattgtaggatccttttattttcatcctgtaagaacatctcagattgtataggaacctacgattttgtgccgagccgtaaaaagagcaaaccttggctctggacataaggcgtgtttaggagcaagaggattaaagcaaaccttggctcttggctctggacataaggcgtgtttgggagcaagaggattaaagttgattgaaggggctaaaatccttttctattcaatttaaaatagtaagagagattttagtcctttcaatctttttatgatgcgtttggttgcaatgataagacgagacgagatgagataatccttcaaataatgttgtttggtttagggtcaaaggttgagataggattatctcagtgttgttccagttatccctcaaaattggaggaacgagagatgacgccacagaacgtcctgtctcgcaaccaaacgcaccattagcttctcaatccccttctaaacagctcaatgtatgtgggatattggttgaacgattggtagagatgaagaggtttatcaacggtagagaattttttagtccgataatgggttcttgggaggagcatgttaggcgatttttgttggaggaggaagaagatgatgatgaactgttctttgttattctccctgctataatctcatgcctctcagaagagaaaaggcccatccacacatcctccctcaccggtgctaaaaaggttaaagaaattcttgaagggcatgagagctggtgcaaatctgagttcagaatggagaaggaaatattcaaagccacatcaaattttcttagaagagagaatttactacgtgacacgcgagaagttagcattgaggagcagcttgggatgttcatctcagttcaaactcatgctaggattgcaacagattctaggttcatgcccttttttcagaattgccttggtgccattgacgacacacatgtacccatcactatctcagaagatagggcccctccatatagaaatagaaaaggaactctttcacacaatgttatggtagtctgcgacttcgatctcaatttcacattcgatctcaatgttatgctgcctccttatgctcctctatctgttgatactcttgctcctcctgctactgttcctcctcttgctcctcctgctactgttcctcctcttgctcctcctgcttctgttccttctgctcctatttttgttgttccttcagctaggagtacatttgaacagactctccatccattcaatacaaatccatttgatttggatggacaagagatgacaagtgaagctcaatctgtgtcagctattcatgaagcaagagagggagaaggtagcaaaagtagaaagcgtaagcagagtcatgttggagcagctctcgaaggctatgtggagttcaaaaagagccaaactaacaaggcacttgatgctcttaaagaactttccatgaggaagtgtatgaaggaaatggaagcaatggatggattcacagatgaggagaagtcatatgctgtggaggtctttgagtccgagattaatagagaggctttcatgtcaacaatgaaccacaatgttcgaagaatgtggctaaagcgcaaaatcagagtgctaagtgaaagcaacacttgaagctgacatggagaaggaaaatggaataacaatccacatgaagcttgtaaaaaaggagttaaacaaataatttattctagtgtcaaagttcataacgaaaggacttgtactctgtttttatgctatattgtctatttgtacgtgtgaatgaagatgatcttatgtgatgtgatgatggatagattaactttgttggatattagatgatcatgtcctatgcatgtttttagatttttagtgatgtttcattgtgtttttgtttttctaaatatttcctatttttctttgattttttaatgatattttgaagtattttgtctcaagaggggtttttagccccttggttgccaaacagtggcagggaaatacaccggagtggaaaaaatcctcccagagaattaaagtgtcatttaaaatcccc

SEQ ID NO: 76008 - DNA, 4103 bp, Zea Mays
gtttcttggttggtattggcgatcaccactgtgatccttggagtgtttgggagcttgactggcttcgtcttccttctgctcactctgccagtcttgtaggctctgcttctcctgcattgacttctacttcttttgctcagtggcattatcaattgagaaatgtatgtggttcccggctatccactcttgcctgttgtggtcttttgggagataccttggtgatgtttctttggatcaataacatgatggtaagggatgcaatatgggctgaattcaatgagtgtgatgaccattttgggctttgcccaaagggggcaaaaaaaaacccaatatttatttccggggtccccaaaaacaatgaggaagaggtggctagtattgctgccatcactgaacagtctgcaggtgttcaaaatggacatcaagggaaggaaaaagcagactgcaagtcacacaagtgcacatatttcacccacacaaattgacatggaatcctggcccggacttccttccctgaatcctacacttgatagaaactatagtgatgacaacatagcatccacatatctggatttttgtgctgcaaccagtttacaagaagtgaccagaaattctacagagcaactagatggtaaatcagaagtgtttggtaatgatcaagaagaaaagagtaacagtttccttgattgcgactggggcaatattggaggttttgatgattttgaccgtctatttagccatagtgactccatatttggtaatgagatagttgccaacgacagtgattttctttctgcatcttcgaatttgatggatactgctgtgctatcaatcccagttccggtcgaagcacataagaggccagtgtggtcacgtagaaaaccagaggaaagaggtaaaagtaaaatatccagcagtacaagtggcttctcccacagcaaagtagagagttcatcgacgaatttgcaaactcctatggaacctgtacagactcctcaatatgcactgttccaggatagcaagaagataggagaagttcagcatgctaatcagtttatgtttcctggatatgggtatcctcctgcatatccatttcctaccattccgttagtgtcaaacattcaagctgaaggctatcagacaaaaccagctggcacaagctaccgaacttcggaagattacctaaaacagtcaagttccacagaaatgtcacaagatataccatcaagaccactaacaatgacaccacaagaaaagatagaaaagcttaggcgccggcaacaaatgcaagcactgatagctattcagcaacaacagcaacagtttggtcaacagggtcctggcagtgacacaatggtgtctcaagcatacacccctggtaacaaaaatccggattccttagggagttcaattgtcatagatgaaaacacaaataaggttatttcgcctgagatgattccaactgaccatgaccgggttcacaagagttctgcaatttcagatgatccctttatagaggaaaaaatatattatcagctacaagatgctcttggcaagttggataccaaaactcgactatgcattcgagatagtttgcttcgtttggtccatagtgcaacagagagaaagattgatggtgataggagcactaacaagactaataaagatgaagatgaagcttcggaagacgcatctactaggaaaacaaggtctccaaacaaggaagcagaaacaaccactaatccaattgatcgtatagtggcccatttgctgttccacagacattgctccaaggttgcaaaagcaacaaaagaaataatatcgtcaatccccttgactctagaacctgagccgaaggtacccttgggaactcctagggttccatcaaaagatcaacgagatgagcaagaaattgtgttgcaaccatcacaataatgtgagatgtgctagaagataaggataaaaagttatgcaaatccagtgatgatggcagtcttatgatcgcctgtggccctggagatcgcttgtgtaatatgtagccatttcaacattgtaggatccttttattttcatcctgtaagaacatctcagattgtataggaacctacgattttgtgccgagccgtaaaaagagcaaaccttggctctggacataaggcgtgtttaggagcaagaggattaaagcaaaccttggctcttggctctggacataaggcgtgtttgggagcaagaggattaaagttgattgaaggggctaaaatccttttctattcaatttaaaatagtaagagagattttagtcctttcaatctttttatgatgcgtttggttgcaatgataagacgagacgagatgagataatccttcaaataatgttgtttggtttagggtcaaaggttgagataggattatctcagtgttgttccagttatccctcaaaattggaggaacgagagatgacgccacagaacgtcctgtctcgcaaccaaacgcaccattagcttctcaatccccttctaaacagctcaatgtatgtgggatattggttgaacgattggtagagatgaagaggtttatcaacggtagagaattttttagtccgataatgggttcttgggaggagcatgttaggcgatttttgttggaggaggaagaagatgatgatgaactgttctttgttattctccctgctataatctcatgcctctcagaagagaaaaggcccatccacacatcctccctcaccggtgctaaaaaggttaaagaaattcttgaagggcatgagagctggtgcaaatctgagttcagaatggagaaggaaatattcaaagccacatcaaattttcttagaagagagaatttactacgtgacacgcgagaagttagcattgaggagcagcttgggatgttcatctcagttcaaactcatgctaggattgcaacagattctaggttcatgcccttttttcagaattgccttggtgccattgacgacacacatgtacccatcactatctcagaagatagggcccctccatatagaaatagaaaaggaactctttcacacaatgttatggtagtctgcgacttcgatctcaatttcacattcgatctcaatgttatgctgcctccttatgctcctctatctgttgatactcttgctcctcctgctactgttcctcctcttgctcctcctgctactgttcctcctcttgctcctcctgcttctgttccttctgctcctatttttgttgttccttcagctaggagtacatttgaacagactctccatccattcaatacaaatccatttgatttggatggacaagagatgacaagtgaagctcaatctgtgtcagctattcatgaagcaagagagggagaaggtagcaaaagtagaaagcgtaagcagagtcatgttggagcagctctcgaaggctatgtggagttcaaaaagagccaaactaacaaggcacttgatgctcttaaagaactttccatgaggaagtgtatgaaggaaatggaagcaatggatggattcacagatgaggagaagtcatatgctgtggaggtctttgagtccgagattaatagagaggctttcatgtcaacaatgaaccacaatgttcgaagaatgtggctaaagcgcaaaatcagagtgctaagtgaaagcaacacttgaagctgacatggagaaggaaaatggaataacaatccacatgaagcttgtaaaaaaggagttaaacaaataatttattctagtgtcaaagttcataacgaaaggacttgtactctgtttttatgctatattgtctatttgtacgtgtgaatgaagatgatcttatgtgatgtgatgatggatagattaactttgttggatattagatgatcatgtcctatgcatgtttttagatttttagtgatgtttcattgtgtttttgtttttctaaatatttcctatttttctttgattttttaatgatattttgaagtattttgtctcaagaggggtttttagccccttggttgccaaacagtggcagggaaatacaccggagtggaaaaaatcctcccagagaattaaagtgtcatttaaaatcccc

SEQ ID NO: 76009 - DNA, 2061 bp, Zea Mays
cgcattctcccttccctggactattcttggtgggtggagagagccgcagaaggcagctggaagaggagaggaccgcgcgaggctccgtgccggcgagttcgggtgcttttcctgcggtccgagatgcgatcgttgggacccgggagatagcgcagctcgggttcgggttcgggggcggctaccgcgacggcggccgccacctgagcaggatgtttaactggaacgacgagcagcaccagagcaactagatggtaaatcagaagtgtttggtaatgatcaagaagaaaagagtaacagtttccttgattgcgactggggcaatattggaggttttgatgattttgaccgtctatttagccatagtgactccatatttggtaatgagatagttgccaacgacagtgattttctttctgcatcttcgaatttgatggatactgctgtgctatcaatcccagttccggtcgaagcacataagaggccagtgtggtcacgtagaaaaccagaggaaagaggtaaaagtaaaatatccagcagtacaagtggcttctcccacagcaaagtagagagttcatcgacgaatttgcaaactcctatggaacctgtacagactcctcaatatgcactgttccaggatagcaagaagataggagaagttcagcatgctaatcagtttatgtttcctggatatgggtatcctcctgcatatccatttcctaccattccgttagtgtcaaacattcaagctgaaggctatcagacaaaaccagctggcacaagctaccgaacttcggaagattacctaaaacagtcaagttccacagaaatgtcacaagatataccatcaagaccactaacaatgacaccacaagaaaagatagaaaagcttaggcgccggcaacaaatgcaagcactgatagctattcagcaacaacagcaacagtttggtcaacagggtcctggcagtgacacaatggtgtctcaagcatacacccctggtaacaaaaatccggattccttagggagttcaattgtcatagatgaaaacacaaataaggttatttcgcctgagatgattccaactgaccatgaccgggttcacaagagttctgcaatttcagatgatccctttatagaggaaaaaatatattatcagctacaagatgctcttggcaagttggataccaaaactcgactatgcattcgagatagtttgcttcgtttggtccatagtgcaacagagagaaagattgatggtgataggagcactaacaagactaataaagatgaagatgaagcttcggaagacgcatctactaggaaaacaaggtctccaaacaaggaagcagaaacaaccactaatccaattgatcgtatagtggcccatttgctgttccacagacattgctccaaggttgcaaaagcaacaaaagaaataatatcgtcaatccccttgactctagaacctgagccgaaggtacccttgggaactcctagggttccatcaaaagatcaacgagatgagcaagaaattgtgttgcaaccatcacaataatgtgagatgtgctagaagataaggataaaaagttatgcaaatccagtgatgatggcagtcttatgatcgcctgtggccctggagatcgcttgtgtaatatgtagccatttcaacattgtaggatccttttattttcatcctgtaagaacatctcagattgtataggaacctacgattttgtgccgagccgtaaaaagagcaaaccttggctctggacataaggcgtgtttaggagcaagaggattaaagcaaaccttggctcttggctctggacataaggcgtgtttgggagcaagaggattaaagttgattgaaggggctaaaatccttttctattcaatttaaaatagtaagagagattttagtcctttcaatctttttatgatgcgtttggttgcaatgataagacgagacgagatgagataatccttcaaataatgttgtttggtttagggtcaaaggttgagataggattatctcagtgttgttccagttatccctcaaaa

SEQ ID NO: 76010 - DNA, 2413 bp, Zea Mays
cgcattctcccttccctggactattcttggtgggtggagagagccgcagaaggcagctggaagaggagaggaccgcgcgaggctccgtgccggcgagttcgggtgcttttcctgcggtccgagatgcgatcgttgggacccgggagatagcgcagctcgggttcgggttcgggggcggctaccgcgacggcggccgccacctgagcaggatgtttaactggaacgacgagcagcaccaggtaagggatgcaatatgggctgaattcaatgagtgtgatgaccattttgggctttgcccaaagggggcaaaaaaaaacccaatatttatttccggggtccccaaaaacaatgaggaagaggtggctagtattgctgccatcactgaacagtctgcaggtgttcaaaatggacatcaagggaaggaaaaagcagactgcaagtcacacaagtgcacatatttcacccacacaaattgacatggaatcctggcccggacttccttccctgaatcctacacttgatagaaactatagtgatgacaacatagcatccacatatctggatttttgtgctgcaaccagtttacaagaagtgaccagaaattctacagagcaactagatggtaaatcagaagtgtttggtaatgatcaagaagaaaagagtaacagtttccttgattgcgactggggcaatattggaggttttgatgattttgaccgtctatttagccatagtgactccatatttggtaatgagatagttgccaacgacagtgattttctttctgcatcttcgaatttgatggatactgctgtgctatcaatcccagttccggtcgaagcacataagaggccagtgtggtcacgtagaaaaccagaggaaagaggtaaaagtaaaatatccagcagtacaagtggcttctcccacagcaaagtagagagttcatcgacgaatttgcaaactcctatggaacctgtacagactcctcaatatgcactgttccaggatagcaagaagataggagaagttcagcatgctaatcagtttatgtttcctggatatgggtatcctcctgcatatccatttcctaccattccgttagtgtcaaacattcaagctgaaggctatcagacaaaaccagctggcacaagctaccgaacttcggaagattacctaaaacagtcaagttccacagaaatgtcacaagatataccatcaagaccactaacaatgacaccacaagaaaagatagaaaagcttaggcgccggcaacaaatgcaagcactgatagctattcagcaacaacagcaacagtttggtcaacagggtcctggcagtgacacaatggtgtctcaagcatacacccctggtaacaaaaatccggattccttagggagttcaattgtcatagatgaaaacacaaataagttggataccaaaactcgactatgcattcgagatagtttgcttcgtttggtccatagtgcaacagagagaaagattgatggtgataggagcactaacaagactaataaagatgaagatgaagcttcggaagacgcatctactaggaaaacaaggtctccaaacaaggaagcagaaacaaccactaatccaattgatcgtatagtggcccatttgctgttccacagacattgctccaaggttgcaaaagcaacaaaagaaataatatcgtcaatccccttgactctagaacctgagccgaaggtacccttgggaactcctagggttccatcaaaagatcaacgagatgagcaagaaattgtgttgcaaccatcacaataatgtgagatgtgctagaagataaggttttactcaatttgagtaaacttatttgcatttagttagcctatgaatctaatgtcgtccttctaacgagtatacacatgctgattaatcaactgttcaggataaaaagttatgcaaatccagtgatgatggcagtcttatgatcgcctgtggccctggagatcgcttgtgtaatatgtagccatttcaacattgtaggatccttttattttcatcctgtaagaacatctcagattgtataggaacctacgattttgtgccgagccgtaaaaagagcaaaccttggctctggacataaggcgtgtttaggagcaagaggattaaagcaaaccttggctcttggctctggacataaggcgtgtttgggagcaagaggattaaagttgattgaaggggctaaaatccttttctattcaatttaaaatagtaagagagattttagtcctttcaatctttttatgatgcgtttggttgcaatgataagacgagacgagatgagataatccttcaaataatgttgtttggtttagggtcaaaggttgagataggattatctcagtgttgttccagttatccctcaaaa

SEQ ID NO: 76011 - DNA, 2039 bp, Zea Mays
cgcattctcccttccctggactattcttggtgggtggagagagccgcagaaggcagctggaagaggagaggaccgcgcgaggctccgtgccggcgagttcgggtgcttttcctgcggtccgagatgcgatcgttgggacccgggagatagcgcagctcgggttcgggttcgggggcggctaccgcgacggcggccgccacctgagcaggatgtttaactggaacgacgagcagcaccagagcaactagatggtaaatcagaagtgtttggtaatgatcaagaagaaaagagtaacagtttccttgattgcgactggggcaatattggaggttttgatgattttgaccgtctatttagccatagtgactccatatttggtaatgagatagttgccaacgacagtgattttctttctgcatcttcgaatttgatggatactgctgtgctatcaatcccagttccggtcgaagcacataagaggccagtgtggtcacgtagaaaaccagaggaaagaggtaaaagtaaaatatccagcagtacaagtggcttctcccacagcaaagtagagagttcatcgacgaatttgcaaactcctatggaacctgtacagactcctcaatatgcactgttccaggatagcaagaagataggagaagttcagcatgctaatcagtttatgtttcctggatatgggtatcctcctgcatatccatttcctaccattccgttagtgtcaaacattcaagctgaaggctatcagacaaaaccagctggcacaagctaccgaacttcggaagattacctaaaacagtcaagttccacagaaatgtcacaagatataccatcaagaccactaacaatgacaccacaagaaaagatagaaaagcttaggcgccggcaacaaatgcaagcactgatagctattcagcaacaacagcaacagtttggtcaacagggtcctggcagtgacacaatggtgtctcaagcatacacccctggtaacaaaaatccggattccttagggagttcaattgtcatagatgaaaacacaaataaggttatttcgcctgagatgattccaactgaccatgaccgggttcacaagagttctgcaatttcagatgatccctttatagaggaaaaaatatattatcagctacaagatgctcttggcaagttggataccaaaactcgactatgcattcgagatagtttgcttcgtttggtccatagtgcaacagagagaaagattgatggtgataggagcactaacaagactaataaagatgaagatgaagcttcggaagacgcatctactaggaaaacaaggtctccaaacaaggaagcagaaacaaccactaatccaattgatcgtatagtggcccatttgctgttccacagacattgctccaaggttgcaaaagcaacaaaagaaataatatcgtcaatccccttgactctagaacctgagccgaaggtacccttgggaactcctagggttccatcaaaagatcaacgagatgagcaagaaattgtgttgcaaccatcacaataatgataaaaagttatgcaaatccagtgatgatggcagtcttatgatcgcctgtggccctggagatcgcttgtgtaatatgtagccatttcaacattgtaggatccttttattttcatcctgtaagaacatctcagattgtataggaacctacgattttgtgccgagccgtaaaaagagcaaaccttggctctggacataaggcgtgtttaggagcaagaggattaaagcaaaccttggctcttggctctggacataaggcgtgtttgggagcaagaggattaaagttgattgaaggggctaaaatccttttctattcaatttaaaatagtaagagagattttagtcctttcaatctttttatgatgcgtttggttgcaatgataagacgagacgagatgagataatccttcaaataatgttgtttggtttagggtcaaaggttgagataggattatctcagtgttgttccagttatccctcaaaa

SEQ ID NO: 76012 - DNA, 2326 bp, Zea Mays
cgcattctcccttccctggactattcttggtgggtggagagagccgcagaaggcagctggaagaggagaggaccgcgcgaggctccgtgccggcgagttcgggtgcttttcctgcggtccgagatgcgatcgttgggacccgggagatagcgcagctcgggttcgggttcgggggcggctaccgcgacggcggccgccacctgagcaggatgtttaactggaacgacgagcagcaccaggtaagggatgcaatatgggctgaattcaatgagtgtgatgaccattttgggctttgcccaaagggggcaaaaaaaaacccaatatttatttccggggtccccaaaaacaatgaggaagaggtggctagtattgctgccatcactgaacagtctgcaggtgttcaaaatggacatcaagggaaggaaaaagcagactgcaagtcacacaagtgcacatatttcacccacacaaattgacatggaatcctggcccggacttccttccctgaatcctacacttgatagaaactatagtgatgacaacatagcatccacatatctggatttttgtgctgcaaccagtttacaagaagtgaccagaaattctacagagcaactagatggtaaatcagaagtgtttggtaatgatcaagaagaaaagagtaacagtttccttgattgcgactggggcaatattggaggttttgatgattttgaccgtctatttaggtcgaagcacataagaggccagtgtggtcacgtagaaaaccagaggaaagaggtaaaagtaaaatatccagcagtacaagtggcttctcccacagcaaagtagagagttcatcgacgaatttgcaaactcctatggaacctgtacagactcctcaatatgcactgttccaggatagcaagaagataggagaagttcagcatgctaatcagtttatgtttcctggatatgggtatcctcctgcatatccatttcctaccattccgttagtgtcaaacattcaagctgaaggctatcagacaaaaccagctggcacaagctaccgaacttcggaagattacctaaaacagtcaagttccacagaaatgtcacaagatataccatcaagaccactaacaatgacaccacaagaaaagatagaaaagcttaggcgccggcaacaaatgcaagcactgatagctattcagcaacaacagcaacagtttggtcaacagggtcctggcagtgacacaatggtgtctcaagcatacacccctggtaacaaaaatccggattccttagggagttcaattgtcatagatgaaaacacaaataaggttatttcgcctgagatgattccaactgaccatgaccgggttcacaagagttctgcaatttcagatgatccctttatagaggaaaaaatatattatcagctacaagatgctcttggcaagttggataccaaaactcgactatgcattcgagatagtttgcttcgtttggtccatagtgcaacagagagaaagattgatggtgataggagcactaacaagactaataaagatgaagatgaagcttcggaagacgcatctactaggaaaacaaggtctccaaacaaggaagcagaaacaaccactaatccaattgatcgtatagtggcccatttgctgttccacagacattgctccaaggttgcaaaagcaacaaaagaaataatatcgtcaatccccttgactctagaacctgagccgaaggtacccttgggaactcctagggttccatcaaaagatcaacgagatgagcaagaaattgtgttgcaaccatcacaataatgtgagatgtgctagaagataaggataaaaagttatgcaaatccagtgatgatggcagtcttatgatcgcctgtggccctggagatcgcttgtgtaatatgtagccatttcaacattgtaggatccttttattttcatcctgtaagaacatctcagattgtataggaacctacgattttgtgccgagccgtaaaaagagcaaaccttggctctggacataaggcgtgtttaggagcaagaggattaaagcaaaccttggctcttggctctggacataaggcgtgtttgggagcaagaggattaaagttgattgaaggggctaaaatccttttctattcaatttaaaatagtaagagagattttagtcctttcaatctttttatgatgcgtttggttgcaatgataagacgagacgagatgagataatccttcaaataatgttgtttggtttagggtcaaaggttgagataggattatctcagtgttgttccagttatccctcaaaa

SEQ ID NO: 76013 - DNA, 1955 bp, Zea Mays
cgcattctcccttccctggactattcttggtgggtggagagagccgcagaaggcagctggaagaggagaggaccgcgcgaggctccgtgccggcgagttcgggtgcttttcctgcggtccgagatgcgatcgttgggacccgggagatagcgcagctcgggttcgggttcgggggcggctaccgcgacggcggccgccacctgagcaggatgtttaactggaacgacgagcagcaccagagcaactagatggtaaatcagaagtgtttggtaatgatcaagaagaaaagagtaacagtttccttgattgcgactggggcaatattggaggttttgatgattttgaccgtctatttaggtcgaagcacataagaggccagtgtggtcacgtagaaaaccagaggaaagaggtaaaagtaaaatatccagcagtacaagtggcttctcccacagcaaagtagagagttcatcgacgaatttgcaaactcctatggaacctgtacagactcctcaatatgcactgttccaggatagcaagaagataggagaagttcagcatgctaatcagtttatgtttcctggatatgggtatcctcctgcatatccatttcctaccattccgttagtgtcaaacattcaagctgaaggctatcagacaaaaccagctggcacaagctaccgaacttcggaagattacctaaaacagtcaagttccacagaaatgtcacaagatataccatcaagaccactaacaatgacaccacaagaaaagatagaaaagcttaggcgccggcaacaaatgcaagcactgatagctattcagcaacaacagcaacagtttggtcaacagggtcctggcagtgacacaatggtgtctcaagcatacacccctggtaacaaaaatccggattccttagggagttcaattgtcatagatgaaaacacaaataaggttatttcgcctgagatgattccaactgaccatgaccgggttcacaagagttctgcaatttcagatgatccctttatagaggaaaaaatatattatcagctacaagatgctcttggcaagttggataccaaaactcgactatgcattcgagatagtttgcttcgtttggtccatagtgcaacagagagaaagattgatggtgataggagcactaacaagactaataaagatgaagatgaagcttcggaagacgcatctactaggaaaacaaggtctccaaacaaggaagcagaaacaaccactaatccaattgatcgtatagtggcccatttgctgttccacagacattgctccaaggttgcaaaagcaacaaaagaaataatatcgtcaatccccttgactctagaacctgagccgaaggtacccttgggaactcctagggttccatcaaaagatcaacgagatgagcaagaaattgtgttgcaaccatcacaataatgtgagatgtgctagaagataaggataaaaagttatgcaaatccagtgatgatggcagtcttatgatcgcctgtggccctggagatcgcttgtgtaatatgtagccatttcaacattgtaggatccttttattttcatcctgtaagaacatctcagattgtataggaacctacgattttgtgccgagccgtaaaaagagcaaaccttggctctggacataaggcgtgtttaggagcaagaggattaaagcaaaccttggctcttggctctggacataaggcgtgtttgggagcaagaggattaaagttgattgaaggggctaaaatccttttctattcaatttaaaatagtaagagagattttagtcctttcaatctttttatgatgcgtttggttgcaatgataagacgagacgagatgagataatccttcaaataatgttgtttggtttagggtcaaaggttgagataggattatctcagtgttgttccagttatccctcaaaa

SEQ ID NO: 76014 - DNA, 2324 bp, Zea Mays
ccaatgagcagcggccacgcattctcccttccctggactattcttggtgggtggagagagccgcagaaggcagctggaagaggagaggaccgcgcgaggctccgtgccggcgagttcgggtgcttttcctgcggtccgagatgcgatcgttgggacccgggagatagcgcagctcgggttcgggttcgggggcggctaccgcgacggcggccgccacctgagcaggatgtttaactggaacgacgagcagcaccaggtaagggatgcaatatgggctgaattcaatgagtgtgatgaccattttgggctttgcccaaagggggcaaaaaaaaacccaatatttatttccggggtccccaaaaacaatgaggaagaggtggctagtattgctgccatcactgaacagtctgcaggtgttcaaaatggacatcaagggaaggaaaaagcagactgcaagtcacacaagtgcacatatttcacccacacaaattgacatggaatcctggcccggacttccttccctgaatcctacacttgatagaaactatagtgatgacaacatagcatccacatatctggatttttgtgctgcaaccagtttacaagaagtgaccagaaattctacagagcaactagatggtaaatcagaagtgtttggtaatgatcaagaagaaaagagtaacagtttccttgattgcgactggggcaatattggaggttttgatgattttgaccgtctatttaggtcgaagcacataagaggccagtgtggtcacgtagaaaaccagaggaaagaggtaaaagtaaaatatccagcagtacaagtggcttctcccacagcaaagtagagagttcatcgacgaatttgcaaactcctatggaacctgtacagactcctcaatatgcactgttccaggatagcaagaagataggagaagttcagcatgctaatcagtttatgtttcctggatatgggtatcctcctgcatatccatttcctaccattccgttagtgtcaaacattcaagctgaaggctatcagacaaaaccagctggcacaagctaccgaacttcggaagattacctaaaacagtcaagttccacagaaatgtcacaagatataccatcaagaccactaacaatgacaccacaagaaaagatagaaaagcttaggcgccggcaacaaatgcaagcactgatagctattcagcaacaacagcaacagtttggtcaacagggtcctggcagtgacacaatggtgtctcaagcatacacccctggtaacaaaaatccggattccttagggagttcaattgtcatagatgaaaacacaaataagttggataccaaaactcgactatgcattcgagatagtttgcttcgtttggtccatagtgcaacagagagaaagattgatggtgataggagcactaacaagactaataaagatgaagatgaagcttcggaagacgcatctactaggaaaacaaggtctccaaacaaggaagcagaaacaaccactaatccaattgatcgtatagtggcccatttgctgttccacagacattgctccaaggttgcaaaagcaacaaaagaaataatatcgtcaatccccttgactctagaacctgagccgaaggtacccttgggaactcctagggttccatcaaaagatcaacgagatgagcaagaaattgtgttgcaaccatcacaataatgtgagatgtgctagaagataaggttttactcaatttgagtaaacttatttgcatttagttagcctatgaatctaatgtcgtccttctaacgagtatacacatgctgattaatcaactgttcaggataaaaagttatgcaaatccagtgatgatggcagtcttatgatcgcctgtggccctggagatcgcttgtgtaatatgtagccatttcaacattgtaggatccttttattttcatcctgtaagaacatctcagattgtataggaacctacgattttgtgccgagccgtaaaaagagcaaaccttggctctggacataaggcgtgtttaggagcaagaggattaaagcaaaccttggctcttggctctggacataaggcgtgtttgggagcaagaggattaaagttgattgaaggggctaaaatccttttctattcaatttaaaatagtaagagagattttagtcctttcaatctttttatgatgcgtttggttgcaatgataagacgagacgagatgagataatccttcaaataatgttgtttggtttagggtcaaaggttgagataggattatctcagtgttgttccagttatccctcaaaa

SEQ ID NO: 76015 - DNA, 1960 bp, Zea Mays
cgcctgcccaatgagcagcggccacgcattctcccttccctggactattcttggtgggtggagagagccgcagaaggcagctggaagaggagaggaccgcgcgaggctccgtgccggcgagttcgggtgcttttcctgcggtccgagatgcgatcgttgggacccgggagatagcgcagctcgggttcgggttcgggggcggctaccgcgacggcggccgccacctgagcaggatgtttaactggaacgacgagcagcaccagagcaactagatggtaaatcagaagtgtttggtaatgatcaagaagaaaagagtaacagtttccttgattgcgactggggcaatattggaggttttgatgattttgaccgtctatttaggtcgaagcacataagaggccagtgtggtcacgtagaaaaccagaggaaagaggtaaaagtaaaatatccagcagtacaagtggcttctcccacagcaaagtagagagttcatcgacgaatttgcaaactcctatggaacctgtacagactcctcaatatgcactgttccaggatagcaagaagataggagaagttcagcatgctaatcagtttatgtttcctggatatgggtatcctcctgcatatccatttcctaccattccgttagtgtcaaacattcaagctgaaggctatcagacaaaaccagctggcacaagctaccgaacttcggaagattacctaaaacagtcaagttccacagaaatgtcacaagatataccatcaagaccactaacaatgacaccacaagaaaagatagaaaagcttaggcgccggcaacaaatgcaagcactgatagctattcagcaacaacagcaacagtttggtcaacagggtcctggcagtgacacaatggtgtctcaagcatacacccctggtaacaaaaatccggattccttagggagttcaattgtcatagatgaaaacacaaataagttggataccaaaactcgactatgcattcgagatagtttgcttcgtttggtccatagtgcaacagagagaaagattgatggtgataggagcactaacaagactaataaagatgaagatgaagcttcggaagacgcatctactaggaaaacaaggtctccaaacaaggaagcagaaacaaccactaatccaattgatcgtatagtggcccatttgctgttccacagacattgctccaaggttgcaaaagcaacaaaagaaataatatcgtcaatccccttgactctagaacctgagccgaaggtacccttgggaactcctagggttccatcaaaagatcaacgagatgagcaagaaattgtgttgcaaccatcacaataatgtgagatgtgctagaagataaggttttactcaatttgagtaaacttatttgcatttagttagcctatgaatctaatgtcgtccttctaacgagtatacacatgctgattaatcaactgttcaggataaaaagttatgcaaatccagtgatgatggcagtcttatgatcgcctgtggccctggagatcgcttgtgtaatatgtagccatttcaacattgtaggatccttttattttcatcctgtaagaacatctcagattgtataggaacctacgattttgtgccgagccgtaaaaagagcaaaccttggctctggacataaggcgtgtttaggagcaagaggattaaagcaaaccttggctcttggctctggacataaggcgtgtttgggagcaagaggattaaagttgattgaaggggctaaaatccttttctattcaatttaaaatagtaagagagattttagtcctttcaatctttttatgatgcgtttggttgcaatgataagacgagacgagatgagataatccttcaaataatgttgtttggtttagggtcaaaggttgagataggattatctcagtgttgttccagttatccctcaaaa

SEQ ID NO: 76016 - DNA, 2073 bp, Zea Mays
ctgcagccgcctgcccaatgagcagcggccacgcattctcccttccctggactattcttggtgggtggagagagccgcagaaggcagctggaagaggagaggaccgcgcgaggctccgtgccggcgagttcgggtgcttttcctgcggtccgagatgcgatcgttgggacccgggagatagcgcagctcgggttcgggttcgggggcggctaccgcgacggcggccgccacctgagcaggatgtttaactggaacgacgagcagcaccagagcaactagatggtaaatcagaagtgtttggtaatgatcaagaagaaaagagtaacagtttccttgattgcgactggggcaatattggaggttttgatgattttgaccgtctatttagccatagtgactccatatttggtaatgagatagttgccaacgacagtgattttctttctgcatcttcgaatttgatggatactgctgtgctatcaatcccagttccggtcgaagcacataagaggccagtgtggtcacgtagaaaaccagaggaaagaggtaaaagtaaaatatccagcagtacaagtggcttctcccacagcaaagtagagagttcatcgacgaatttgcaaactcctatggaacctgtacagactcctcaatatgcactgttccaggatagcaagaagataggagaagttcagcatgctaatcagtttatgtttcctggatatgggtatcctcctgcatatccatttcctaccattccgttagtgtcaaacattcaagctgaaggctatcagacaaaaccagctggcacaagctaccgaacttcggaagattacctaaaacagtcaagttccacagaaatgtcacaagatataccatcaagaccactaacaatgacaccacaagaaaagatagaaaagcttaggcgccggcaacaaatgcaagcactgatagctattcagcaacaacagcaacagtttggtcaacagggtcctggcagtgacacaatggtgtctcaagcatacacccctggtaacaaaaatccggattccttagggagttcaattgtcatagatgaaaacacaaataagttggataccaaaactcgactatgcattcgagatagtttgcttcgtttggtccatagtgcaacagagagaaagattgatggtgataggagcactaacaagactaataaagatgaagatgaagcttcggaagacgcatctactaggaaaacaaggtctccaaacaaggaagcagaaacaaccactaatccaattgatcgtatagtggcccatttgctgttccacagacattgctccaaggttgcaaaagcaacaaaagaaataatatcgtcaatccccttgactctagaacctgagccgaaggtacccttgggaactcctagggttccatcaaaagatcaacgagatgagcaagaaattgtgttgcaaccatcacaataatgtgagatgtgctagaagataaggttttactcaatttgagtaaacttatttgcatttagttagcctatgaatctaatgtcgtccttctaacgagtatacacatgctgattaatcaactgttcaggataaaaagttatgcaaatccagtgatgatggcagtcttatgatcgcctgtggccctggagatcgcttgtgtaatatgtagccatttcaacattgtaggatccttttattttcatcctgtaagaacatctcagattgtataggaacctacgattttgtgccgagccgtaaaaagagcaaaccttggctctggacataaggcgtgtttaggagcaagaggattaaagcaaaccttggctcttggctctggacataaggcgtgtttgggagcaagaggattaaagttgattgaaggggctaaaatccttttctattcaatttaaaatagtaagagagattttagtcctttcaatctttttatgatgcgtttggttgcaatgataagacgagacgagatgagataatccttcaaataatgttgtttggtttagggtcaaaggttgagataggattatctcagtgttgttccagttatccctcaaaa

SEQ ID NO: 76017 - DNA, 1588 bp, Zea Mays
cgcattctcccttccctggactattcttggtgggtggagagagccgcagaaggcagctggaagaggagaggaccgcgcgaggctccgtgccggcgagttcgggtgcttttcctgcggtccgagatgcgatcgttgggacccgggagatagcgcagctcgggttcgggttcgggggcggctaccgcgacggcggccgccacctgagcaggatgtttaactggaacgacgagcagcaccaggtaagggatgcaatatgggctgaattcaatgagtgtgatgaccattttgggctttgcccaaagggggcaaaaaaaaacccaatatttatttccggggtccccaaaaacaatgaggaagaggtggctagtattgctgccatcactgaacagtctgcaggtgttcaaaatggacatcaagggaaggaaaaagcagactgcaagtcacacaagtgcacatatttcacccacacaaattgacatggaatcctggcccggacttccttccctgaatcctacacttgatagaaactatagtgatgacaacatagcatccacatatctggatttttgtgctgcaaccagtttacaagaagtgaccagaaattctacagagcaactagatggtaaatcagaagtgtttggtaatgatcaagaagaaaagagtaacagtttccttgattgcgactggggcaatattggaggttttgatgattttgaccgtctatttagccatagtgactccatatttggtaatgagatagttgccaacgacagtgattttctttctgcatcttcgaatttgatggatactgctgtgctatcaatcccagttccggtcgaagcacataagaggccagtgtggtcacgtagaaaaccagaggaaagaggtaaaagtaaaatatccagcagtacaagtggcttctcccacagcaaagtagagagttcatcgacgaatttgcaaactcctatggaacctgtacagactcctcaatatgcactgttccaggatagcaagaagataggagaagttcagcatgctaatcagtttatgtttcctggatatgggtatcctcctgcatatccatttcctaccattccgttagtgtcaaacattcaagctgaaggctatcagacaaaaccagctggcacaagctaccgaacttcggaagattacctaaaacagtcaagttccacagaaatgtcacaagatataccatcaagaccactaacaatgacaccacaagaaaagatagaaaagcttaggcgccggcaacaaatgcaagcactgatagctattcagcaacaacagcaacagtttggtcaacagggtcctggcagtgacacaatggtgtctcaagcatacacccctggtaacaaaaatccggattccttagggagttcaattgtcatagatgaaaacacaaataagttggataccaaaactcgactatgcattcgagatagtttgcttcgtttggtccatagtgcaacagagagaaagattgatggtgataggagcactaacaagactaataaagatgaagatgaagcttcggaagacgcatctactaggaaaacaagtttatatt

SEQ ID NO: 76018 - DNA, 4508 bp, Zea Mays
gatcaccatatcaaatttgtagatgaactataggagtataaactttattgagaaacttgcccctaaacctatattctactagtagataaggtagtccaaagaggggttaacagatctctgcattttcagagacagaacagtacactaagtctgaaattgcaatgttttggctgaatttgtaactcatttgtgcctaatacatagggtgttgggctatggagtatatatagaaattaaagaccataagttggtgagaaaaattctttaatagtgaagggtttaaaaatgcacaaaaattggagaaaaggttgctccaagttggatggtggtgactgagtttagttaagaatctaaaactgaattgtattcagtagctgaaaactgaatttcagtgaaagttggtgagtttggagctcatttgtgactcattcaagtggacttagactatgaattatatagtaaagttgaagatcgaagtattgtgagtaagtgccctaaagtgagatagacttggttctataaaatttgggggtaaaatgcctccaaacttctactgtcagacttaagttgagatgaacttagttgactgttgttgtgtgattcagtgagtttttaccaatatttggagccctatggtaattagtacatggagaattgagttaggaaatctaaagctagatgaaagcccatgttaaggacaacaaatttcatataagaagttggccttgctgctgtgtggaacttggggtacagtccattgcaaaaccttttgtcagacttagtgtgggctgttgcagacagctgaaactggcatttcagtaggggtgtctgatcttggaaccccgtaagtttgggatccatgcatctctggctcatggatgctatagaaactttgaagagctatgtgctgtgaacaagtttattatggagtgttgagtctggtgctatgcaaaaactccaataaaatgtccccaaatatgtgctgttaaattgtgctaatctgtctcagattcacactgctgaattgggtttcagtgatgttggctctactttggtgcttcacaacttttgttctatatgttttcaaccatggatttatgtaccaaagtagtagggctgcatctagagagtaactttggttaaaaaggactggtctgttatcatgtaaaattgtgcgattagggagggttaaactgggaggctgcaaggggcagtaagtgctgatgcacttggaatcaatgtttggtttaagtaaactgaagaagatcctctccctgctactgtcacatgtgtatgtgaatggtaatgaggtggaagtacatcaccaaggtcgagagaccccagcttcactgtaaatatccagtttgaactatatgggagtagggagctgtgggtattaattgtttttggttgctgtctgcagtaggggaacaaaggagatacttgtgtgctgggattgagataataatgaaccggaccgcaaacattctagaggcctcacccctgcagaaaatatcactttggactcaattaagtctgccctcgttggagttcctatctgctcattcccttatctacaaaagtgagcaggtgatatttgtgctatgaactagaccagattcagtgtcatgggtgcacatgtgacttgtgtggagttagtgcaagtgggccagcaaagtacatgtgcatggaagccacgttgtgctgctcctgcagtgctggcatgccccagaattcgtgttcaccaagtgtggtcgagtttccttgtccctgccaacatgtgcagtgatgcctgcccatgttcaatgcacatcggttgggttcagtgaagcttcaccttgccctcaggttctagcttaaaaccactgcataagtgttggaatttcagtggtcacactagtgctcatgtctcctcagccaccaactcggtcagcccttgtgcatagcgcgctatctccctgcttttagtgaccacagccaccagctccttcacctcacagtggccagaatgtagtcacgccaccgcaaatcgtcgtcgtgtttagtttcgtcgtcgaccagccaacttacgtcttcctcgagcagtttcatgcacccactgcaaacttggactgtcagaggtcccagaagaagaagtggtagctgaagggaagtctactccagtgcctgctcatcaagaggatagagatatccaactgatggttgggtagagagatctagcacctcttctctgctacaaaggcaagccccggtgcatttgccccttccttgtgttttaaatgctttatcacctgatatgatgcattaggttgataggagttgtgtgataaacaattgatgcattaccattccttggaaattcctaaatccctgttttataaaaagaattattactgcttagtcctgcttagaaactcaaaaatcatttgtttttcaaaagaatgatgtgtaacattggttatgggcttttgattcaaaggtgaaagcaaacttatgacgatgagtccatcagggctccggatgggttcatcatccgaaaagagtacccgtgtcgggtaccaaaaatggggaaatggtttgaataaatcgagaccagacgctgagctgacatggtcacccgtctgtgttgattaaggaccgtaccgttgactggcctgttgtggttgagactttgcaactagccccataccctggtatgggacagggtaagcttgaacccggctattccatacgtgaagagacaatcgcgcactgggagtggagagatggcgagagtagcatgtaccctcctggcatagtagcacgcctggtagggtaatgtgctctcgggtggcgcggacctgttcatgtagtggaggactccgtgggaacggttgacatatgcaagggttaagtgctacatatgtcgtgtggttagagatccccagctgggtataatcggttcgaatcgtcgttgctcctcggttatgaagactcatcccggtgaccatcatcgtagttagcaagtgaaataaaagtatggataaaatgcagctagtacataggtcaagtgcttgaactagattaggcaaatctagattcaggtaaatatctaacttgtgaaataaaacttggcttaaggatcaactggtagcaagcttttctgcaaaaaggagtctttgatcattgataagctttaccttgattcccaatcagctagcatacccttgagagtcttttctttagtcgggtaagtcttgctgagtaattgcgtactcagggttttatcccctgttgtttttgcaggagaagttttattcccttatcttttggttagttacttcatgtggaggccttgaagcttagaatgtttatgtgtatctcttatggaaaggcttcacccttccaattattataataagttatgcactttgggtactatcaggacttgtaataattacaattcttcttatgttgtaaaacttgagctttgtaaatgtaaaatatgttttgtaaagtcttccgctttatctccgaagtgtgtgtgtatcgagtgtgattactgtaatatgcatgaatgtgcgagatccttgggataatgagttcaagttgttgaactcatgatagccttgttaagttacctggtacacgtgcatagccatctgaggccttcaaggcaaggattggtgcacgtgggcccgataactcgggagggctataacaccgcgtgtcggcgccgtccaatgcacagagcggcgcgggagcacgagttgggctggcgcagaggtttttttccctcgtgggccaaaatggtagccgcggcctaggtagaggtaggttattcttcctcttttctttttattttccattttcttttcttgttttcttttccttttaattttcaaattcttagtttaaatacccatttaagttcaaacttcctagccaatttcttttctcattaaattctcacctttgacatggtatggatgaattcatccaattttaatatttattttttatcactagtgctctttttttttgttttctaaatctaagattccaatttaagtcttgaattccacttgggacactaatatttttctatttatattacttttatatagccaccaaatgcacacactaataaaatccagcatgatgcaagttttagtgccatacatttttattaattatttgtttttaaagatggtgttcacatgaaataacaaatatagataacaaccatatataagggaataaaatttctctttttaggcttttcttacaaagtgggtattacaaatcctacccccttaacaagaatcccgtcctcgagatttaggaggaacgagggaaaagatggggaaaatctatgtgaagctcttcttctctctcccaagtagcttcatcttcaccatggtgactccattgtactttgcacatccttatcatcttatttcttgtaactcgagtcaaagtatcaagaatcttggtcgggtattccgtataagtcaaatcaccctgaa

SEQ ID NO: 76019 - DNA, 893 bp, Zea Mays
ccacatgtgcagtgatgcctgcccatgttcaatgcacatcggttggtttcagtgaagcttcaccttgccctcaggtcctagcttaaaaccactgcataagtgttggaatttcagtggtcacgctagtgctcatgtctcctcagccaccaactcggtcagcccttgtgcatagcgcgctatctccctgcttttagttaccacagccaccggctccttcacctcacagtggccagaatgtagtcacgccaccgcaaatcgtcgccgtgtttagtttcgtcgtcgaccagccaacttatgtcttcctcgagcagtttcatgcacccactgcaaacttggactgtcagagctcccaaaagaagaagtggtagctgaagggaagtctactccagtgcctgctcatcaagaggatagagatatctaactgatggttgggtagagagatctagcacctcttctctgcaacaaaggcaagccccggtgcatttgcccttccttgtgttttaaatgctttatcacttgatatgatgcattaagttgataggagttgtgtgataaacaattgatgcattaccattccttggaaattcctaaatccctattttataaaaagaattattactgcttagtcctgcttaaaaactcaaaaatcatttgtttttcaaaagaatgatgtgtaacattggttatgggcttttgattcaaaggtgaaagcaaacttatgatgatgagtccatcagggctccggatgggtttatcatctgaaaagagtacccctgccgggtaccaaaaatggggaaatggtttgaataaatcgagaccagacgctgagctgacatggtcgcccgtctgtgttgattaaggaccgtaccgttgactgacctgttgtggttgag

SEQ ID NO: 76020 - DNA, 6194 bp, Zea Mays
ctactaggaaaaacctagacacgaagtccaacccaaatctcaatatcccaaccctccgatccccatttccatccactccgacaccaatcctccgctccgaccaccgccggagaaatggggcggcgccgccggttcgcgcagctggacgatgacgacgacgacgacgaagacgtgcccatcaatttcaagccctcgggtggcgcctcctcctcggacgccaaacccaggaagccccagccgccgccgcagcagcgccgcgagcaggaggccgagacgaagactcgccgccgccggggacggcccaagcgccgccgcgacccggggagcgaggatgaggagcccgaggagctagagctgcaaacggaggatccccgtgaggaggagatcacggaggcggtgcccgtagctgtaggggacccggtcaagatcactggcaaggggaagaagcagaagaagcactatgcttccttcgagtacgagggcaacagcttcgagctggaggaccccgtgcttctcacgcctgaggacagcaatcagaagccctatgtcgccatcctcaaggatataacagaaactgatgggagcctatatgtaactggccaatggttttatagaccagaagaggctgacaaaaaggagggtggattctgggtagcacgagatacacgagagctattttacagttttcatactgatgatgtgcctgcagaatcagttatgcacaaatgtgtggtccatttcattcctcagcaaaaacagattcccagtcgaaagcagcatccgggatttattgtccagaaggtctatgatgcagttgagaagaaactgtggaacctaacagacaaggactatgaggataacaagcagcaagagattgatcttctggttaagaaaacaatagaccgtattgggcagcttcctgatctcgaacctgaagagacacctcttgagaacaattatttgtcaaataaacgaggcctgcgtaagaaacctgttaaccctatagatgtaacaagagaacctccagttggcaaatccgagcagtttgcaaaagcagagacacctggaagtgataagatacggaattatgatacccttgttaagtataaagtacttactggacattctcatcgtgataggtggctcgataaattgatagaaagtattccgcttgcatcaaaggagaatgctggaacatctgctgatgctaattctacagccaaaagttcaatcagtggttcacctgcaaaggatgttggttctgctgaaaatgaaaaatcatatggacttgatgttgttgttgagataatgactgcattagaaagatctgcatatgaagctcttggaacagattttgggaaatataaccagaaactgcgacaactacagttcaacatcaagaatatctctaaacttcgcaggaggctgatggacaaggagcttgatcctccagttcttttaaccatgtcccccgatgaattaaaggagaactgcgtatcattatattaagaagcaagaagggtctaagatagtccgaatacaaggtgccacaattggcggccctctataacctggccaccaaaagtgccaccaaaaggcaactccctagctacaaaccacctacaaagacacccacaaactcctaagagcagaagctcctgcaataccccttaaggtagcatcttcctgaatattttgcaagagtgtgtcgacatttggtgaggctgcataaaacacacatcacacatgcattcctatgtttccaaatccaccaggtcaccaagatgacagtggagttaaaaccttttctgtgaattttctgcatatctccaccaatcttggaacaccttatcattaactgtagacgccagatgctgcaaacccactttactcagaatccggaatcaaatttccctagcaaatacacaagatacaagaatgtgctgaactgtttcctgttcctggtcgcatagcagacatctctgggtgatccatgcctcgttgtgcaagactgtgcaagacgatcagcagtccaacatctattgagggaggccaaccaaataaaacatttacaccgaggtggaacccagctcttccagatcctattggctggctcaaaggatactgcaccagcaaggaaatgctcatatgcagatttcgcagagtactctcctgaagatgttggcagccatcggtgttgatcaggaaccgcaggctggagatgaacttcctgtaatatatcccagaccatgaagaattccagaataacctgtattggtagactaccagagatgtcttgaacccatctatgctcctccaaagcctgctggactgttttttttcttaattcttatagagatacgggtagacaaagctggagcaatctgagtcagggacatcccattaagccaattatccgaccagaacatagtggaggtgccaaagcctgctggactgtttttttttcttaattcttatagagatacgggtagacaaagctggagcaatctgagtcagggacatcccattaagccaattatccgaccagaacatagtggaggtgccgttaccaactacagaacacattgatgctgcaaataaggctgcagccatagggtgtgtcctaacctcaaattcagcccaaggcctattcggttgagtcttcttaagccaaagccatctaatatttagagcccaacccataatttccaagtcatgaatacccagacctccttgagcaagtggtctgcatacccttgtccatccaacagaacaatgcccacctttgatactgtcctgcctttccacagaaaacccctcctgattttatcaatagccttgacaacccatttagggcattgtagagctataaggtgatagacgggaatggcagaaagcacggatttaactaacacagctctacctgccgggtgcagtagagccgccttccaccttggcaacttatctgcaactttgttaatgaggtccaaaaaaacactccttggaagtttcctaacagaaagaggaagacccaaatatttgcaggaaaaagtcaataccctgcaggggagaaaaaaaactgtgcagcaataatatcctgctcctcacactgaattggtgttaggctgcatttattcaagcttgtgatcagacctgaagccataccaaagatccatataatttctttgatcacagcaaactcttcttcctttggcttcaaaaacaggactacatcatctgcatatagcgatacccgttgaccagagcctcttcttaacaaaggctgcagcaggcccaaattactagccttttggattagataattcagcacatccataacaaggataaagagcattagggagagaggatccccctgtctcaacccacgctcgtggcaaattagatccctaggttctccattcaccaacactctagtcgaggaggagtgcagcaatttagcaatcatattgcaccacaatgggccaaaaccaagatgccggagaacttcaaacaggaatggccaagagactgagtcaaaagccttaccaatgtccaatttaagtagggcaaccggatccttctgcttgtggacggctctggcagtttgctggaccataagataattgtcatgtatgctcctccctttcacaaatgcactttggtttgaggaaaccagacccggaagcttgagcgcatgcctaccggccataattttattgacaatcttagcaagggaacacatccggtgcacatatggtgcacatgaactaacaaagttcacaaaaaattctgaaaaaaatcatacatatattttttttccattttactccaattatatacaaaatttcaagttcaaattcattatactttagctgtaataaaaatataaattttctgacaagtttaaattagaaaatcagctaaaatgttatcttttttattacagataaaatataacgaacttgaacttgaaattttgtatataataggagtaggatggaaataatatgtatggttttttagaatattttgtgaactttgttagtttatgtgcactggatatgttcactcttagcaaagctatgaattaggctaatcggccgaaaatctataacctctatggcctcctgtttttaggcagcaaaatcacataagcagagtcaaggagctgcagtttagaaacatccccatggaagatcatccctaaggcagccataaaattgttcttaataaccggccaagcatagtgctggacctcggatcgactggctaagcgagggttaccccatcaagcagcatccctttttgtgatcagtcagaggaaaccatacatcacatccttttctcctgtgtgctgcccagagaagtttgggatgggattttgaggaaacttaatcttgatatggttccacgccccaattcctctatcccgttttggacctggtggtgtaaggccactgttgctatccacagattttaaaaaagaatttcttggtcattttagtctcttgggagctttggaagcacagaaatgcgtgcatgttcgatggagttcaacctcagccacaagcgatttttgctcaatcggctgttgaatcccacatgtggtgcttggctggggcttctaaccttaagaagctcctcctaagggaggctccttaggctgggggtggtcgtttaggtcgtttgcagctgctgtgtaaagtgttcgagtgctcctctccttttattttttttctgccttaatgaaatgacacacagttctcctgcgtagttctaaaaaaaataaccggccaagcacatttataaaaacgaccagtaaaccatttggacctggggctttataagaaggtaggagattaatagtactccacacctcctcagagatcaaaagatcaagacgcaagaggtcgatagatggtcgatggaaggcctctaagtttagagacaattccctgtgtgtagcagttcccaacagattattaaagaaatcccaaatcacagttttcttatcttcctgttcaaccaagattctgtccccaactttctattttctgatgaagtttttcttctttctatatcttgcgtgatggtgaaaataggaagtattagcatctccttccttcatccaattaagctcacttctgagcctagccatggttctcttcatagaggacaacccccataaatgctgtttaagacggcagcgcagccactcttcattaaaggataagacccttgagtccctggccatctccagacgatgaataatctccttggccaaaaacagttgtcgtttgaccagcccaattcttttctcactccatgactgtagctgcctcacaaaacttttcagtttatccacaaagcgctgcagtgaacaaaccgcatctaccggctggctgatcccaagaagagcacacctcatccatgaaaccatccaatctaactcaaaaactttcaaaatgaaacgtctcttgtcttgtgtgagttcattcattctaacagaagaggacaatgatctgagatcaaggaagcagaactttctaaaaactcggccggggagggaaagaccgccctcccggtattatattaagaagagaccgaaacaatggtcccggccgagaaaatccccgaaccctggcctccatcactaacgggccggcgtcaactgtacactctacaacgacccagccggagggtggcacacaggacatcgtaggacatcgtaacccgagagtggatggggcataacgtgggaatttttttaaccaagcctgaaaattcgccccagagggggatcagactcaggacttggaggtgctacttggaagcccttaaccactaggctagaggccctttcgtgaagcagaactttctagaacagaatctggaaaaagatcccccaatcactggtatggaagacccgatccaaacgaacaagagtagaagatctctcgttggaccaggtgaactttattcccagcagaggtaactcaattaaatgcaaatcattaataagcttcctgaatctccccatcatagctctgttgagattgttattgttcttgtcctcagaacgggaatatgaggttaaaatcaccaccaatcgtccaaggaccctagcagaaagacctaaccaagcaaagctcttgcaaaaactgattttatttttctcattctggggcgataaa

SEQ ID NO: 76021 - DNA, 5703 bp, Zea Mays
ctactaggaaaaacctagacacgaagtccaacccaaatctcaatatcccaaccctccgatccccatttccatccactccgacaccaatcctccgctccgaccaccgccggagaaatggggcggcgccgccggttcgcgcagctggacgatgacgacgacgacgacgaagacgtgcccatcaatttcaagccctcgggtggcgcctcctcctcggacgccaaacccaggaagccccagccgccgccgcagcagcgccgcgagcaggaggccgagacgaagactcgccgccgccggggacggcccaagcgccgccgcgacccggggagcgaggatgaggagcccgaggagctagagctgcaaacggaggatccccgtgaggaggagatcacggaggcggtgcccgtagctgtaggggacccggtcaagatcactggcaaggggaagaagcagaagaagcactatgcttccttcgagtacgagggcaacagcttcgagctggaggaccccgtgcttctcacgcctgaggacagcaatcagaagccctatgtcgccatcctcaaggatataacagaaactgatgggagcctatatgtaactggccaatggttttatagaccagaagaggctgacaaaaaggagggtggattctgggtagcacgagatacacgagagctattttacagttttcatactgatgatgtgcctgcagaatcagttatgcacaaatgtgtggtccatttcattcctcagcaaaaacagattcccagtcgaaagcagcatccgggatttattgtccagaaggtctatgatgcagttgagaagaaactgtggaacctaacagacaaggactatgaggataacaagcagcaagagattgatcttctggttaagaaaacaatagaccgtattgggcagcttcctgatctcgaacctgaagagacacctcttgagaacaattatttgtcaaataaacgaggcctgcgtaagaaacctgttaaccctatagatgtaacaagagaacctccagttggcaaatccgagcagtttgcaaaagcagagacacctggaagtgataagatacggaattatgatacccttgttaagtataaagtacttactggacattctcatcgtgataggtggctcgataaattgatagaaagtattccgcttgcatcaaaggagaatgctggaacatctgctgatgctaattctacagccaaaagttcaatcagtggttcacctgcaaaggatgttggttctgctgaaaatgaaaaatcatatggacttgatgttgttgttgagataatgactgcattagaaagatctgcatatgaagctcttggaacagattttgggaaatataaccagaaactgcgacaactacagttcaacatcaagaatatctctaaacttcgcaggaggctgatggacaaggagcttgatcctccagttcttttaaccatgtcccccgatgaattaaagacatctctgggtgatccatgcctcgttgtgcaagactgtgcaagacgatcagcagtccaacatctattgagggaggccaaccaaataaaacatttacaccgaggtggaacccagctcttccagatcctattggctggctcaaaggatactgcaccagcaaggaaatgctcatatgcagatttcgcagagtactctcctgaagatgttggcagccatcggtgttgatcaggaaccgcaggctggagatgaacttcctgtaatatatcccagaccatgaagaattccagaataacctgtattggtagactaccagagatgtcttgaacccatctatgctcctccaaagcctgctggactgttttttttcttaattcttatagagatacgggtagacaaagctggagcaatctgagtcagggacatcccattaagccaattatccgaccagaacatagtggaggtgccaaagcctgctggactgtttttttttcttaattcttatagagatacgggtagacaaagctggagcaatctgagtcagggacatcccattaagccaattatccgaccagaacatagtggaggtgccgttaccaactacagaacacattgatgctgcaaataaggctgcagccatagggtgtgtcctaacctcaaattcagcccaaggcctattcggttgagtcttcttaagccaaagccatctaatatttagagcccaacccataatttccaagtcatgaatacccagacctccttgagcaagtggtctgcatacccttgtccatccaacagaacaatgcccacctttgatactgtcctgcctttccacagaaaacccctcctgattttatcaatagccttgacaacccatttagggcattgtagagctataaggtgatagacgggaatggcagaaagcacggatttaactaacacagctctacctgccgggtgcagtagagccgccttccaccttggcaacttatctgcaactttgttaatgaggtccaaaaaaacactccttggaagtttcctaacagaaagaggaagacccaaatatttgcaggaaaaagtcaataccctgcaggggagaaaaaaaactgtgcagcaataatatcctgctcctcacactgaattggtgttaggctgcatttattcaagcttgtgatcagacctgaagccataccaaagatccatataatttctttgatcacagcaaactcttcttcctttggcttcaaaaacaggactacatcatctgcatatagcgatacccgttgaccagagcctcttcttaacaaaggctgcagcaggcccaaattactagccttttggattagataattcagcacatccataacaaggataaagagcattagggagagaggatccccctgtctcaacccacgctcgtggcaaattagatccctaggttctccattcaccaacactctagtcgaggaggagtgcagcaatttagcaatcatattgcaccacaatgggccaaaaccaagatgccggagaacttcaaacaggaatggccaagagactgagtcaaaagccttaccaatgtccaatttaagtagggcaaccggatccttctgcttgtggacggctctggcagtttgctggaccataagataattgtcatgtatgctcctccctttcacaaatgcactttggtttgaggaaaccagacccggaagcttgagcgcatgcctaccggccataattttattgacaatcttagcaagggaacacatccggtgcacatatggtgcacatgaactaacaaagttcacaaaaaattctgaaaaaaatcatacatatattttttttccattttactccaattatatacaaaatttcaagttcaaattcattatactttagctgtaataaaaatataaattttctgacaagtttaaattagaaaatcagctaaaatgttatcttttttattacagataaaatataacgaacttgaacttgaaattttgtatataataggagtaggatggaaataatatgtatggttttttagaatattttgtgaactttgttagtttatgtgcactggatatgttcactcttagcaaagctatgaattaggctaatcggccgaaaatctataacctctatggcctcctgtttttaggcagcaaaatcacataagcagagtcaaggagctgcagtttagaaacatccccatggaagatcatccctaaggcagccataaaattgttcttaataaccggccaagcatagtgctggacctcggatcgactggctaagcgagggttaccccatcaagcagcatccctttttgtgatcagtcagaggaaaccatacatcacatccttttctcctgtgtgctgcccagagaagtttgggatgggattttgaggaaacttaatcttgatatggttccacgccccaattcctctatcccgttttggacctggtggtgtaaggccactgttgctatccacagattttaaaaaagaatttcttggtcattttagtctcttgggagctttggaagcacagaaatgcgtgcatgttcgatggagttcaacctcagccacaagcgatttttgctcaatcggctgttgaatcccacatgtggtgcttggctggggcttctaaccttaagaagctcctcctaagggaggctccttaggctgggggtggtcgtttaggtcgtttgcagctgctgtgtaaagtgttcgagtgctcctctccttttattttttttctgccttaatgaaatgacacacagttctcctgcgtagttctaaaaaaaataaccggccaagcacatttataaaaacgaccagtaaaccatttggacctggggctttataagaaggtaggagattaatagtactccacacctcctcagagatcaaaagatcaagacgcaagaggtcgatagatggtcgatggaaggcctctaagtttagagacaattccctgtgtgtagcagttcccaacagattattaaagaaatcccaaatcacagttttcttatcttcctgttcaaccaagattctgtccccaactttctattttctgatgaagtttttcttctttctatatcttgcgtgatggtgaaaataggaagtattagcatctccttccttcatccaattaagctcacttctgagcctagccatggttctcttcatagaggacaacccccataaatgctgtttaagacggcagcgcagccactcttcattaaaggataagacccttgagtccctggccatctccagacgatgaataatctccttggccaaaaacagttgtcgtttgaccagcccaattcttttctcactccatgactgtagctgcctcacaaaacttttcagtttatccacaaagcgctgcagtgaacaaaccgcatctaccggctggctgatcccaagaagagcacacctcatccatgaaaccatccaatctaactcaaaaactttcaaaatgaaacgtctcttgtcttgtgtgagttcattcattctaacagaagaggacaatgatctgagatcaaggaagcagaactttctaaaaactcggccggggagggaaagaccgccctcccggtattatattaagaagagaccgaaacaatggtcccggccgagaaaatccccgaaccctggcctccatcactaacgggccggcgtcaactgtacactctacaacgacccagccggagggtggcacacaggacatcgtaggacatcgtaacccgagagtggatggggcataacgtgggaatttttttaaccaagcctgaaaattcgccccagagggggatcagactcaggacttggaggtgctacttggaagcccttaaccactaggctagaggccctttcgtgaagcagaactttctagaacagaatctggaaaaagatcccccaatcactggtatggaagacccgatccaaacgaacaagagtagaagatctctcgttggaccaggtgaactttattcccagcagaggtaactcaattaaatgcaaatcattaataagcttcctgaatctccccatcatagctctgttgagattgttattgttcttgtcctcagaacgggaatatgaggttaaaatcaccaccaatcgtccaaggaccctagcagaaagacctaaccaagcaaagctcttgcaaaaactgattttatttttctcattctggggcgataaa

SEQ ID NO: 76022 - DNA, 7316 bp, Zea Mays
aaaatgaagcagtcccaaatactcaagctggatgatacaaagttaagtttagagcatcttcaaaggacacttcatttttttattactttttatttgactctttatttatctctcaataacgattatactctataatatagcatctcatctcaaccgactctctaatatgcaatttagtttggttaggaagatgactaatttagagagccagatatcttgacgatttagataattattctgttgaatagttattttgctattaaatagctaaaatttagtattttagagatgttcttaaggttagtatgctactaggaaaaacctagacacgaagtccaacccaaatctcaatatcccaaccctccgatccccatttccatccactccgacaccaatcctccgctccgaccaccgccggagaaatggggcggcgccgccggttcgcgcagctggacgatgacgacgacgacgacgaagacgtgcccatcaatttcaagccctcgggtggcgcctcctcctcggacgccaaacccaggaagccccagccgccgccgcagcagcgccgcgagcaggaggccgagacgaagactcgccgccgccggggacggcccaagcgccgccgcgacccggggagcgaggatgaggagcccgaggagctagagctgcaaacggaggatccccgtgaggaggagatcacggaggcggtgcccgtagctgtaggggacccggtcaagatcactggcaaggggaagaagcagaagaagcactatgcttccttcgagtacgagggcaacagcttcgagctggaggaccccgtgcttctcacgcctgaggacagcaatcagaagccctatgtcgccatcctcaaggatataacagaaactgatgggagcctatatgtaactggccaatggttttatagaccagaagaggctgacaaaaaggagggtggattctgggtagcacgagatacacgagagctattttacagttttcatactgatgatgtgcctgcagaatcagttatgcacaaatgtgtggtccatttcattcctcagcaaaaacagattcccagtcgaaagcagcatccgggatttattgtccagaaggtctatgatgcagttgagaagaaactgtggaacctaacagacaaggactatgaggataacaagcagcaagagattgatcttctggttaagaaaacaatagaccgtattgggcagcttcctgatctcgaacctgaagagacacctcttgagaacaattatttgtcaaataaacgaggcctgcgtaagaaacctgttaaccctatagatgtaacaagagaacctccagttggcaaatccgagcagtttgcaaaagcagagacacctggaagtgataagatacggaattatgatacccttgttaagtataaagtacttactggacattctcatcgtgataggtggctcgataaattgatagaaagtattccgcttgcatcaaaggagaatgctggaacatctgctgatgctaattctacagccaaaagttcaatcagtggttcacctgcaaaggatgttggttctgctgaaaatgaaaaatcatatggacttgatgttgttgttgagataatgactgcattagaaagatctgcatatgaagctcttggaacagattttgggaaatataaccagaaactgcgacaactacagttcaacatcaagaatatctctaaacttcgcaggaggctgatggacaaggagcttgatcctccagttcttttaaccatgtcccccgatgaattaaaggtgtatttcccatttcatattttgtgtttttgttactgtacgatccagataccttatcctatttaccttgttgacaaaattgatttcattcttgtggtaatttccttcaatattgtttgtactgccaaagttgatatgacaatttagcatactatgacaacttgggcagctgcttttgcagcatgaaactgcatcatatgccaacacaatataatcttactgtatataacagacaagtttttgtttttactgcatatttttggaaatttgtttttcatcagtgatgcacgatatattcccttattccttcagttctcattgagtagggagtgtttgtccttcaaaggccgaatacctatactccttcggtttttattcgagtataaaggtgcatagttccttttccaaagagattgacgatatgtggctgcgcatactgtcagttgtgtgaattacttggtggctcatctgtggtagtgtttggtgtggggtgcgtgggggttgcggtaaatatttaaactcttcctcttagttcaattatacacagttctgtgtattcgagaggaaaatagaattatgactattagcactgctgtacatttttttatctagttacgttaaacttgcaagtgcatggtatttgacagtaatgcattgagtttactaaagtactggtagtgtaggtttgctagagggcctcttctattatgagaaaatggtttttatattttcttaaatttcttaacattttccagactgtatgttacactatatcatgaattcgctgccacaattttttttctcgaacacgcaggagaactgcgtatcattatattaagaagcaagaagggtctaagatagtccgaatacaaggtgccacaattggcggccctctataacctggccaccaaaagtgccaccaaaaggcaactccctagctacaaaccacctacaaagacacccacaaactcctaagagcagaagctcctgcaataccccttaaggtagcatcttcctgaatattttgcaagagtgtgtcgacatttggtgaggctgcataaaacacacatcacacatgcattcctatgtttccaaatccaccaggtcaccaagatgacagtggagttaaaaccttttctgtgaattttctgcatatctccaccaatcttggaacaccttatcattaactgtagacgccagatgctgcaaacccactttactcagaatccggaatcaaatttccctagcaaatacacaagatacaagaatgtgctgaactgtttcctgttcctggtcgcatagcagacatctctgggtgatccatgcctcgttgtgcaagactgtgcaagacgatcagcagtccaacatctattgagggaggccaaccaaataaaacatttacaccgaggtggaacccagctcttccagatcctattggctggctcaaaggatactgcaccagcaaggaaatgctcatatgcagatttcgcagagtactctcctgaagatgttggcagccatcggtgttgatcaggaaccgcaggctggagatgaacttcctgtaatatatcccagaccatgaagaattccagaataacctgtattggtagactaccagagatgtcttgaacccatctatgctcctccaaagcctgctggactgttttttttcttaattcttatagagatacgggtagacaaagctggagcaatctgagtcagggacatcccattaagccaattatccgaccagaacatagtggaggtgccaaagcctgctggactgtttttttttcttaattcttatagagatacgggtagacaaagctggagcaatctgagtcagggacatcccattaagccaattatccgaccagaacatagtggaggtgccgttaccaactacagaacacattgatgctgcaaataaggctgcagccatagggtgtgtcctaacctcaaattcagcccaaggcctattcggttgagtcttcttaagccaaagccatctaatatttagagcccaacccataatttccaagtcatgaatacccagacctccttgagcaagtggtctgcatacccttgtccatccaacagaacaatgcccacctttgatactgtcctgcctttccacagaaaacccctcctgattttatcaatagccttgacaacccatttagggcattgtagagctataaggtgatagacgggaatggcagaaagcacggatttaactaacacagctctacctgccgggtgcagtagagccgccttccaccttggcaacttatctgcaactttgttaatgaggtccaaaaaaacactccttggaagtttcctaacagaaagaggaagacccaaatatttgcaggaaaaagtcaataccctgcaggggagaaaaaaaactgtgcagcaataatatcctgctcctcacactgaattggtgttaggctgcatttattcaagcttgtgatcagacctgaagccataccaaagatccatataatttctttgatcacagcaaactcttcttcctttggcttcaaaaacaggactacatcatctgcatatagcgatacccgttgaccagagcctcttcttaacaaaggctgcagcaggcccaaattactagccttttggattagataattcagcacatccataacaaggataaagagcattagggagagaggatccccctgtctcaacccacgctcgtggcaaattagatccctaggttctccattcaccaacactctagtcgaggaggagtgcagcaatttagcaatcatattgcaccacaatgggccaaaaccaagatgccggagaacttcaaacaggaatggccaagagactgagtcaaaagccttaccaatgtccaatttaagtagggcaaccggatccttctgcttgtggacggctctggcagtttgctggaccataagataattgtcatgtatgctcctccctttcacaaatgcactttggtttgaggaaaccagacccggaagcttgagcgcatgcctaccggccataattttattgacaatcttagcaagggaacacatccggtgcacatatggtgcacatgaactaacaaagttcacaaaaaattctgaaaaaaatcatacatatattttttttccattttactccaattatatacaaaatttcaagttcaaattcattatactttagctgtaataaaaatataaattttctgacaagtttaaattagaaaatcagctaaaatgttatcttttttattacagataaaatataacgaacttgaacttgaaattttgtatataataggagtaggatggaaataatatgtatggttttttagaatattttgtgaactttgttagtttatgtgcactggatatgttcactcttagcaaagctatgaattaggctaatcggccgaaaatctataacctctatggcctcctgtttttaggcagcaaaatcacataagcagagtcaaggagctgcagtttagaaacatccccatggaagatcatccctaaggcagccataaaattgttcttaataaccggccaagcatagtgctggacctcggatcgactggctaagcgagggttaccccatcaagcagcatccctttttgtgatcagtcagaggaaaccatacatcacatccttttctcctgtgtgctgcccagagaagtttgggatgggattttgaggaaacttaatcttgatatggttccacgccccaattcctctatcccgttttggacctggtggtgtaaggccactgttgctatccacagattttaaaaaagaatttcttggtcattttagtctcttgggagctttggaagcacagaaatgcgtgcatgttcgatggagttcaacctcagccacaagcgatttttgctcaatcggctgttgaatcccacatgtggtgcttggctggggcttctaaccttaagaagctcctcctaagggaggctccttaggctgggggtggtcgtttaggtcgtttgcagctgctgtgtaaagtgttcgagtgctcctctccttttattttttttctgccttaatgaaatgacacacagttctcctgcgtagttctaaaaaaaataaccggccaagcacatttataaaaacgaccagtaaaccatttggacctggggctttataagaaggtaggagattaatagtactccacacctcctcagagatcaaaagatcaagacgcaagaggtcgatagatggtcgatggaaggcctctaagtttagagacaattccctgtgtgtagcagttcccaacagattattaaagaaatcccaaatcacagttttcttatcttcctgttcaaccaagattctgtccccaactttctattttctgatgaagtttttcttctttctatatcttgcgtgatggtgaaaataggaagtattagcatctccttccttcatccaattaagctcacttctgagcctagccatggttctcttcatagaggacaacccccataaatgctgtttaagacggcagcgcagccactcttcattaaaggataagacccttgagtccctggccatctccagacgatgaataatctccttggccaaaaacagttgtcgtttgaccagcccaattcttttctcactccatgactgtagctgcctcacaaaacttttcagtttatccacaaagcgctgcagtgaacaaaccgcatctaccggctggctgatcccaagaagagcacacctcatccatgaaaccatccaatctaactcaaaaactttcaaaatgaaacgtctcttgtcttgtgtgagttcattcattctaacagaagaggacaatgatctgagatcaaggaagcagaactttctaaaaactcggccggggagggaaagaccgccctcccggtattatattaagaagagaccgaaacaatggtcccggccgagaaaatccccgaaccctggcctccatcactaacgggccggcgtcaactgtacactctacaacgacccagccggagggtggcacacaggacatcgtaggacatcgtaacccgagagtggatggggcataacgtgggaatttttttaaccaagcctgaaaattcgccccagagggggatcagactcaggacttggaggtgctacttggaagcccttaaccactaggctagaggccctttcgtgaagcagaactttctagaacagaatctggaaaaagatcccccaatcactggtatggaagacccgatccaaacgaacaagagtagaagatctctcgttggaccaggtgaactttattcccagcagaggtaactcaattaaatgcaaatcattaataagcttcctgaatctccccatcatagctctgttgagattgttattgttcttgtcctcagaacgggaatatgaggttaaaatcaccaccaatcgtccaaggaccctagcagaaagacctaaccaagcaaagctcttgcaaaaactgattttatttttctcattctggggcgataaa

SEQ ID NO: 76023 - DNA, 1069 bp, Zea Mays
atgacagtgatattgtctttgctgccccgctccgcagcctccgtggccaacctcttcgagcacattccaggctctttaaccgtgtccttgattattgacagcacgtcctggttgcttaccacatcccataggccatcactagccatcaccaggaactcatcatcagctgataaagcagtttcaataacctcaggttgtgctgtgacagctggcttgaggtcatcatcaccaattgaccttgtaacctgttagaaaagtctcatttctaaacacaaatttcaatcttttaagcaagcagactccagcacagcctcatttataccatttactggctactgccacaagtcacaaaagtgatataaagaaaaggatgcaacatttttcttatgaccttagttcctgtaactaatcaattcatctctagtttggggacacacaaaaaaatgaatggaaggactttattccaaatgatataacataacacaatattagagttaagtccaaggcaccattaaaatatgagttaaatgcatcaacggaccataaacttatcaagaggtgccacttaggtccacgaacttatttataggtctttaaacttgttaagtgttacgccacatgtcggggatgaataacccatgtacggcacaaaacctcaagaacatgtctaaatttgtttcctgaccttcgtgaatagtcctgcttcggccgacccctgaccaaggtcttcaactcgtttgtcccctatccgcctaagaggttgggatacgaggccaccctagtggggaccgactcgcccaacctggaggtcaggaactacgctcaacccctcaaagaccaaatgctctcgaaagtcatactaaaggtcatctcgaagacggtacggaagtaccagactaacactcgaatgacagggcgagagttaaagactgggcacgcatgctctgacgaccggacaacctgaataactactccagagagggtacacatgtgcgttgtcagtatgaaagctgaccaacgcccgatcacgccacgacccgtgggacagtcaggtgtacgcgccaggata

SEQ ID NO: 76024 - DNA, 1141 bp, Zea Mays
cacctgacctcgtccctcctgtcgccgtcgtcgccggcttcatgagatgtgagaggcatcgtgggccggccccgcgaggaaaggagaagataacgttgtcaacaaaacgaattccacatgtactgcctgtgcctacaaatacccgatcgaccgagaaggaaagcgcgaattaaagcagcacgggcaacacgccgagcaaaacagcgaaatcctcaaatccccaccccggctggtgacggcgccgcccccgctgctgcctgcggtcctgcttctgctaatagtaataggtattcagattcgagcagagcactcccgtgctgcaggcaagggaggacgcaccaccatggattgggatgctccggcattgacgagcttcgtcgccgacttgtccttccgccacctctgctgctacggggccggaatcgcagggaacgccttcgccttcgtgctcttcgtctccccgctccccacattcaagaggatcgtccgcaacggatccacggagcagttctcgtgcacgccgtacatctactcgctgctcaactgcctcatctgcatgtggtacggcctccccttcgtctcctacggcgtcgtcctcgtcgccaccgtcaactccatcggcgccgtgttccagctcgcctacaccgccgtgttcatcgccttcgccgacgccaagcagaggctcaaggtctctgctctcctggccgctgtcttcctggtgttcggactgattgtgtttgttagtctggctttgttggatcacaaagcccggcaggtgttcgtcggatatctcagcgtcgcgtccctcgtatgcatgttcgcgtcccccatgtcaatcgtcaatctggtcatccggacgaagagcgtggaatacatgcccttctacttgtcattatccatgtttctgatgagtgcatccttcgtcatatacggagtgctgcttggtgatggcttcatatatattccaaatggcattggaaccatattgggtatcgtacagttgctgctgtatgcctacatcagaaagggatcaagcgaggaagccaagctgcccttactaatcacacatacatgagcatgccaaaagggaaaaaaaacaaggataaataatgacggagggaaagcgaagtctactccaacc

SEQ ID NO: 76025 - DNA, 757 bp, Zea Mays
ctccaaagcaacataatttgcttgtcatctaaacaacctttgcttttcttgtaagcaaccccttgcttcacttctaagcaatcaaaccagccccttttcttctcctttaaatccccacgccacctccccatccagccatttcctctccctccctctccccatgccactctccctactcccttcctctctctctctctatctctctctctctagctccccatgcagcagcagcctcctcccatggagctggcgaccgaaccctcccatgctcctccctcaccttggcagcgctcccatggcgtctccccctcctctacgacagcaaggtgtagagtgttaagtggaagcaacatatgaagctgacatggaaaaggaagatggaacgacactccacatgaagcttgtaaaaaaggagtcaaactcaatttagtctagtgtcaaagtttataatgaagggacttgtactctgtttctatgttatattatctatttgtacgtgtgaatggagatgatcttatgtgtgggatgatggatagattaactttgatggatattagatgatatttaagttaaactttatcggatattagatgatcaagtctggtgcatgttttttagatttttagtgatgttttattgtgttttttatttttctaaatatttcctatttttctttgatttttttgtgattttctgaaatattttgtctcaagaggggttttagccccttggttgccaaacagtggcacgaaaatac

SEQ ID NO: 76026 - DNA, 325 bp, Zea Mays
tttcctctccctccctctccccatgccactttccctactcccttcctctctctctatctctctctctagctccccatgcagcagcagcctcctcccatggagctggcgaccgagccctcccatgctcctccctcaccttggcagccctcccatggcgtctccccctcctctacggcagcaaggtgtagatactccttaggataattggttgtggtgtgacttggcctccatccctgccaccgggatagacagccgagtgggttattgctaccgcaggagaggaccaggaggagtagtgtggccaggcttcaccatgttactcggt

SEQ ID NO: 76027 - DNA, 1187 bp, Zea Mays
tttcctctccctccctctccccatgccactttccctactcccttcctctctctctatctctctctctagctccccatgcagcagcagcctcctcccatggagctggcgaccgagccctcccatgctcctccctcaccttggcagccctcccatggcgtctccccctcctctacggcagcaaggtgtaggaccgagagaggatgagcgtgcaagtgatgtggtgccacccacaagatgcagttggtggacgacctgaagaatgtacctaaccagtggatgctcgccaagcgagtacccccagtaaacactatctaagtgttaaattaaaagcaagccccggttttatgcataaccgttatatatgctattttagtgcacttaatgattgtaggtttatactgtacacttaagtgtaggagttgcctgaaaccctagttgcatgaactcaggattcctttttgagatggatactagtatgctaggtcgagtagctgctttgctaactagggatctcggtagaagtcgagtgatttttctaacactcgcgcgaggtcaggaattgattgtatccattttatatcggaatgatgatggtctgttgacaacggtccatggggatgtgttgtctacaagacggaaattggaataaggattaaggtgtggtaccgtgtgtcaagtgtttgaacgtactaagcacatgccgagaaatatggtaaatcggtaaacctagtacctaagtaaacctgcccgcagacttgacccctcacgcgacttgagacgtggtctcccattccggttatggtgggtacaagtgcggtcactgcacgacggcagtcggggtcagtgaggcattgtacgccaaggcggtgagccctgttctgttgcgagggagtcgatggggacgattgatgtctgttgggacggagtgcctcgccacgtcgtgtttttaggtttaccttgcaaggttaaaactcgattcgaatcgtctgcttctcgcagctaatgagactgcttgatccatgctactacattgagtaacaagcggaaatgtgttgacttggcaaaagatgttgattgataaatgtttgataccatgtatgattagctaggtacacaattagtcttaagagagtcacactaaaacattaaaagctaaaatttgattgtagactcagctagtgcttttg

SEQ ID NO: 76028 - DNA, 531 bp, Zea Mays
ctgaaaaccaccacgcgaaatcaccgccgcggcgaaaattccagctggattctgtttctccacgaccgacggctccgggataaacactcgggcacttctgcggctctctccccttccccattgtgtttcgcacgcaagtcctgggtgccatcgttgcttggatttgggtgcaaccagctccggccgccgccattaacatgaagggcgaggtcgctggggagtacgcgcgaagcattgccgcacggcaacctggaagcgagggtctcggcgtaattgtaccgcggtggggatttcacagcgcacgccaggcggacgaactgtggacgggtgcggtcggcatctcaccggaccgagccttcatcgccaaatcgagccgagcgtcgggaattctgacgaccaagctactgaggagccgggggttcagcaggaggagattactgagctggagctcgttgaaggcaagttatgcccttgatcacttcttttacccagtcatgttcttattaatcataattatctgcataattaatt

SEQ ID NO: 76029 - DNA, 1496 bp, Zea Mays
ctgcagccggccagtaggtgatgccgcccgcggtggctaatcgggtgccagcagcttcatgttaaatcaaccagccgccgctcccttcttccatttcctggccgccaagcttccaacgtacgcagcctgctcgtcttccacctccggccatcttcctccctctaccgagcttccctccccacagcagcagaccaccggcgctccctgttcttcttccccgtgggcgcccccccttcatccaggcagcagacgacacacgcacgccaggaacgcccgagctctccatctctaatccagcgcgcagggcatttctcagggtccgagctcgagcagccctccccaaccaagcttctcccatggcgctgctacctccaggatggagctcgacaccccaaagaaattccccctgggcgctggaggcgccaagctcgcgccggtgagcacctcccatggcgtggccatctccctgctgttgccagggccgacgagtccaagtcttgtctctagccttccttgccgactatggctgcccagcagctcgtcacctccctctctagtgcatgccccggctgtcatttccccacgccgagcgtgccctctcgccatcctttgccttgctgctcgcagctgagtttcctactcgtcgcagctcgcgcaccacctgttcgacgttatgcacagtagctgcatgtctcagattatcgcagcagcgagctccttcgccggcgcctgtccacaacagcagtcccgacgcgacactgtgacccttggtgaggcaccttgctgtcctagccgctggatcgagctttgtcccagcccgcagcttgctatcgtcgagtattgggcttgccgtcgatgtcgtgcttgtcatgcgcagcaagaaccacagcgccacgacttgttccagctcgacgagagcagccacatcgtcgtcgacccgtgcccttgtcgtcatgcctcgcgcattccatgctcgacgaaagccccaagctgtggacagcatgcggacatgcgcgacacgagtcggccaggaccgagagatgatgatcgtgcaagtgatgtggtgccaaccacaagatgaagttggtggacgacctgaagaatgatggacttaaccagtggatgctcgccaagcgagtacccccccaacaaacactatctagtgttaaattaaaggcaagccccggttttatgcataaccgtttatatatatatgctattttactacacttaatgtttgtaggcttgtacagtgcacttaagtgtaggagttgcctgaaaccctagttgcatgaactcagggttccttttgagatatatactagtatgctaggtcgagtagctgctatgctaaatcaggatctcggtagaagtcgagtgatttttctagcactcgcgcgaggtcaggaattggttgtatccatttttgataataagaatgatgatggtctatggacacggatccatggggatgcgttgtctatgagacaaaattg

SEQ ID NO: 76030 - DNA, 1611 bp, Zea Mays
gacaaactcacgtaccttgttgcgtgctgtagtggccatggctgtcgcgtgatgtttagcttgaagcgccggccaacggctgcatgccgcacctgctcgccaatagctgcagccggccagtaggtgatgccgcccgcggtggctaatcgggtgccagcagcttcatgttaaatcaaccagccgccgctcccttcttccatttcctggccgccaagcttccaacgtacgcagcctgctcgtcttccacctccggccatcttcctccctctaccgagcttccctccccacagcagcagaccaccggcgctccctgttcttcttccccgtgggcgcccccccttcatccaggcagcagacgacacacgcacgccaggaacgcccgagctctccatctctaatccagcgcgcagggcatttctcagggtccgagctcgagcaggtccggcagccctccccaaccaagcttctcccatggcgctgctacctccaggatggagctcgacaccccaaagaaattccccctgggcgctggaggcgccaagctcgcgccggtgagcacctcccatggcgtggccatctccctgctgttgccagggccgacgagtccaagtcttgtctctagccttccttgccgactatggctgcccagcagctcgtcacctccctctctagtgcatgccccggctgtcatttccccacgccgagcgtgccctctcgccatcctttgccttgctgctcgcagctgagtttcctactcgtcgcagctcgcgcaccacctgttcgacgttatgcacagtagctgcatgtctcagattatcgcagcagcgagctccttcgccggcgcctgtccacaacagcagtcccgacgcgacactgtgacccttggtgaggcaccttgctgtcctagccgctggatcgagctttgtcccagcccgcagcttgctatcgtcgagtattgggcttgccgtcgatgtcgtgcttgtcatgcgcagcaagaaccacagcgccacgacttgttccagctcgacgagagcagccacatcgtcgtcgacccgtgcccttgtcgtcatgcctcgcgcattccatgctcgacgaaagccccaagctgtggacagcatgcggacatgcgcgacacgagtcggccaggaccgagagatgatgatcgtgcaagtgatgtggtgccaaccacaagatgaagttggtggacgacctgaagaatgatggacttaaccagtggatgctcgccaagcgagtacccccccaacaaacactatctagtgttaaattaaaggcaagccccggttttatgcataaccgtttatatatatatgctattttactacacttaatgtttgtaggcttgtacagtgcacttaagtgtaggagttgcctgaaaccctagttgcatgaactcagggttccttttgagatatatactagtatgctaggtcgagtagctgctatgctaaatcaggatctcggtagaagtcgagtgatttttctagcactcgcgcgaggtcaggaattggttgtatccatttttgataataagaatgatgatggtctatggacacggatccatggggatgcgttgtctatgagacaaaattg

SEQ ID NO: 76031 - DNA, 639 bp, Zea Mays
cagccggccagtaggtgatgccgcccgcggtggctaatcgggtgccagcagcttcatgttaaatcaaccagccgccgctcccttcttccatttcctggccgccaagcttccaacgtacgcagcctgctcgtcttccacctccggccatcttcctccctctaccgagcttccctccccacagcagcagaccaccggcgctccctgttcttcttccccgtgggcgcccccccttcatccaggcagcagacgacacacgcacgccaggaacgcccgagctctccatctctaatccagcgcgcagggcatttctcagggtccgagctcgagcagccctccccaaccaagcttctcccatggcgctgctacctccaggatggagctcgacaccccaaagattatcgcagcagcgagctccttcgccggcgcctgtccacaacagcagtcccgacgcgacactgtgacccttggtgaggcaccttgctgtcctagccgctggatcgagctttgtcccagcccgcagcttgctatcgtcgagtattgggcttgccgtcgatgtcgtgcttgtcatgcgcagcaagaaccacagcgccacgacttgttccagctcgacgagagcagccacatcgtcgtcgacccgtg

SEQ ID NO: 76032 - DNA, 1816 bp, Zea Mays
ctccctttaaagtgctaatatgtttgacaacatatagcgtcattgttgactcgcttaaaatcaaataaactagaaaataaagttgaccacaattgtttgtttgaaaaaagatgataggctaattctgcctttgggtctggtagtctcttgccaaatttcagtccttagattgcaataattgttttaagttgcaattttaagtggatgcatcttttatcggccagttcttacttcttagttgttttgatcgatctaacttaaagtttttcacttttttttcttcagttgaaatccaatttactatgctcaattgcccatcgtgaagaacatataatttatgaatcttgaacttcagaagttcttcatttaccgtcttatgaaacatgaggacaggtttcacaacacattttgacattatatctttatcaagtcagttgtggtgaactgtgaacaaatgtgcttgttatgcatatcaacacctcttgtatttgcattcttcccctagcagtaaggtcaatggcactcagatgggaaataaccgaagcatcttatgccatggcagttgcgctcttcttctttggccactgactcttactttctctttctggtcaaatcttcattctttcagacctctatgctgggttgaacatatgtcgttggacaatgaaactggattagacaaacctggaataagggtcaggttcgtgatcaaactttgagcagaataaagagcaatattgaactcatagtagcgacaaatggtggaaatagggtggtggtgatcccacactccatgggggtcctctattttctgcattttacgaaatgggtcgaagcacctcctcccgtggggggcagtggtggtccgaactggtgtgagaaccatattaaagctgtaatgaatattggaggatctttcttaggagttcctaaggctgttgctgggcttttctcatctgaagccaaagatgttgccgttgctaggtataaggtaattgattcatttatttaaagcaaaagggaatagcaaaagaatggaatattattggatgctcgacaagcttggcggagcttttgctcccaagccatcttctggacctcacaagtccagggagtgcctgcctctgatcctcatcatcaggaacaggctcaagtatgcaccgacgtaccgtgaggtcatttctatcctgatgcaacaccatgtacttgttgatggcaagatgtcatttccatccctaagacaaacgagaactacaggctgctttcgtcttcacccaatcagggatgaggatgccaagttcaagctctacaaggtgaggtctgttcagtttggccagaaagacatcccctatctgaacacctacgacgaccgcaccatccgctaccccgacccgctcatcaaggccaacgacaccatcaagatcgatctggagaccaacaagatcatggacttcatcatgtttgacgtcggcaacgtggtcatggtgatcggcaggaggaataccgggcgtgtaggagtgatcaagataagggagaagcataagggcaacttcgagaccatccacgtgctgcttggagctttttgctatgtctagttttctcctatttgttgtacaggaaaacatagaatgaaattcaaatttggtggccacaaaagtgtggagacttgatttcatataaagttaggcttaacattagtgcaaacagttgtattttagtttagatttagagtacactatgtatgcgttgtttgacaatgcttatttatgatatattgaatggtacttatttatattaattaattataatgttattc

SEQ ID NO: 76033 - DNA, 1936 bp, Zea Mays
atgttgtttgttaaaccctagggcattagccacctgaaattacttttttctgtcccaatatatttgttatggtactaatttttttatttgcaaaatcaataaccacggagaattgagatttttatttgcttgtaacacatataatcggttaggggcacaattaaaatcaaatcaaataaataaaaccttttgtcccttctaaaaaggaaatcgcaaaagaatgtagggagtgctttttatactgaagcatccactagctaaaattatgtctacattgatatttctattgctccctttaaagtgctaatatgtttgacaacatatagcgtcattgttgactcgcttaaaatcaaataaactagaaaataaagttgaccacaattgtttgtttgaaaaaagatgataggctaattctgcctttgggtctggtagtctcttgccaaatttcagtccttagattgcaataattgttttaagttgcaattttaagtggatgcatcttttatcggccagttcttacttcttagttgttttgatcgatctaacttaaagtttttcacttttttttcttcagttgaaatccaatttactatgctcaattgcccatcgtgaagaacatataatttatgaatcttgaacttcagaagttcttcatttaccgtcttatgaaacatgaggacagacctctatgctgggttgaacatatgtcgttggacaatgaaactggattagacaaacctggaataagggtcaggtcagtcacaggccttgttgcagcaaactattttgtccctagatattttgtttgggctgtcttaattgccaatttagctcgtattggatatgaagaaaagaccatgtacatggttgcatatgattggaggttatctttccagaacactgaggttcgtgatcaaactttgagcagaataaagagcaatattgaactcatagtagcgacaaatggtggaaatagggtggtggtgatcccacactccatgggggtcctctattttctgcattttacgaaatgggtcgaagcacctcctcccgtggggggcagtggtggtccgaactggtgtgagaaccatattaaagctgtaatgaatattggaggatctttcttaggagttcctaaggctgttgctgggcttttctcatctgaagccaaagatgttgccgttgctaggtataaggctcccaagccatcttctggacctcacaagtccagggagtgcctgcctctgatcctcatcatcaggaacaggctcaagtatgcaccgacgtaccgtgaggtcatttctatcctgatgcaacaccatgtacttgttgatggcaagatgtcatttccatccctaagacaaacgagaactacaggctgctttcgtcttcacccaatcagggatgaggatgccaagttcaagctctacaaggtgaggtctgttcagtttggccagaaagacatcccctatctgaacacctacgacgaccgcaccatccgctaccccgacccgctcatcaaggccaacgacaccatcaagatcgatctggagaccaacaagatcatggacttcatcatgtttgacgtcggcaacgtggtcatggtgatcggcaggaggaataccgggcgtgtaggagtgatcaagataagggagaagcataagggcaacttcgagaccatccacgtgctgcttggagctttttgctatgtctagttttctcctatttgttgtacaggaaaacatagaatgaaattcaaatttggtggccacaaaagtgtggagacttgatttcatataaagttaggcttaacattagtgcaaacagttgtattttagtttagatttagagtacactatgtatgcgttgtttgacaatgcttatttatgatatattgaatggtacttatttatattaattaattataatgttattc

SEQ ID NO: 76034 - DNA, 2079 bp, Zea Mays
ctcagagtatgtggtcatggccctagcagttggagcgagctgtatatgtcagaccgagtatgttgtttgttaaaccctagggcattagccacctgaaattacttttttctgtcccaatatatttgttatggtactaatttttttatttgcaaaatcaataaccacggagaattgagatttttatttgcttgtaacacatataatcggttaggggcacaattaaaatcaaatcaaataaataaaaccttttgtcccttctaaaaaggaaatcgcaaaagaatgtagggagtgctttttatactgaagcatccactagctaaaattatgtctacattgatatttctattgctccctttaaagtgctaatatgtttgacaacatatagcgtcattgttgactcgcttaaaatcaaataaactagaaaataaagttgaccacaattgtttgtttgaaaaaagatgataggctaattctgcctttgggtctggtagtctcttgccaaatttcagtccttagattgcaataattgttttaagttgcaattttaagtggatgcatcttttatcggccagttcttacttcttagttgttttgatcgatctaacttaaagtttttcacttttttttcttcagttgaaatccaatttactatgctcaattgcccatcgtgaagaacatataatttatgaatcttgaacttcagaagttcttcatttaccgtcttatgaaacatgaggacaggtttcacaacacattttgacattatatctttatcaagtcagttgtggtgaactgtgaacaaatgtgcttgttatgcatatcaacacctcttgtatttgcattcttcccctagcagtaaggtcaatggcactcagatgggaaataaccgaagcatcttatgccatggcagttgcgctcttcttctttggccactgactcttactttctctttctggtcaaatcttcattctttcagacctctatgctgggttgaacatatgtcgttggacaatgaaactggattagacaaacctggaataagggtcaggttcgtgatcaaactttgagcagaataaagagcaatattgaactcatagtagcgacaaatggtggaaatagggtggtggtgatcccacactccatgggggtcctctattttctgcattttacgaaatgggtcgaagcacctcctcccgtggggggcagtggtggtccgaactggtgtgagaaccatattaaagctgtaatgaatattggaggatctttcttaggagttcctaaggctgttgctgggcttttctcatctgaagccaaagatgttgccgttgctaggtataaggctcccaagccatcttctggacctcacaagtccagggagtgcctgcctctgatcctcatcatcaggaacaggctcaagtatgcaccgacgtaccgtgaggtcatttctatcctgatgcaacaccatgtacttgttgatggcaagatgtcatttccatccctaagacaaacgagaactacaggctgctttcgtcttcacccaatcagggatgaggatgccaagttcaagctctacaaggtgaggtctgttcagtttggccagaaagacatcccctatctgaacacctacgacgaccgcaccatccgctaccccgacccgctcatcaaggccaacgacaccatcaagatcgatctggagaccaacaagatcatggacttcatcatgtttgacgtcggcaacgtggtcatggtgatcggcaggaggaataccgggcgtgtaggagtgatcaagataagggagaagcataagggcaacttcgagaccatccacgtgctgcttggagctttttgctatgtctagttttctcctatttgttgtacaggaaaacatagaatgaaattcaaatttggtggccacaaaagtgtggagacttgatttcatataaagttaggcttaacattagtgcaaacagttgtattttagtttagatttagagtacactatgtatgcgttgtttgacaatgcttatttatgatatattgaatggtacttatttatattaattaattataatgttattc

SEQ ID NO: 76035 - DNA, 2094 bp, Zea Mays
cattgctgctggcccctggcctccggatcggggctcacaagggttgcacaggttgtgaggtggcttatgctttgaaaacactaattttttgctcagagtatgtggtcatggccctagcagttggagcgagctgtatatgtcagaccgagtatgttgtttgttaaaccctagggcattagccacctgaaattacttttttctgtcccaatatatttgttatggtactaatttttttatttgcaaaatcaataaccacggagaattgagatttttatttgcttgtaacacatataatcggttaggggcacaattaaaatcaaatcaaataaataaaaccttttgtcccttctaaaaaggaaatcgcaaaagaatgtagggagtgctttttatactgaagcatccactagctaaaattatgtctacattgatatttctattgctccctttaaagtgctaatatgtttgacaacatatagcgtcattgttgactcgcttaaaatcaaataaactagaaaataaagttgaccacaattgtttgtttgaaaaaagatgataggctaattctgcctttgggtctggtagtctcttgccaaatttcagtccttagattgcaataattgttttaagttgcaattttaagtggatgcatcttttatcggccagttcttacttcttagttgttttgatcgatctaacttaaagtttttcacttttttttcttcagttgaaatccaatttactatgctcaattgcccatcgtgaagaacatataatttatgaatcttgaacttcagaagttcttcatttaccgtcttatgaaacatgaggacagacctctatgctgggttgaacatatgtcgttggacaatgaaactggattagacaaacctggaataagggtcagctcgtattggatatgaagaaaagaccatgtacatggttgcatatgattggaggttatctttccagaacactgaggttcgtgatcaaactttgagcagaataaagagcaatattgaactcatagtagcgacaaatggtggaaatagggtggtggtgatcccacactccatgggggtcctctattttctgcattttacgaaatgggtcgaagcacctcctcccgtggggggcagtggtggtccgaactggtgtgagaaccatattaaagctgtaatgaatattggaggatctttcttaggagttcctaaggctgttgctgggcttttctcatctgaagccaaagatgttgccgttgctaggtataaggtaattgattcatttatttaaagcaaaagggaatagcaaaagaatggaatattattggatgctcgacaagcttggcggagcttttgctcccaagccatcttctggacctcacaagtccagggagtgcctgcctctgatcctcatcatcaggaacaggctcaagtatgcaccgacgtaccgtgaggtcatttctatcctgatgcaacaccatgtacttgttgatggcaagatgtcatttccatccctaagacaaacgagaactacaggctgctttcgtcttcacccaatcagggatgaggatgccaagttcaagctctacaaggtgaggtctgttcagtttggccagaaagacatcccctatctgaacacctacgacgaccgcaccatccgctaccccgacccgctcatcaaggccaacgacaccatcaagatcgatctggagaccaacaagatcatggacttcatcatgtttgacgtcggcaacgtggtcatggtgatcggcaggaggaataccgggcgtgtaggagtgatcaagataagggagaagcataagggcaacttcgagaccatccacgtgctgcttggagctttttgctatgtctagttttctcctatttgttgtacaggaaaacatagaatgaaattcaaatttggtggccacaaaagtgtggagacttgatttcatataaagttaggcttaacattagtgcaaacagttgtattttagtttagatttagagtacactatgtatgcgttgtttgacaatgcttatttatgatatattgaatggtacttatttatattaattaattataatgttattc

SEQ ID NO: 76036 - DNA, 2952 bp, Zea Mays
agtttgacacacacaattctcggccccgcacaatggcccactcgctgcacgcgcacgcagacgtatcaatagatgccgcactcgccgcatcacgagatgtcgccgccggctgccaacacagtggatcgtccgccgctgaagatgagggaggtatcacggcgcgtcacgcctacacctcggcccactcgctgtcgtcggctgcctacacagggagcccccgccgccgaagaggagggaggtcttgcggcacgggactcggcgacggcgccccctaacacatcgactgggaggtctgcctcactgctgccacactcatcgccaggtacgccgccctctccccgagccctttcctcacgcgtctactcagccgagccctcattgctgctggcccctggcctccggatcggggctcacaagggttgcacaggttgtgaggtggcttatgctttgaaaacactaattttttgctcagagtatgtggtcatggccctagcagttggagcgagctgtatatgtcagaccgagtatgttgtttgttaaaccctagggcattagccacctgaaattacttttttctgtcccaatatatttgttatggtactaatttttttatttgcaaaatcaataaccacggagaattgagatttttatttgcttgtaacacatataatcggttaggggcacaattaaaatcaaatcaaataaataaaaccttttgtcccttctaaaaaggaaatcgcaaaagaatgtagggagtgctttttatactgaagcatccactagctaaaattatgtctacattgatatttctattgctccctttaaagtgctaatatgtttgacaacatatagcgtcattgttgactcgcttaaaatcaaataaactagaaaataaagttgaccacaattgtttgtttgaaaaaagatgataggctaattctgcctttgggtctggtagtctcttgccaaatttcagtccttagattgcaataattgttttaagttgcaattttaagtggatgcatcttttatcggccagttcttacttcttagttgttttgatcgatctaacttaaagtttttcacttttttttcttcagttgaaatccaatttactatgctcaattgcccatcgtgaagaacatataatttatgaatcttgaacttcagaagttcttcatttaccgtcttatgaaacatgaggacaggtttcacaacacattttgacattatatctttatcaagtcagttgtggtgaactgtgaacaaatgtgcttgttatgcatatcaacacctcttgtatttgcattcttcccctagcagtaaggtcaatggcactcagatgggaaataaccgaagcatcttatgccatggcagttgcgctcttcttctttggccactgactcttactttctctttctggtcaaatcttcattctttcagacctctatgctgggttgaacatatgtcgttggacaatgaaactggattagacaaacctggaataagggtcaggtcagtcacaggccttgttgcagcaaactattttgtccctagatattttgtttgggctgtcttaattgccaatttagctcgtattggatatgaagaaaagaccatgtacatggttgcatatgattggaggttatctttccagaacactgaggtactcttcttggatggccttatacaagtaaattttagtcagaagtcaccacggattagctatttggttatgaacttttgatgcttagtgatagttcccagttcccaccgtgtagatggttctggtataaaatgtattgccatatttgtaacacagattactatatacaggttcgtgatcaaactttgagcagaataaagagcaatattgaactcatagtagcgacaaatggtggaaatagggtggtggtgatcccacactccatgggggtcctctattttctgcattttacgaaatgggtcgaagcacctcctcccgtggggggcagtggtggtccgaactggtgtgagaaccatattaaagctgtaatgaatattggaggatctttcttaggagttcctaaggctgttgctgggcttttctcatctgaagccaaagatgttgccgttgctaggtataaggtaattgattcatttatttaaagcaaaagggaatagcaaaagaatggaatattattggatgctcgacaagcttggcggagcttttgctcccaagccatcttctggacctcacaagtccagggagtgcctgcctctgatcctcatcatcaggaacaggctcaagtatgcaccgacgtaccgtgaggtcatttctatcctgatgcaacaccatgtacttgttgatggcaagatgtcatttccatccctaagacaaacgagaactacaggctgctttcgtcttcacccaatcagggatgaggatgccaagttcaagctctacaaggtgaggtctgttcagtttggccagaaagacatcccctatctgaacacctacgacgaccgcaccatccgctaccccgacccgctcatcaaggccaacgacaccatcaagatcgatctggagaccaacaagatcatggacttcatcatgtttgacgtcggcaacgtggtcatggtgatcggcaggaggaataccgggcgtgtaggagtgatcaagataagggagaagcataagggcaacttcgagaccatccacgtgctgcttggagctttttgctatgtctagttttctcctatttgttgtacaggaaaacatagaatgaaattcaaatttggtggccacaaaagtgtggagacttgatttcatataaagttaggcttaacattagtgcaaacagttgtattttagtttagatttagagtacactatgtatgcgttgtttgacaatgcttatttatgatatattgaatggtacttatttatattaattaattataatgttattc

SEQ ID NO: 76037 - DNA, 2581 bp, Zea Mays
agtttgacacacacaattctcggccccgcacaatggcccactcgctgcacgcgcacgcagacgtatcaatagatgccgcactcgccgcatcacgagatgtcgccgccggctgccaacacagtggatcgtccgccgctgaagatgagggaggtatcacggcgcgtcacgcctacacctcggcccactcgctgtcgtcggctgcctacacagggagcccccgccgccgaagaggagggaggtcttgcggcacgggactcggcgacggcgccccctaacacatcgactgggaggtctgcctcactgctgccacactcatcgccaggtacgccgccctctccccgagccctttcctcacgcgtctactcagccgagccctcattgctgctggcccctggcctccggatcggggctcacaagggttgcacaggttgtgaggtggcttatgctttgaaaacactaattttttgctcagagtatgtggtcatggccctagcagttggagcgagctgtatatgtcagaccgagtatgttgtttgttaaaccctagggcattagccacctgaaattacttttttctgtcccaatatatttgttatggtactaatttttttatttgcaaaatcaataaccacggagaattgagatttttatttgcttgtaacacatataatcggttaggggcacaattaaaatcaaatcaaataaataaaaccttttgtcccttctaaaaaggaaatcgcaaaagaatgtagggagtgctttttatactgaagcatccactagctaaaattatgtctacattgatatttctattgctccctttaaagtgctaatatgtttgacaacatatagcgtcattgttgactcgcttaaaatcaaataaactagaaaataaagttgaccacaattgtttgtttgaaaaaagatgataggctaattctgcctttgggtctggtagtctcttgccaaatttcagtccttagattgcaataattgttttaagttgcaattttaagtggatgcatcttttatcggccagttcttacttcttagttgttttgatcgatctaacttaaagtttttcacttttttttcttcagttgaaatccaatttactatgctcaattgcccatcgtgaagaacatataatttatgaatcttgaacttcagaagttcttcatttaccgtcttatgaaacatgaggacaggtttcacaacacattttgacattatatctttatcaagtcagttgtggtgaactgtgaacaaatgtgcttgttatgcatatcaacacctcttgtatttgcattcttcccctagcagtaagacctctatgctgggttgaacatatgtcgttggacaatgaaactggattagacaaacctggaataagggtcaggtcagtcacaggccttgttgcagcaaactattttgtccctagatattttgtttgggctgtcttaattgccaatttagctcgtattggatatgaagaaaagaccatgtacatggttgcatatgattggaggttatctttccagaacactgaggttcgtgatcaaactttgagcagaataaagagcaatattgaactcatagtagcgacaaatggtggaaatagggtggtggtgatcccacactccatgggggtcctctattttctgcattttacgaaatgggtcgaagcacctcctcccgtggggggcagtggtggtccgaactggtgtgagaaccatattaaagctgtaatgaatattggaggatctttcttaggagttcctaaggctgttgctgggcttttctcatctgaagccaaagatgttgccgttgctaggtataaggctcccaagccatcttctggacctcacaagtccagggagtgcctgcctctgatcctcatcatcaggaacaggctcaagtatgcaccgacgtaccgtgaggtcatttctatcctgatgcaacaccatgtacttgttgatggcaagatgtcatttccatccctaagacaaacgagaactacaggctgctttcgtcttcacccaatcagggatgaggatgccaagttcaagctctacaaggtgaggtctgttcagtttggccagaaagacatcccctatctgaacacctacgacgaccgcaccatccgctaccccgacccgctcatcaaggccaacgacaccatcaagatcgatctggagaccaacaagatcatggacttcatcatgtttgacgtcggcaacgtggtcatggtgatcggcaggaggaataccgggcgtgtaggagtgatcaagataagggagaagcataagggcaacttcgagaccatccacgtgctgcttggagctttttgctatgtctagttttctcctatttgttgtacaggaaaacatagaatgaaattcaaatttggtggccacaaaagtgtggagacttgatttcatataaagttaggcttaacattagtgcaaacagttgtattttagtttagatttagagtacactatgtatgcgttgtttgacaatgcttatttatgatatattgaatggtacttatttatattaattaattataatgttattc

SEQ ID NO: 76038 - DNA, 2004 bp, Zea Mays
agtttgacacacacaattctcggccccgcacaatggcccactcgctgcacgcgcacgcagacgtatcaatagatgccgcactcgccgcatcacgagatgtcgccgccggctgccaacacagtggatcgtccgccgctgaagatgagggaggtatcacggcgcgtcacgcctacacctcggcccactcgctgtcgtcggctgcctacacagggagcccccgccgccgaagaggagggaggtcttgcggcacgggactcggcgacggcgccccctaacacatcgactgggaggtctgcctcactgctgccacactcatcgccagttgaaatccaatttactatgctcaattgcccatcgtgaagaacatataatttatgaatcttgaacttcagaagttcttcatttaccgtcttatgaaacatgaggacaggtttcacaacacattttgacattatatctttatcaagtcagttgtggtgaactgtgaacaaatgtgcttgttatgcatatcaacacctcttgtatttgcattcttcccctagcagtaaggtcaatggcactcagatgggaaataaccgaagcatcttatgccatggcagttgcgctcttcttctttggccactgactcttactttctctttctggtcaaatcttcattctttcagacctctatgctgggttgaacatatgtcgttggacaatgaaactggattagacaaacctggaataagggtcaggtcagtcacaggccttgttgcagcaaactattttgtccctagatattttgtttgggctgtcttaattgccaatttagctcgtattggatatgaagaaaagaccatgtacatggttgcatatgattggaggttatctttccagaacactgaggttcgtgatcaaactttgagcagaataaagagcaatattgaactcatagtagcgacaaatggtggaaatagggtggtggtgatcccacactccatgggggtcctctattttctgcattttacgaaatgggtcgaagcacctcctcccgtggggggcagtggtggtccgaactggtgtgagaaccatattaaagctgtaatgaatattggaggatctttcttaggagttcctaaggctgttgctgggcttttctcatctgaagccaaagatgttgccgttgctaggtataaggtaattgattcatttatttaaagcaaaagggaatagcaaaagaatggaatattattggatgctcgacaagcttggcggagcttttgctcccaagccatcttctggacctcacaagtccagggagtgcctgcctctgatcctcatcatcaggaacaggctcaagtatgcaccgacgtaccgtgaggtcatttctatcctgatgcaacaccatgtacttgttgatggcaagatgtcatttccatccctaagacaaacgagaactacaggctgctttcgtcttcacccaatcagggatgaggatgccaagttcaagctctacaaggtgaggtctgttcagtttggccagaaagacatcccctatctgaacacctacgacgaccgcaccatccgctaccccgacccgctcatcaaggccaacgacaccatcaagatcgatctggagaccaacaagatcatggacttcatcatgtttgacgtcggcaacgtggtcatggtgatcggcaggaggaataccgggcgtgtaggagtgatcaagataagggagaagcataagggcaacttcgagaccatccacgtgctgcttggagctttttgctatgtctagttttctcctatttgttgtacaggaaaacatagaatgaaattcaaatttggtggccacaaaagtgtggagacttgatttcatataaagttaggcttaacattagtgcaaacagttgtattttagtttagatttagagtacactatgtatgcgttgtttgacaatgcttatttatgatatattgaatggtacttatttatattaattaattataatgttattc

SEQ ID NO: 76039 - DNA, 2427 bp, Zea Mays
agtttgacacacacaattctcggccccgcacaatggcccactcgctgcacgcgcacgcagacgtatcaatagatgccgcactcgccgcatcacgagatgtcgccgccggctgccaacacagtggatcgtccgccgctgaagatgagggaggtatcacggcgcgtcacgcctacacctcggcccactcgctgtcgtcggctgcctacacagggagcccccgccgccgaagaggagggaggtcttgcggcacgggactcggcgacggcgccccctaacacatcgactgggaggtctgcctcactgctgccacactcatcgccagacctctatgctgggttgaacatatgtcgttggacaatgaaactggattagacaaacctggaataagggtcaggtcagtcacaggccttgttgcagcaaactattttgtccctagatattttgtttgggctgtcttaattgccaatttagctcgtattggatatgaagaaaagaccatgtacatggttgcatatgattggaggttatctttccagaacactgaggtactcttcttggatggccttatacaagtaaattttagtcagaagtcaccacggattagctatttggttatgaacttttgatgcttagtgatagttcccagttcccaccgtgtagatggttctggtataaaatgtattgccatatttgtaacacagattactatatacaggttcgtgatcaaactttgagcagaataaagagcaatattgaactcatagtagcgacaaatggtggaaatagggtggtggtgatcccacactccatgggggtcctctattttctgcattttacgaaatgggtcgaagcacctcctcccgtggggggcagtggtggtccgaactggtgtgagaaccatattaaagctgtaatgaatattggaggatctttcttaggagttcctaaggctgttgctgggcttttctcatctgaagccaaagatgttgccgttgctaggtaatttaaatagagtttgcaagttttagtaggtattttcatgctatcagggttgaagtttactaggtgatgcctgctgagataatattgtttcacaatgctgttctttataagattgcatccgaaatgtttcgttctttatctatactagttagcatatatcagactatagtttacatattacttttgttaatgtcatttatctatttgcttactcagtaccattctaaattgtgcttatcgttcctggacaatatctgtatcttattgactatagctctggcattctgattgctgctgttaccttacataaaattagcatataaccatggtgattgagtttgcaagatcaaatgtttgtttgaattgactataattactaaaatctgctctgtgatgaagtttgtggggatcaagtggtacacaatctagcttataggggtcattgcataaaatcattctatattagctgatatttttttctcgttaatattctatgattttttttgaaatgcatgttgttttccatttttccatgtatgcaactgttctggttcaggtataaggtaattgattcatttatttaaagcaaaagggaatagcaaaagaatggaatattattggatgctcgacaagcttggcggagcttttgctcccaagccatcttctggacctcacaagtccagggagtgcctgcctctgatcctcatcatcaggaacaggctcaagtatgcaccgacgtaccgtgaggtcatttctatcctgatgcaacaccatgtacttgttgatggcaaggtcaggactgacaagacctaccctgctgggttcatggatgtcatttccatccctaagacaaacgagaactacaggctgctttcgtcttcacccaatcagggatgaggatgccaagttcaagctctacaaggtgaggtctgttcagtttggccagaaagacatcccctatctgaacacctacgacgaccgcaccatccgctaccccgacccgctcatcaaggccaacgacaccatcaagatcgatctggagaccaacaagatcatggacttcatcatgtttgacgtcggcaacgtggtcatggtgatcggcaggaggaataccgggcgtgtaggagtgatcaagataagggagaagcataagggcaacttcgagaccatccacgtgctgcttggagctttttgctatgtctagttttctcctatttgttgtacaggaaaacatagaatgaaattcaaatttggtggccacaaaagtgtggagacttgatttcatataaagttaggcttaacattagtgcaaacagttgtattttagtttagatttagagtacactatgtatgcgttgtttgacaatgcttatttatgatatattgaatggtacttatttatattaattaattataatgttattc

SEQ ID NO: 76040 - DNA, 1919 bp, Zea Mays
agtttgacacacacaattctcggccccgcacaatggcccactcgctgcacgcgcacgcagacgtatcaatagatgccgcactcgccgcatcacgagatgtcgccgccggctgccaacacagtggatcgtccgccgctgaagatgagggaggtatcacggcgcgtcacgcctacacctcggcccactcgctgtcgtcggctgcctacacagggagcccccgccgccgaagaggagggaggtcttgcggcacgggactcggcgacggcgccccctaacacatcgactgggaggtctgcctcactgctgccacactcatcgccagttgaaatccaatttactatgctcaattgcccatcgtgaagaacatataatttatgaatcttgaacttcagaagttcttcatttaccgtcttatgaaacatgaggacaggtttcacaacacattttgacattatatctttatcaagtcagttgtggtgaactgtgaacaaatgtgcttgttatgcatatcaacacctcttgtatttgcattcttcccctagcagtaaggtcaatggcactcagatgggaaataaccgaagcatcttatgccatggcagttgcgctcttcttctttggccactgactcttactttctctttctggtcaaatcttcattctttcagacctctatgctgggttgaacatatgtcgttggacaatgaaactggattagacaaacctggaataagggtcaggtcagtcacaggccttgttgcagcaaactattttgtccctagatattttgtttgggctgtcttaattgccaatttagctcgtattggatatgaagaaaagaccatgtacatggttgcatatgattggaggttatctttccagaacactgaggttcgtgatcaaactttgagcagaataaagagcaatattgaactcatagtagcgacaaatggtggaaatagggtggtggtgatcccacactccatgggggtcctctattttctgcattttacgaaatgggtcgaagcacctcctcccgtggggggcagtggtggtccgaactggtgtgagaaccatattaaagctgtaatgaatattggaggatctttcttaggagttcctaaggctgttgctgggcttttctcatctgaagccaaagatgttgccgttgctaggtataaggctcccaagccatcttctggacctcacaagtccagggagtgcctgcctctgatcctcatcatcaggaacaggctcaagtatgcaccgacgtaccgtgaggtcatttctatcctgatgcaacaccatgtacttgttgatggcaagatgtcatttccatccctaagacaaacgagaactacaggctgctttcgtcttcacccaatcagggatgaggatgccaagttcaagctctacaaggtgaggtctgttcagtttggccagaaagacatcccctatctgaacacctacgacgaccgcaccatccgctaccccgacccgctcatcaaggccaacgacaccatcaagatcgatctggagaccaacaagatcatggacttcatcatgtttgacgtcggcaacgtggtcatggtgatcggcaggaggaataccgggcgtgtaggagtgatcaagataagggagaagcataagggcaacttcgagaccatccacgtgctgcttggagctttttgctatgtctagttttctcctatttgttgtacaggaaaacatagaatgaaattcaaatttggtggccacaaaagtgtggagacttgatttcatataaagttaggcttaacattagtgcaaacagttgtattttagtttagatttagagtacactatgtatgcgttgtttgacaatgcttatttatgatatattgaatggtacttatttatattaattaattataatgttattc

SEQ ID NO: 76041 - DNA, 1510 bp, Zea Mays
agtttgacacacacaattctcggccccgcacaatggcccactcgctgcacgcgcacgcagacgtatcaatagatgccgcactcgccgcatcacgagatgtcgccgccggctgccaacacagtggatcgtccgccgctgaagatgagggaggtatcacggcgcgtcacgcctacacctcggcccactcgctgtcgtcggctgcctacacagggagcccccgccgccgaagaggagggaggtcttgcggcacgggactcggcgacggcgccccctaacacatcgactgggaggtctgcctcactgctgccacactcatcgccagacctctatgctgggttgaacatatgtcgttggacaatgaaactggattagacaaacctggaataagggtcaggttcgtgatcaaactttgagcagaataaagagcaatattgaactcatagtagcgacaaatggtggaaatagggtggtggtgatcccacactccatgggggtcctctattttctgcattttacgaaatgggtcgaagcacctcctcccgtggggggcagtggtggtccgaactggtgtgagaaccatattaaagctgtaatgaatattggaggatctttcttaggagttcctaaggctgttgctgggcttttctcatctgaagccaaagatgttgccgttgctaggtataaggtaattgattcatttatttaaagcaaaagggaatagcaaaagaatggaatattattggatgctcgacaagcttggcggagcttttgctcccaagccatcttctggacctcacaagtccagggagtgcctgcctctgatcctcatcatcaggaacaggctcaagtatgcaccgacgtaccgtgaggtcatttctatcctgatgcaacaccatgtacttgttgatggcaagatgtcatttccatccctaagacaaacgagaactacaggctgctttcgtcttcacccaatcagggatgaggatgccaagttcaagctctacaaggtgaggtctgttcagtttggccagaaagacatcccctatctgaacacctacgacgaccgcaccatccgctaccccgacccgctcatcaaggccaacgacaccatcaagatcgatctggagaccaacaagatcatggacttcatcatgtttgacgtcggcaacgtggtcatggtgatcggcaggaggaataccgggcgtgtaggagtgatcaagataagggagaagcataagggcaacttcgagaccatccacgtgctgcttggagctttttgctatgtctagttttctcctatttgttgtacaggaaaacatagaatgaaattcaaatttggtggccacaaaagtgtggagacttgatttcatataaagttaggcttaacattagtgcaaacagttgtattttagtttagatttagagtacactatgtatgcgttgtttgacaatgcttatttatgatatattgaatggtacttatttatattaattaattataatgttattc

SEQ ID NO: 76042 - DNA, 2498 bp, Zea Mays
agtttgacacacacaattctcggccccgcacaatggcccactcgctgcacgcgcacgcagacgtatcaatagatgccgcactcgccgcatcacgagatgtcgccgccggctgccaacacagtggatcgtccgccgctgaagatgagggaggtatcacggcgcgtcacgcctacacctcggcccactcgctgtcgtcggctgcctacacagggagcccccgccgccgaagaggagggaggtcttgcggcacgggactcggcgacggcgccccctaacacatcgactgggaggtctgcctcactgctgccacactcatcgccagttgaaatccaatttactatgctcaattgcccatcgtgaagaacatataatttatgaatcttgaacttcagaagttcttcatttaccgtcttatgaaacatgaggacagacctctatgctgggttgaacatatgtcgttggacaatgaaactggattagacaaacctggaataagggtcaggtcagtcacaggccttgttgcagcaaactattttgtccctagatattttgtttgggctgtcttaattgccaatttagctcgtattggatatgaagaaaagaccatgtacatggttgcatatgattggaggttatctttccagaacactgaggtactcttcttggatggccttatacaagtaaattttagtcagaagtcaccacggattagctatttggttatgaacttttgatgcttagtgatagttcccagttcccaccgtgtagatggttctggtataaaatgtattgccatatttgtaacacagattactatatacaggttcgtgatcaaactttgagcagaataaagagcaatattgaactcatagtagcgacaaatggtggaaatagggtggtggtgatcccacactccatgggggtcctctattttctgcattttacgaaatgggtcgaagcacctcctcccgtggggggcagtggtggtccgaactggtgtgagaaccatattaaagctgtaatgaatattggaggatctttcttaggagttcctaaggctgttgctgggcttttctcatctgaagccaaagatgttgccgttgctaggtaatttaaatagagtttgcaagttttagtaggtattttcatgctatcagggttgaagtttactaggtgatgcctgctgagataatattgtttcacaatgctgttctttataagattgcatccgaaatgtttcgttctttatctatactagttagcatatatcagactatagtttacatattacttttgttaatgtcatttatctatttgcttactcagtaccattctaaattgtgcttatcgttcctggacaatatctgtatcttattgactatagctctggcattctgattgctgctgttaccttacataaaattagcatataaccatggtgattgagtttgcaagatcaaatgtttgtttgaattgactataattactaaaatctgctctgtgatgaagtttgtggggatcaagtggtacacaatctagcttataggggtcattgcataaaatcattctatattagctgatatttttttctcgttaatattctatgattttttttgaaatgcatgttgttttccatttttccatgtatgcaactgttctggttcaggtataaggtaattgattcatttatttaaagcaaaagggaatagcaaaagaatggaatattattggatgctcgacaagcttggcggagcttttgctcccaagccatcttctggacctcacaagtccagggagtgcctgcctctgatcctcatcatcaggaacaggctcaagtatgcaccgacgtaccgtgaggtcatttctatcctgatgcaacaccatgtacttgttgatggcaagatgtcatttccatccctaagacaaacgagaactacaggctgctttcgtcttcacccaatcagggatgaggatgccaagttcaagctctacaaggtgaggtctgttcagtttggccagaaagacatcccctatctgaacacctacgacgaccgcaccatccgctaccccgacccgctcatcaaggccaacgacaccatcaagatcgatctggagaccaacaagatcatggacttcatcatgtttgacgtcggcaacgtggtcatggtgatcggcaggaggaataccgggcgtgtaggagtgatcaagataagggagaagcataagggcaacttcgagaccatccacgtgctgcttggagctttttgctatgtctagttttctcctatttgttgtacaggaaaacatagaatgaaattcaaatttggtggccacaaaagtgtggagacttgatttcatataaagttaggcttaacattagtgcaaacagttgtattttagtttagatttagagtacactatgtatgcgttgtttgacaatgcttatttatgatatattgaatggtacttatttatattaattaattataatgttattc

SEQ ID NO: 76043 - DNA, 2071 bp, Zea Mays
agtttgacacacacaattctcggccccgcacaatggcccactcgctgcacgcgcacgcagacgtatcaatagatgccgcactcgccgcatcacgagatgtcgccgccggctgccaacacagtggatcgtccgccgctgaagatgagggaggtatcacggcgcgtcacgcctacacctcggcccactcgctgtcgtcggctgcctacacagggagcccccgccgccgaagaggagggaggtcttgcggcacgggactcggcgacggcgccccctaacacatcgactgggaggtctgcctcactgctgccacactcatcgccagctcgtattggatatgaagaaaagaccatgtacatggttgcatatgattggaggttatctttccagaacactgaggttcgtgatcaaactttgagcagaataaagagcaatattgaactcatagtagcgacaaatggtggaaatagggtggtggtgatcccacactccatgggggtcctctattttctgcattttacgaaatgggtcgaagcacctcctcccgtggggggcagtggtggtccgaactggtgtgagaaccatattaaagctgtaatgaatattggaggatctttcttaggagttcctaaggctgttgctgggcttttctcatctgaagccaaagatgttgccgttgctaggtaatttaaatagagtttgcaagttttagtaggtattttcatgctatcagggttgaagtttactaggtgatgcctgctgagataatattgtttcacaatgctgttctttataagattgcatccgaaatgtttcgttctttatctatactagttagcatatatcagactatagtttacatattacttttgttaatgtcatttatctatttgcttactcagtaccattctaaattgtgcttatcgttcctggacaatatctgtatcttattgactatagctctggcattctgattgctgctgttaccttacataaaattagcatataaccatggtgattgagtttgcaagatcaaatgtttgtttgaattgactataattactaaaatctgctctgtgatgaagtttgtggggatcaagtggtacacaatctagcttataggggtcattgcataaaatcattctatattagctgatatttttttctcgttaatattctatgattttttttgaaatgcatgttgttttccatttttccatgtatgcaactgttctggttcaggtataaggtaattgattcatttatttaaagcaaaagggaatagcaaaagaatggaatattattggatgctcgacaagcttggcggagcttttgctcccaagccatcttctggacctcacaagtccagggagtgcctgcctctgatcctcatcatcaggaacaggctcaagtatgcaccgacgtaccgtgaggtcatttctatcctgatgcaacaccatgtacttgttgatggcaagatgtcatttccatccctaagacaaacgagaactacaggctgctttcgtcttcacccaatcagggatgaggatgccaagttcaagctctacaaggtgaggtctgttcagtttggccagaaagacatcccctatctgaacacctacgacgaccgcaccatccgctaccccgacccgctcatcaaggccaacgacaccatcaagatcgatctggagaccaacaagatcatggacttcatcatgtttgacgtcggcaacgtggtcatggtgatcggcaggaggaataccgggcgtgtaggagtgatcaagataagggagaagcataagggcaacttcgagaccatccacgtgctgcttggagctttttgctatgtctagttttctcctatttgttgtacaggaaaacatagaatgaaattcaaatttggtggccacaaaagtgtggagacttgatttcatataaagttaggcttaacattagtgcaaacagttgtattttagtttagatttagagtacactatgtatgcgttgtttgacaatgcttatttatgatatattgaatggtacttatttatattaattaattataatgttattc

SEQ ID NO: 76044 - DNA, 1664 bp, Zea Mays
gtcagtttgacacacacaattctcggccccgcacaatggcccactcgctgcacgcgcacgcagacgtatcaatagatgccgcactcgccgcatcacgagatgtcgccgccggctgccaacacagtggatcgtccgccgctgaagatgagggaggtatcacggcgcgtcacgcctacacctcggcccactcgctgtcgtcggctgcctacacagggagcccccgccgccgaagaggagggaggtcttgcggcacgggactcggcgacggcgccccctaacacatcgactgggaggtctgcctcactgctgccacactcatcgccagacctctatgctgggttgaacatatgtcgttggacaatgaaactggattagacaaacctggaataagggtcaggtcagtcacaggccttgttgcagcaaactattttgtccctagatattttgtttgggctgtcttaattgccaatttagctcgtattggatatgaagaaaagaccatgtacatggttgcatatgattggaggttatctttccagaacactgaggttcgtgatcaaactttgagcagaataaagagcaatattgaactcatagtagcgacaaatggtggaaatagggtggtggtgatcccacactccatgggggtcctctattttctgcattttacgaaatgggtcgaagcacctcctcccgtggggggcagtggtggtccgaactggtgtgagaaccatattaaagctgtaatgaatattggaggatctttcttaggagttcctaaggctgttgctgggcttttctcatctgaagccaaagatgttgccgttgctaggtataaggtaattgattcatttatttaaagcaaaagggaatagcaaaagaatggaatattattggatgctcgacaagcttggcggagcttttgctcccaagccatcttctggacctcacaagtccagggagtgcctgcctctgatcctcatcatcaggaacaggctcaagtatgcaccgacgtaccgtgaggtcatttctatcctgatgcaacaccatgtacttgttgatggcaagatgtcatttccatccctaagacaaacgagaactacaggctgctttcgtcttcacccaatcagggatgaggatgccaagttcaagctctacaaggtgaggtctgttcagtttggccagaaagacatcccctatctgaacacctacgacgaccgcaccatccgctaccccgacccgctcatcaaggccaacgacaccatcaagatcgatctggagaccaacaagatcatggacttcatcatgtttgacgtcggcaacgtggtcatggtgatcggcaggaggaataccgggcgtgtaggagtgatcaagataagggagaagcataagggcaacttcgagaccatccacgtgctgcttggagctttttgctatgtctagttttctcctatttgttgtacaggaaaacatagaatgaaattcaaatttggtggccacaaaagtgtggagacttgatttcatataaagttaggcttaacattagtgcaaacagttgtattttagtttagatttagagtacactatgtatgcgttgtttgacaatgcttatttatgatatattgaatggtacttatttatattaattaattataatgttattc

SEQ ID NO: 76045 - DNA, 1579 bp, Zea Mays
gtcagtttgacacacacaattctcggccccgcacaatggcccactcgctgcacgcgcacgcagacgtatcaatagatgccgcactcgccgcatcacgagatgtcgccgccggctgccaacacagtggatcgtccgccgctgaagatgagggaggtatcacggcgcgtcacgcctacacctcggcccactcgctgtcgtcggctgcctacacagggagcccccgccgccgaagaggagggaggtcttgcggcacgggactcggcgacggcgccccctaacacatcgactgggaggtctgcctcactgctgccacactcatcgccagacctctatgctgggttgaacatatgtcgttggacaatgaaactggattagacaaacctggaataagggtcaggtcagtcacaggccttgttgcagcaaactattttgtccctagatattttgtttgggctgtcttaattgccaatttagctcgtattggatatgaagaaaagaccatgtacatggttgcatatgattggaggttatctttccagaacactgaggttcgtgatcaaactttgagcagaataaagagcaatattgaactcatagtagcgacaaatggtggaaatagggtggtggtgatcccacactccatgggggtcctctattttctgcattttacgaaatgggtcgaagcacctcctcccgtggggggcagtggtggtccgaactggtgtgagaaccatattaaagctgtaatgaatattggaggatctttcttaggagttcctaaggctgttgctgggcttttctcatctgaagccaaagatgttgccgttgctaggtataaggctcccaagccatcttctggacctcacaagtccagggagtgcctgcctctgatcctcatcatcaggaacaggctcaagtatgcaccgacgtaccgtgaggtcatttctatcctgatgcaacaccatgtacttgttgatggcaagatgtcatttccatccctaagacaaacgagaactacaggctgctttcgtcttcacccaatcagggatgaggatgccaagttcaagctctacaaggtgaggtctgttcagtttggccagaaagacatcccctatctgaacacctacgacgaccgcaccatccgctaccccgacccgctcatcaaggccaacgacaccatcaagatcgatctggagaccaacaagatcatggacttcatcatgtttgacgtcggcaacgtggtcatggtgatcggcaggaggaataccgggcgtgtaggagtgatcaagataagggagaagcataagggcaacttcgagaccatccacgtgctgcttggagctttttgctatgtctagttttctcctatttgttgtacaggaaaacatagaatgaaattcaaatttggtggccacaaaagtgtggagacttgatttcatataaagttaggcttaacattagtgcaaacagttgtattttagtttagatttagagtacactatgtatgcgttgtttgacaatgcttatttatgatatattgaatggtacttatttatattaattaattataatgttattc

SEQ ID NO: 76046 - DNA, 1981 bp, Zea Mays
aaaaaatattcttttgatgaaatctagtgacattgctggagacagcctcacgccccaccgcagcccctcgattccgaacccaaaacctaacgccttattcgcgggcaagtggacccactggtcaggcacggagcataaaacccaccggtgcttgtctattctacctttcgcgtgctccgccgtcacgacccaaattattgagagcccaggaagtgagagatgagcctgcagattccggtgagatcaggcgccctgcgccgccttctccttctaggtggcgccgagggtctactgcgcacctactccaccggcgaccggcgccggcgggtgatccgcgaggcaaggcaagaggaggaggacgaagcgttcctccgcaccctcaacttcggcgctgaccccgagaacaaccctcttcccccgccgccgaggcatggcagaggattatccgacgcctcagccgggaagcagcagcagcagcccgagcgaagcgcgcagaaggtcgtcggggagacgctgctggagaagcttaagctgggcgatggtccctccgccgccgctgctataggaggcggcgatgagccacggcagtctgaggacgagcctgcgcccgcgcagccggtggacgtggacgagatcttccgaaagatgaaggaaaccgggttgatcccaaacgccgtggccatgctcgacgggctgtgcaagaacggcctggtgcaggacgccatgaagctgtttggtctaatgcgagagaagggagccatcccggaggtggttatctacacagctgtcgtcgaggcattctgcaaggtggctaagctagacgacgccgtgagaattttcaggaagatgcaagggaatggagtcatccccaatgcattcagctattggctcctgatacaggggctgtacaaggggggcaggctggatgatgctgtcgggttctgtgtggagatgtttgaggctgggcttgcaccgaatgcggagacgtttgtaggcttgcttgatgcagtgtgcaagacaaaaggtgtggatgaaggcgagaatcttgtgaggagcttccaggacagaaacttcgctattgatgagaaatcaatcagggatcacctggacaagaaaggcccattctcaccagtagtgtgggaggtgatctttggcaagagaaaatcagaccgaccattctaatctctaccagaaagtagagggagtagtttacatctgcctcattcataaaagtgttgcaaacgttttgttcgccaaagatttggtggcagcaacttgtggcgtggcgaggttgggaagccatccaaacatacccttacacaaataaatactcaatttggatgttcatgctaatttatgatatcagtaaaaactaagtatttttctcaagcattagttatcaacctcacaacttaaagcaacatcaacctaagttgctgccctttgactttaaagttgtgtgcacaaatacctactctttgcctataaaaagatgaacactcttttctaaatatcataagaaaatatattttcttgagcgaaatggggactaggttgacctcgatgttgccatccatccaggtacagggttttcttgttccttagctaaaggtgtaggtatttttctcgagctaaagattcttgtaaaaaaatggtgcccaatgatgatcttgaaaacatgacgacctagccttggagttggaatatgaggacctaaggtttagtttcagaaacaaaattgcaactaacaacctcaaaacgaagtcttctagtatgtccttcacaaattttatgttcagttcttgagatgatctgaatttctgattgtttcctaatttataacataaaactgattagtggtgatttgatcctatcaacggtgatgttcatatggtgtcaaagccgtagagctccaaagatttgcaaaaactgataggaatacgatccctaccacggattggccttaggttgtatgagtgag

SEQ ID NO: 76047 - DNA, 1755 bp, Zea Mays
ccctaccaactacacagccgccgcctcagcgaagctgtggaagaccagcagcaagggccccttcagccttcgccgcctctgtcccttctcttccttccggtcgaccagatggcctgccgcgcgaaggtggtaggacaggtggagcgggtcgacggagagtcgctatcctacgcggagttcgtccgccgcttcatggcgcccaaccgccccgtcgttctcacgggtctcacctcatcctggcgggcccacaaggactggactctctccgggtctggtgaccttcgccgccctaatctcggcttcttcacccaaaacttcccttcctctctcgttcaggtcgacgactgctcctcgagtgatttcacggaccagaagcggcttgagatgtccatgcaggagttcatagaccactgggttgggggtcctcattgtggttcaagtgatggagatcgtgatggttctctgttgtatctgaaagactggcacttcgttaaggagtaccctgattatattgcatataccacaccaaccttctttgttgatgattggctcaacatgtatcttgacagtcaccctatacatagagattctgacattgccaatcataaaaatgaaataaactgttctgattatcggtttgtttacatgggggcaaaaggaacctggactcctctgcatgctgatgtttttaggtcatacagctggtcagcaaatgtttgtgggcaaaaacagtggttgtttctaccaccatcacaaagtcattgtatatttgataggaacatgagatcttcggtctataacttacatgatgtttctgaaaagcagtttcctgagtttaaatggctagaatgcattcaagagcagaatgaaatcatatttgttcccagtggatggtatcaccaagtccataacctggaggacactatatctataaatcataattggtgtaatgcctacaacctacactgggtgtggaacttgctttatgaagactacaaagttgcaaaagaatatattgaagacattcgagatatatgtgatgattttgaaggactttgtcaacggaatttggcagctaatacaggcatgaacttctatgatttctttgttttcatagtgaggtttgccttagccaatgtagttgagctttaccatcttcagcagccagaggttgcaaccttgtcaacagaaaccgcacaccatttggtctataatctgatgtcaattcgtaatgttgcatcaaaaatgacaactacagaggcttttactactgagaatcgtctttgtagtgtctcggaagataaccgcagtgctttctctaatatcaaacaaatattagaagaggagagtttcagaaggctatcgatgacactgtcaaaggcatatgaccacatagacagagggcaaagaagtctcaaatcttcgatctcgtatcggaagggctgttcgtcagtgatctgcttgaaatctgattgcaatgttgttgactacattacttctttggttgatgaaatttgtggacccgaggatttgacgagactaattgatagtgctctctctcatggataattttagtgtatctagcattgtaaacctatgcttgcatgaatccttattcatcagatatgatgggatacttaggtagtgtttggttttagagtatggttttatggagccatttcgttttcaatttgttattgtttgaattggttttacataggatgaaatgacttaaaaaagaaaaaaatatgttca

SEQ ID NO: 76048 - DNA, 1682 bp, Zea Mays
ccctaccaactacacagccgccgcctcagcgaagctgtggaagaccagcagcaagggccccttcagccttcgccgcctctgtcccttctcttccttccggtcgaccagatggcctgccgcgcgaaggtggtaggacaggtggagcgggtcgacggagagtcgctatcctacgcggagttcgtccgccgcttcatggcgcccaaccgccccgtcgttctcacgggtctcacctcatcctggcgggcccacaaggactggactctctccgggtctggtgaccttcgccgccctaatctcggcttcttcacccaaaacttcccttcctctctcgttcaggtcgacgactgctcctcgagtgatttcacggaccagaagcggcttgagatgtccatgcaggagttcatagaccactgggttgggggtcctcattgtggttcaagtgatggagatcgtgatggttctctgttgtatctgaaagactggcacttcgttaaggagtaccctgattatattgcatataccacaccaaccttctttgttgatgattggctcaacatgtatcttgacagtcaccctatacatagagattctgacattgccaatcataaaaatgaaataaactgttctgattatcggtttgtttacatgggggcaaaaggaacctggactcctctgcatgctgatgtttttaggtcatacagctggtcagcaaatgtttgtgggcaaaaacagtggttgtttctaccaccatcacaaagtcattgtatatttgataggaacatgagatcttcggtctataacttacatgatgtttctgaaaagcagtttcctgagtttaacagaatggctagaatgcattcaagagcagaatgaaatcatatttgttcccagtggatggtatcaccaagtccataacctggaggacactatatctataaatcataattggtgtaatgcctacaacctacactgggtgtggaacttgctttatgaagactacaaagttgcaaaagaatatattgaagacattcgagatatatgtgatgattttgaaggactttgtcaacggaatttggcagctaatacagcagccagaggttgcaaccttgtcaacagaaaccgcacaccatttggtctataatctgatgtcaattcgtaatgttgcatcaaaaatgacaactacagaggcttttactactgagaatcgtctttgtagtgtctcggaagataaccgcagtgctttctctaatatcaaacaaatattagaagaggagagtttcagaaggctatcgatgacactgtcaaaggcatatgaccacatagacagagggcaaagaagtctcaaatcttcgatctcgtatcggaagggctgttcgtcagtgatctgcttgaaatctgattgcaatgttgttgactacattacttctttggttgatgaaatttgtggacccgaggatttgacgagactaattgatagtgctctctctcatggataattttagtgtatctagcattgtaaacctatgcttgcatgaatccttattcatcagatatgatgggatacttaggtagtgtttggttttagagtatggttttatggagccatttcgttttcaatttgttattgtttgaattggttttacataggatgaaatgacttaaaaaagaaaaaaatatgttca

SEQ ID NO: 76049 - DNA, 1725 bp, Zea Mays
aaacgattctcgataatcggcaattatcgctttcactttcgtccctaccaactacacagccgccgcctcagcgaagctgtggaagaccagcagcaagggccccttcagccttcgccgcctctgtcccttctcttccttccggtcgaccagatggcctgccgcgcgaaggtggtaggacaggtggagcgggtcgacggagagtcgctatcctacgcggagttcgtccgccgcttcatggcgcccaaccgccccgtcgttctcacgggtctcacctcatcctggcgggcccacaaggactggactctctccgggtctggtgaccttcgccgccctaatctcggcttcttcacccaaaacttcccttcctctctcgttcaggtcgacgactgctcctcgagtgatttcacggaccagaagcggcttgagatgtccatgcaggagttcatagaccactgggttgggggtcctcattgtggttcaagtgatggagatcgtgatggttctctgttgtatctgaaagactggcacttcgttaaggagtaccctgattatattgcatataccacaccaaccttctttgttgatgattggctcaacatgtatcttgacagtcaccctatacatagagattctgacattgccaatcataaaaatgaaataaactgttctgattatcggtttgtttacatgggggcaaaaggaacctggactcctctgcatgctgatgtttttaggtcatacagctggtcagcaaatgtttgtgggcaaaaacagtggttgtttctaccaccatcacaaagtcattgtatatttgataggaacatgagatcttcggtctataacttacatgatgtttctgaaaagcagtttcctgagtttagtaagaatggctagaatgcattcaagagcagaatgaaatcatatttgttcccagtggatggtatcaccaagtccataacctggaggacactatatctataaatcataattggtgtaatgcctacaacctacactgggtgtggaacttgctttatgaagactacaaagttgcaaaagaatatattgaagacattcgagatatatgtgatgattttgaaggactttgtcaacggaatttggcagctaatacagcagccagaggttgcaaccttgtcaacagaaaccgcacaccatttggtctataatctgatgtcaattcgtaatgttgcatcaaaaatgacaactacagaggcttttactactgagaatcgtctttgtagtgtctcggaagataaccgcagtgctttctctaatatcaaacaaatattagaagaggagagtttcagaaggctatcgatgacactgtcaaaggcatatgaccacatagacagagggcaaagaagtctcaaatcttcgatctcgtatcggaagggctgttcgtcagtgatctgcttgaaatctgattgcaatgttgttgactacattacttctttggttgatgaaatttgtggacccgaggatttgacgagactaattgatagtgctctctctcatggataattttagtgtatctagcattgtaaacctatgcttgcatgaatccttattcatcagatatgatgggatacttaggtagtgtttggttttagagtatggttttatggagccatttcgttttcaatttgttattgtttgaattggttttacataggatgaaatgacttaaaaaagaaaaaaatatgttca

SEQ ID NO: 76050 - DNA, 1678 bp, Zea Mays
ctacccggcgttgtcatcaacggggaggcctcacccacccctgtctcctgcgatgcgaaactacgcatcggcggcggcgtgggagggcccgatggccgcagagctcaagacaacgggggtcgaggtgattgccgacggcgtgcatgtgaaggggtgggtcatctagtcccacaaaggccccatcctcaacgccgcctctctcagacggtgcgagcccccggcgtagccgtcggtgggcaagccttatcggcccatgtggtcctgcctcctcactgagttctgccatagaggtggacactggtggtggtgtcctcctccttctagctgtggttgcctccgctcgtcgccgtcgggggcggtagcttcagatccccagcacagatattgtctacttgtgtgggcaaccggtgccctttggaggagataaaatccattactgccatcactttgtactaataatcctttcacttcttaattccactagttgtactaatgtactcgaataacattagaatagaatttagtgatgtgctatttttttcttcacgcgcgtgccacgcgtgcattttacctagtatactataaaagatccagttttcttctgtgcatcaccaccggtagatttatttttctattaagattgtacgacagtggtaggctgtcactaatttcacccggaaagcacttaattaattggaacaccttctcgttctacattatgtgtttttttttgaatttcttcctccaaaaatctaaccaagttttaaattttttttgaaccgattctattgcagcgagaatgacattgaagacatccaaaaggttgcgatgtcaccttatgctttatactgtatgctaggctgtaacagatcaacttacctagttcatatatgtagttcctaaaaggctttatttcctgttgtaggagatatatgttttgtcacaatgctagtgtattattactgactattatggttcttatctccagcggactaaactgtggatagtaatggaatacatatggctggtggttctgttgttgaacttgcatgtgttgtatatccttactcagttgatcctcataatgtttaatacaatgcagaaattttgaagtttagtgttccattccgccatcatttgtcaagcaccattataaattgataatttatggtattccatcatttctgtgtgcagcttcaagctggccctcccttggatgaaatgtctattccatacattccgaggaacttgttacacgcaattgagtatctacattctgagggactagtttggaatcgagggccacaagttaaagcatcaggtcaatggtcccgccaacaattaaaccagatggcggattggagcttgatgttgggatgatgcatgcacctttcaagtttcagaatgttgtcctcaaatgcagcttgtggttgttgaacctattctacttgtttttggatttaagttatagtttattaaacatgtttgatgtttaatacttgtgtcggatgatttatgcttcaattatgtggatgctagaaaaaaattgtatatactcatgttgtttcatgaaattgtatgcacgatttggtttgaattcagttgaatgcagtttttttggtttgaattcagatgaatgcagtttttataattaatgatgaactaaaaacataacaaa

SEQ ID NO: 76051 - DNA, 2295 bp, Zea Mays
ctacccggcgttgtcatcaacggggaggcctcacccacccctgtctcctgcgatgcgaaactacgcatcggcggcggcgtgggagggcccgatggccgcagagctcaagacaacgggggtcgaggtgattgccgacggcgtgcatgtgaaggggtgggtcatctagtcccacaaaggccccatcctcaacgccgcctctctcagacggtgcgagcccccggcgtagccgtcggtgggcaagccttatcggcccatgtggtcctgcctcctcactgagttctgccatagaggtggacactggtggtggtgtcctcctccttctagctgtggttgcctccgctcgtcgccgtcgggggcggtagcttcagatccccagcacaggtacaacgtggcaccccttttcttctccattagactctgaagcccctttgttcgtcctctgttctggcggccccatctccctatgatccggcgtcccctccccatatatttttatcattcgctggtcattgacggtgggttgagaacttgagattaatttaaattcaagtatagagcacatgatgctgaagttgactccatgccatgcccacacatcacgatgtaatgtggctagggatggtttggatttgcctctgtatgcaattgcacatgtgtgtgtattgcatgttcttacaagactaccaacaagactttaagttttcataaaattcatatatcactgcatatgtcattcccaaaaaaactttaaaaatagaaaatatattagctaatacatgtttgatttaaactggagttctgaaatggaaatgttacccttttatcttgtgctaaatgttaccatgcaacagaaaaaatgtatatagcaagggttttagattttttgctttattttattcatgcacacatttttttttcaattttcaagtggtgggaggtgatccaatccaatcaagcttgaccatgaattgtttatgcacattctatattgttctcagatattgtctacttgtgtgggcaaccggtgccctttggaggagataaaatccattactgccatcactttgtactaataatcctttcacttcttaattccactagttgtactaatgtactcgaataacattagaatagaatttagtgatgtgctatttttttcttcacgcgcgtgccacgcgtgcattttacctagtatactataaaagatccagttttcttctgtgcatcaccaccggtagatttatttttctattaagattgtacgacagtggtaggctgtcactaatttcacccggaaagcacttaattaattggaacaccttctcgttctacattatgtgtttttttttgaatttcttcctccaaaaatctaaccaagttttaaattttttttgaaccgattctattgcagcgagaatgacattgaagacatccaaaaggttgcgatgtcaccttatgctttatactgtatgctaggctgtaacagatcaacttacctagttcatatatgtagttcctaaaaggctttatttcctgttgtaggagatatatgttttgtcacaatgctagtgtattattactgactattatggttcttatctccagcggactaaactgtggatagtaatggaatacatatggctggtggttctgttgttgaacttgcatgtgttgtatatccttactcagttgatcctcataatgtttaatacaatgcagaaattttgaagtttagtgttccattccgccatcatttgtcaagcaccattataaattgataatttatggtattccatcatttctgtgtgcagcttcaagctggccctcccttggatgaaatgtctattccatacattccgaggaacttgttacacgcaattgagtatctacattctgagggactagtttggaatcgagggccacaagttaaagcatcaggtcaatggtcccgccaacaattaaaccagatggcggattggagcttgatgttgggatgatgcatgcacctttcaagtttcagaatgttgtcctcaaatgcagcttgtggttgttgaacctattctacttgtttttggatttaagttatagtttattaaacatgtttgatgtttaatacttgtgtcggatgatttatgcttcaattatgtggatgctagaaaaaaattgtatatactcatgttgtttcatgaaattgtatgcacgatttggtttgaattcagttgaatgcagtttttttggtttgaattcagatgaatgcagtttttataattaatgatgaactaaaaacataacaaa

SEQ ID NO: 76052 - DNA, 1265 bp, Zea Mays
ctacccggcgttgtcatcaacggggaggcctcacccacccctgtctcctgcgatgcgaaactacgcatcggcggcggcgtgggagggcccgatggccgcagagctcaagacaacgggggtcgaggtgattgccgacggcgtgcatgtgaaggggtgggtcatctagtcccacaaaggccccatcctcaacgccgcctctctcagacggtgcgagcccccggcgtagccgtcggtgggcaagccttatcggcccatgtggtcctgcctcctcactgagttctgccatagaggtggacactggtggtggtgtcctcctccttctagctgtggttgcctccgctcgtcgccgtcgggggcggtagcttcagatccccagcacagcgagaatgacattgaagacatccaaaaggttgcgatgtcaccttatgctttatactgtatgctaggctgtaacagatcaacttacctagttcatatatgtagttcctaaaaggctttatttcctgttgtaggagatatatgttttgtcacaatgctagtgtattattactgactattatggttcttatctccagcggactaaactgtggatagtaatggaatacatatggctggtggttctgttgttgaacttgcatgtgttgtatatccttactcagttgatcctcataatgtttaatacaatgcagaaattttgaagtttagtgttccattccgccatcatttgtcaagcaccattataaattgataatttatggtattccatcatttctgtgtgcagcttcaagctggccctcccttggatgaaatgtctattccatacattccgaggaacttgttacacgcaattgagtatctacattctgagggactagtttggaatcgagggccacaagttaaagcatcaggtcaatggtcccgccaacaattaaaccagatggcggattggagcttgatgttgggatgatgcatgcacctttcaagtttcagaatgttgtcctcaaatgcagcttgtggttgttgaacctattctacttgtttttggatttaagttatagtttattaaacatgtttgatgtttaatacttgtgtcggatgatttatgcttcaattatgtggatgctagaaaaaaattgtatatactcatgttgtttcatgaaattgtatgcacgatttggtttgaattcagttgaatgcagtttttttggtttgaattcagatgaatgcagtttttataattaatgatgaactaaaaacataacaaa

SEQ ID NO: 76053 - DNA, 989 bp, Zea Mays
ctacccggcgttgtcatcaacggggaggcctcacccacccctgtctcctgcgatgcgaaactacgcatcggcggcggcgtgggagggcccgatggccgcagagctcaagacaacgggggtcgaggtgattgccgacggcgtgcatgtgaaggggtgggtcatctagtcccacaaaggccccatcctcaacgccgcctctctcagacggtgcgagcccccggcgtagccgtcggtgggcaagccttatcggcccatgtggtcctgcctcctcactgagttctgccatagaggtggacactggtggtggtgtcctcctccttctagctgtggttgcctccgctcgtcgccgtcgggggcggtagcttcagatccccagcacagcggactaaactgtggatagtaatggaatacatatggctggtggttctgttgttgaacttgcatgtgttgtatatccttactcagttgatcctcataatgtttaatacaatgcagaaattttgaacttcaagctggccctcccttggatgaaatgtctattccatacattccgaggaacttgttacacgcaattgagtatctacattctgagggactagtttggaatcgagggccacaagttaaagcatcaggtcaatggtcccgccaacaattaaaccagatggcggattggagcttgatgttgggatgatgcatgcacctttcaagtttcagaatgttgtcctcaaatgcagcttgtggttgttgaacctattctacttgtttttggatttaagttatagtttattaaacatgtttgatgtttaatacttgtgtcggatgatttatgcttcaattatgtggatgctagaaaaaaattgtatatactcatgttgtttcatgaaattgtatgcacgatttggtttgaattcagttgaatgcagtttttttggtttgaattcagatgaatgcagtttttataattaatgatgaactaaaaacataacaaa

SEQ ID NO: 76054 - DNA, 908 bp, Zea Mays
aacgcagaaacgattctacccggcgttgtcatcaacggggaggcctcacccacccctgtctcctgcgatgcgaaactacgcatcggcggcggcgtgggagggcccgatggccgcagagctcaagacaacgggggtcgaggtgattgccgacggcgtgcatgtgaaggggtgggtcatctagtcccacaaaggccccatcctcaacgccgcctctctcagacggtgcgagcccccggcgtagccgtcggtgggcaagccttatcggcccatgtggtcctgcctcctcactgagttctgccatagaggtggacactggtggtggtgtcctcctccttctagctgtggttgcctccgctcgtcgccgtcgggggcggtagcttcagatccccagcacagcgagaatgacattgaagacatccaaaagcttcaagctggccctcccttggatgaaatgtctattccatacattccgaggaacttgttacacgcaattgagtatctacattctgagggactagtttggaatcgagggccacaagttaaagcatcaggtcaatggtcccgccaacaattaaaccagatggcggattggagcttgatgttgggatgatgcatgcacctttcaagtttcagaatgttgtcctcaaatgcagcttgtggttgttgaacctattctacttgtttttggatttaagttatagtttattaaacatgtttgatgtttaatacttgtgtcggatgatttatgcttcaattatgtggatgctagaaaaaaattgtatatactcatgttgtttcatgaaattgtatgcacgatttggtttgaattcagttgaatgcagtttttttggtttgaattcagatgaatgcagtttttataattaatgatgaactaaaaacataacaaa

SEQ ID NO: 76055 - DNA, 389 bp, Zea Mays
aatcaaaattaaccctgaagttctgcaagatgagttgtaacaaaaaatcaacattgaaccaaggttctacagcagcagcaggaagaggaggtggaagcaaggatcagattgcttgaagtgtgaaaaaatgattactcgcatgcatgctagctgttggcgtaacatccagccgatggagagattttagtttgctagatgtatatttatacttctgcatgtaatagaaatgaaagatcacttcaaaaatttaggaaattcgtgtatgctactatttttatatgttcatcactggaatcgtgttctaaacaaatatatgttggaattcaaagtcaaagattgatctctttcttttactaatcaaatttcatatattctgagttacatattat

SEQ ID NO: 76056 - DNA, 1202 bp, Zea Mays
gatgaatctggctctgcagtcgaactgaagaagttcagcgcatttagtgtagtctgaattttcagactcgaaatagtatctggcagagactgaattttagttttagtgatcagtttagagtcttggtgcagcaaattcttgtggttttggactgagaattttgtagcaaaatgggaaaataaagaataaatcaaatgaatttacagctgttgcaagccacataagaggaataaaaaatgaatttgcaatccgcatgactctgagctctacataaaactgaaacataaaaaatcaaatagataacacttgcctttattcagatcatccgtgtttaagtgccctccttgagaagcaacatattgatcaaactctagcttgtttggatctactatctcaacctctagtgtatctgactgctttgatttgggatccatggtttcttattgcattaccttcttagtctctgaacatgccccaacaagtggccctgattgattaactgcagcaactcctgaaacatcatgaactgcactagcatttagaggttctaggtgctaggagcccccaggttgtgttccatgctcaaccacaatcaaaattaaccctgaagttctgcaaggagtaattttgacaccttctgtaaagaaggtaacaggggccaaaaggaaaaatgacatcactataatgatagagaagagattaaggttgtccaaggattcctgtggaaagagagcatatgaagtgcattaggaattagagatggaagtggacaattgcacatggacatgacagaagttcctgttgcaatagcaaatattatctcaaccgacccaaccactaagatgagttgtaacaaaaaatcaacattgaaccaaggttctacagcagcagcaggaagaggaggtggaagcaaggatcagattgcttgaagtgtgaaaaaatgattactcgcatgcatgctagctgttggcgtaacatccagccgatggagagattttagtttgctagatgtatatttatacttctgcatgtaatagaaatgaaagatcacttcaaaaatttaggaaattcgtgtatgctactatttttatatgttcatcactggaatcgtgttctaaacaaatatatgttggaattcaaagtcaaagattgatctctttcttttactaatcaaatttcatatattctgagttacatattat

SEQ ID NO: 76057 - DNA, 1002 bp, Zea Mays
aacgcccagaggcacacgcgcgatacgaaccagcaggcaaccaactgccgagggagaatcggagccctagctagcggaataggagacggcggcgcgctaccctcctccatctctggcgcctcctccatctccggtgcggcgacatcgtcccgctcggcccctcctccatctccggcgcggcggcgccagcagccggcgtgcaggagtaattttgacaccttctgtaaagaaggtaacaggggccaaaaggaaaaatgacatcactataatgatagagaagagattaaggttgtccaaggattcctgtggaaagagagcatatgaagtgcattaggaattagagatggaagtggacaattgcacatggacatgacagaagttcctgttgcaatagcaaatattatctcaaccgacccaaccactaaggttggagatgttcctcttggaagggagtttacataggtttttgtgactcgtgtgctaaaaagagaaagtactctaccacggccatacttaggtgtagagagtatgggggatgctctttttatgcccgttgcatggccaacgaacaagataataatacaaccttgtattttatttatgtaattaatagaacaagcttctaatgttctgtatttttagatgagttgtaacaaaaaatcaacattgaaccaaggttctacagcagcagcaggaagaggaggtggaagcaaggatcagattgcttgaagtgtgaaaaaatgattactcgcatgcatgctagctgttggcgtaacatccagccgatggagagattttagtttgctagatgtatatttatacttctgcatgtaatagaaatgaaagatcacttcaaaaatttaggaaattcgtgtatgctactatttttatatgttcatcactggaatcgtgttctaaacaaatatatgttggaattcaaagtcaaagattgatctctttcttttactaatcaaatttcatatattctgagttacatattat

SEQ ID NO: 76058 - DNA, 566 bp, Zea Mays
cgcaacgcccagaggcacacgcgcgatacgaaccagcaggcaaccaactgccgagggagaatcggagccctagctagcggaataggagacggcggcgcgctaccctcctccatctctggcgcctcctccatctccggtgcggcgacatcgtcccgctcggcccctcctccatctccggcgcggcggcgccagcagccggcgtgcagatgagttgtaacaaaaaatcaacattgaaccaaggttctacagcagcagcaggaagaggaggtggaagcaaggatcagattgcttgaagtgtgaaaaaatgattactcgcatgcatgctagctgttggcgtaacatccagccgatggagagattttagtttgctagatgtatatttatacttctgcatgtaatagaaatgaaagatcacttcaaaaatttaggaaattcgtgtatgctactatttttatatgttcatcactggaatcgtgttctaaacaaatatatgttggaattcaaagtcaaagattgatctctttcttttactaatcaaatttcatatattctgagttacatattat

SEQ ID NO: 76059 - DNA, 519 bp, Zea Mays
aacagcgcaacgcccagaggcacacgcgcgatacgaaccagcaggcaaccaactgccgagggagaatcggagccctagctagcggaataggagacggcggcgcgctaccctcctccatctctggcgcctcctccatctccggtgcggcgacatcgtcccgctcggcccctcctccatctccggcgcggcggcgccagcagccggcgtgcaggaagaggaggtggaagcaaggatcagattgcttgaagtgtgaaaaaatgattactcgcatgcatgctagctgttggcgtaacatccagccgatggagagattttagtttgctagatgtatatttatacttctgcatgtaatagaaatgaaagatcacttcaaaaatttaggaaattcgtgtatgctactatttttatatgttcatcactggaatcgtgttctaaacaaatatatgttggaattcaaagtcaaagattgatctctttcttttactaatcaaatttcatatattctgagttacatattat

SEQ ID NO: 76060 - DNA, 2070 bp, Zea Mays
ccgaccttaacgcgtggaaaaagggcaacaaatatggaagagaaaacccaaccagcgaaaagaaatcgggtgtcgagtcgtcgcacggtgttgctcgccatatccccttcccccctcctccctgcgtcccccggctccggcgatccgccgcacctgaacccttctccacgtcgcctcgccggtaatcgactacgttctctttctttaggcagtcggttcgtaccccaaactcggattcctctttctgatcctcctatacacgccgcgtcgattgtatcgtcttaggttgggttgaggtgagccgatcagatccgatcggggccggtccttgcgccactgctgcgtgagctcatctcggtcgcccgcctgctcggctcgatcggccggggacggcggcggccagatctgcaatggagggcaacaaggacgacgcggccaagtgcctgcgcatcggcaagggcgcgctcgacgccggcgaccgcgcgcgcgccatcaagttcctgtccaaggcaaagcgcctggacccctcgctgcccatcgacgacctcctcacctcccttctcaaccccgaaggcgactcccaggcttcttcgcccccgccgtcttcaccaccgcaaactgccgcagcaggggcatcggaggcagttgaggctgatgggctgagagagaggaagcacaagggcaagaatagggaggaggaggcgactcctgctgccagggagtacaccgcagagcaactcgaggtcgtgcgccaggtcaaaaagcacaccagggactactaccagatcctcggcctggaaaaggactgcagtgtcgaggacgtgcgcaaggcctaccggaagctctcgctcaaggtgcaccccgataagaacaaggcccctggcgcagaggacgccttcaaggccgtctccaaggccttccagtgcctgacagatgctgagagccgcaaacgttacgaccttgttggctcggatgagccagtaacacaccacaggagggcctccactgcccgtgcatacaatgagttctacgaggatgactttgacccagatgaggtattcagaaacttcttctttggtggtatggcgcctgccaccaccaggcagtttggacagtttagaactttccatttcaggactggtgggatgcatgcccacggcacacaaagcactggtggctcacctgtcaggatgcttattcagctgttgcctgtcctactgctgctgttgctcaactttctgccatcctcggagcctgtctactcgctctctcgttcctacccttatgagcataagttccaaaccccccgtggagttccatactatgtcaagatgtctaattttgaggagcagtatccacaccaaagcactgagcgagcaacagtggagcggcatgttgagagggattattattccataatcacacagaattgtagggtcgagctgcagcgtcgccaatggggcttgtcataccagacaccacattgtgatatgcttcaaaagtttgaggcaacagcacagtaataattcatccaatggtggaagggagaagagaatgctggcctcatgaaaaggtgctgccttagctgccagcctcatgaaaaggtgcaataagtaacttggatgattatacaccactgcccagatgatctcttagtagtgttaaggggcgcatcacgacatcacgtagctacttcaaaaggaggaggatatgtaagcttcataggagatgatcgcatgcaaaccagtgtatgtatatggagtatatcgatctaatgctttagggctcgttcgttggcggttccagctaaattttgtattaacattgattagctagaacagtttctagcctcagcccaagctaaatttgaagtgaagactttaggtaaaacagaaatgcaactataacacaactgggttaattttacattcgctcggatgctgagatgtccaattttcaatagtgatgtaagtaaagagcaccgataatctttttccataaaaattctctagaaatgtgtcatcttagtgatcttttcgcttttgttggtgtggagcatatgacgcttgg

SEQ ID NO: 76061 - DNA, 1584 bp, Zea Mays
gaaaacccaaccagcgaaaagaaatcgggtgtcgagtcgtcgcacggtgttgctcgccatatccccttcccccctcctccctgcgtcccccggctccggcgatccgccgcacctgaacccttctccacgtcgcctcgccggtaatcgactacgttctctttctttaggcagtcggttcgtaccccaaactcggattcctctttctgatcctcctatacacgccgcgtcgattgtatcgtcttaggttgggttgaggtgagccgatcagatccgatcggggccggtccttgcgccactgctgcgtgagctcatctcggtcgcccgcctgctcggctcgatcggccggggacggcggcggccagatctgcaatggagggcaacaaggacgacgcggccaagtgcctgcgcatcggcaagggcgcgctcgacgccggcgaccgcgcgcgcgccatcaagttcctgtccaaggcaaagcgcctggacccctcgctgcccatcgacgacctcctcacctcccttctcaaccccgaaggcgactcccaggcttcttcgcccccgccgtcttcaccaccgcaaactgccgcagcaggggcatcggaggcagttgaggctgatgggctgagagagaggaagcacaagggcaagaatagggaggaggaggcgactcctgctgccagggagtacaccgcagagcaactcgaggtcgtgcgccaggtcaaaaagcacaccagggactactaccagatcctcggcctggaaaaggactgcagtgtcgaggacgtgcgcaaggcctaccggaagctctcgctcaaggtgcaccccgataagaacaaggcccctggcgcagaggacgccttcaaggccgtctccaaggccttccagtgcctgacagatgctgagagccgcaaacgttacgaccttgttggctcggatgagccagtaacacaccacaggagggcctccactgcccgtgcatacaatgagttctacgaggatgactttgacccagatgaggtattcagaaacttcttctttggtggtatggcgcctgccaccaccaggcagtttggacagtttagaactttccatttcaggactggtgggatgcatgcccacggcacacaaagcactggtggctcacctgtcaggatgcttattcagctgttgcctgtcctactgctgctgttgctcaactttctgccatcctcggagcctgtctactcgctctctcgttcctacccttatgagcataagttccaaaccccccgtggagttccatactatgtcaagatgtctaattttgaggagcagtatccacaccaaagcactgagcgagcaacagtggagcggcatgttgagagggattattattccataatcacacagaattgtagggtcgagctgcagcgtcgccaatggggcttgtcataccagacaccacattgtgatatgcttcaaaagtttgaggcaacagcacagtaataattcatccaatggtggaagctgccttggagcctatgctgaagctggaactggggaaggcgggagcaggatctggttgttgccatgattcttgtggaatgc

SEQ ID NO: 76062 - DNA, 1754 bp, Zea Mays
gaaaacccaaccagcgaaaagaaatcgggtgtcgagtcgtcgcacggtgttgctcgccatatccccttcccccctcctccctgcgtcccccggctccggcgatccgccgcacctgaacccttctccacgtcgcctcgccggttgggttgaggtgagccgatcagatccgatcggggccggtccttgcgccactgctgcgtgagctcatctcggtcgcccgcctgctcggctcgatcggccggggacggcggcggccagatctgcaatggagggcaacaaggacgacgcggccaagtgcctgcgcatcggcaagggcgcgctcgacgccggcgaccgcgcgcgcgccatcaagttcctgtccaaggcaaagcgcctggacccctcgctgcccatcgacgacctcctcacctcccttctcaaccccgaaggcgactcccaggcttcttcgcccccgccgtcttcaccaccgcaaactgccgcagcaggggcatcggaggcagttgaggctgatgggctgagagagaggaagcacaagggcaagaatagggaggaggaggcgactcctgctgccagggagtacaccgcagagcaactcgaggtcgtgcgccaggtcaaaaagcacaccagggactactaccagatcctcggcctggaaaaggactgcagtgtcgaggacgtgcgcaaggcctaccggaagctctcgctcaaggtgcaccccgataagaacaaggcccctggcgcagaggacgccttcaaggccgtctccaaggccttccagtgcctgacagatgctgagagccgcaaacgttacgaccttgttggctcggatgagccagtaacacaccacaggagggcctccactgcccgtgcatacaatgagttctacgaggatgactttgacccagatgaggtattcagaaacttcttctttggtggtatggcgcctgccaccaccaggcagtttggacagtttagaactttccatttcaggactggtgggatgcatgcccacggcacacaaagcactggtggctcacctgtcaggatgcttattcagctgttgcctgtcctactgctgctgttgctcaactttctgccatcctcggagcctgtctactcgctctctcgttcctacccttatgagcataagttccaaaccccccgtggagttccatactatgtcaagatgtctaattttgaggagcagtatccacaccaaagcactgagcgagcaacagtggagcggcatgttgagagggattattattccataatcacacagaattgtagggtcgagctgcagcgtcgccaatggggcttgtcataccagacaccacattgtgatatgcttcaaaagtttgaggcaacagcacagtaataattcatccaatggtggaaggtgaatagctgtatagcattgcaggcaagtcatgctttgcatttggctttgtttgtgaattagaggaagttcaagctgtcatttttatatctgtttcctctagagtgtttcgtaactagagaatgatgaaaaattagtttgatcaatgatgcacatgcatggcgttttcctttcctgtctttctcatgctgctgagggttgtctcaatagtttcttttaatgtaactagttagtggagatgcatggctgcatgcctgacacactagataagtgatatatcctttcctagaggcatgttgaagtgcagcacacaaatgaaatattggaattaccagttggctacataaataacaca

SEQ ID NO: 76063 - DNA, 1298 bp, Zea Mays
aggaagcgcttgcggacctagggtttacgaggacgcccccagtataaaataggcgaggggctgcatcccacagccgccactgcaaccccggaacagagcgaggcgacgccgaggcacctcatctccgtgctcagtacttcactagtcgatgcgtttgaatgattcgactggtgatttgcggggcgtactccgcatgattcgtcgttggttaggtagctgtggcattctcgcattttatttttcacttgttctgtgttaaaggttaattgcagccttgttcttagctcagttacatctggtagcgaaatggtgcgtagggctatccatcttagaaaaaccgacccaaatgttcagctttagataagagttgttgcatattgcttcctcatgcaacaagcaaccgtaactattccccagatggtcaggtgatcagttttctccctgtttaatgttgcaagggaatctcacatttgccagttgatattttcgactatttaggcgaagggaaatggcgaccgttccaggggatctgatctggcagattgtgaggaagaacaactccttcctggtgaagcagtttggcaacggcaatgccaaggtgcagttcaccaaggagcccaacaacctctacaatgtacactcctacaagtactctggcttagcaaacaagaaaactgtaacgatccagccagctgctggaaaggactcggctgtggtcctctctactaccaagaccaagaagcagaacacacccgcgaagctcagccacaagtctgtaatgcgcaaggagttccgcaagatggccaaggctgtgaaaaaccaggttggcgacaactattacaggcctgatctgaccaagtcggcccttggtaggctgagctctgtgtaccgcagcctccaggttgccaagtctggtgtcaagaagaagaacaggcagcctacgcactaagcctgtgttctgtcgttggtgcccatagtctcagcttatatttatccaatgtctccaacagttttgagacttgttagaactagagcaaatcgtgttaagatgttgccgtttgtcattctatagcaagaattccatgacaaagattgcttggcacttgattgctgctttgtttgcaagctggctggccgggattacccctgatttttgttgggttctggaacatgtatgtctagcttcttattgggtgcttttggttgcctgtggactgtggttgcctgcatattgtctggcgaggctcacgttctggttggttgcctatcagcctcttcagcgttctggttggttgcct

SEQ ID NO: 76064 - DNA, 967 bp, Zea Mays
aggaagcgcttgcggacctagggtttacgaggacgcccccagtataaaataggcgaggggctgcatcccacagccgccactgcaaccccggaacagagcgaggcgacgccgaggcacctcatctccgggaatctcacatttgccagttgatattttcgactatttaggcgaagggaaatggcgaccgttccaggggatctgatctggcagattgtgaggaagaacaactccttcctggtgaagcagtttggcaacggcaatgccaaggtgcagttcaccaaggagcccaacaacctctacaatgtacactcctacaagtactctggcttagcaaacaagaaaactgtaacgatccagccagctgctggaaaggactcggctgtggtcctctctactaccaagaccaagaagcagaacacacccgcgaagctcagccacaagtctgtaatgcgcaaggagttccgcaagatggccaaggctgtgaaaaaccaggttggcgacaactattacaggcctgatctgaccaagtcggcccttggtaggctgagctctgtgtaccgcagcctccaggttgccaagtctggtgtcaagaagaagaacaggcagcctacgcactaagcctgtgttctgtcgttggtgcccatagtctcagcttatatttatccaatgtctccaacagttttgagacttgttagaactagagcaaatcgtgttaagatgttgccgtttgtcattctatagcaagaattccatgacaaagattgcttggcacttgattgctgctttgtttgcaagctggctggccgggattacccctgatttttgttgggttctggaacatgtatgtctagcttcttattgggtgcttttggttgcctgtggactgtggttgcctgcatattgtctggcgaggctcacgttctggttggttgcctatcagcctcttcagcgttctggttggttgcct

SEQ ID NO: 76065 - DNA, 825 bp, Zea Mays
aggaagcgcttgcggacctagggtttacgaggacgcccccagtataaaataggcgaggggctgcatcccacagccgccactgcaaccccggaacagagcgaggcgacgccgaggcacctcatctccggcgaagggaaatggcgaccgttccaggggatctgatctggcagattgtgaggaagaacaactccttcctggtgaagcagtttggcaacggcaatgccaaggtgcagttcaccaaggagcccaacaacctctacaatgtacactcctacaagtactctggcttagcaaacaagaaaactgtaacgatccagccagctgctggaaaggactcggctgtggtcctctctactaccaagaccaagaagcagaacacacccgcgaagctcagccacaagtctgtaatgcgcaaggagttccgcaagatggccaagtctggtgtcaagaagaagaacaggcagcctacgcactaagcctgtgttctgtcgttggtgcccatagtctcagcttatatttatccaatgtctccaacagttttgagacttgttagaactagagcaaatcgtgttaagatgttgccgtttgtcattctatagcaagaattccatgacaaagattgcttggcacttgattgctgctttgtttgcaagctggctggccgggattacccctgatttttgttgggttctggaacatgtatgtctagcttcttattgggtgcttttggttgcctgtggactgtggttgcctgcatattgtctggcgaggctcacgttctggttggttgcctatcagcctcttcagcgttctggttggttgcct

SEQ ID NO: 76066 - DNA, 3023 bp, Zea Mays
gatagaatctatcgatctgcttattttcttaaactgttgtatagtggtgcaaaatcccaaaaattatggccaacaacgaagataacatcaaaaacagtgtctgtctgcaagcttctcctgagaaatttaagctttctaatgctcaagttttgtctaccaaactaggaagaagaattgagtgagaaaaatctgctgcacttttgtcatatatactgagcgaacttagatgacatcagacgttgcagttatctgaaagcatcattggtcacctaaccaaatgttactcttggagatagttgttccccattactaggtctagcagagaataacggaattatacgacacaataggttactaaaagtcgtatttgggatcaagttgcctcaagtatctaggcatgtggcttagcacgcactcagcacaatactttctggtgtttgcttctctcgcttggtcacagtctatcatgaaaagttcagtaggaactcatgtaaccttctacgaattgcaggtgaacaatgcacttatggatctgataaaggccaccggatctgcgatgaaacctgaagagtggtcagcccagcctgagaacacatcgggtaagcttaagaagactaaacacctccgatttctcttcaaggctaactgttctggatcaaatctcttacgctgcgtcctcatcagagaccggggcactcatttccgcgaggcccattaccgtcacgatgcgaacagatgaaggggtgatagtcatggggtttgagcacatcaggaacattgtaaggataatgaagccagaccaaaatacgtgtaaattattctttgagaccttgttgtgggagtcgagatgatactttttcacttctcccccatacctggagatgatgattttagagtagcatctccaacacatgtgaaactcttcggaggaaaggcctgctcatagtggcagaataatccgacacggataacactgaacaaacagtgcccgcctggacagaagtgtctgggccacggttggtgtatgcacatgtacctgtataaagagtatctgtaacttgctgcttctatttcacggccacatgctgtgctggtgctgtccaccatgcttctgtaccatactgaaatttcaaaaccattctttgttgctcatttccgtgtggcttgctccgctgtctgttttctgcagtagcagatgtaggtgctctgagtgggttattgcagcagcagttaatctgttccgatcgagctgacatcatcatctttcttgcaaagacatacactgcgcttaagcggccgaaacgctgcaaacgtgaagatgctgcaatacatttcagcaaatagtagcatagggtaaaactgaaaagcgaacgagagcggcagccacagatctgggtttcacgacgtacaacacgataatatccagggcctagacgatctggctgggacggcgtgccaaccttaagccttgttcggttaatcccgttacccatggattggatgagataaagccttgttcggttaatcccgttacccatggattgggtgaaaccttaagccttgttcggttaatcccgttacccatggattggatgagataaagccttgttcggttaatcccgttacccatggattgggtgagattgaaaaaaattaagaaaggatttgacttagttgggatttaaactcatccaatctcactcaatccatgtggattgggagctaaccgaacaagcccttagtgtgtctgtaggacacgttagctttagggggtgtttggttagagggactaaagattagtctctagctttttgtctcatttagtcccttttttaccaaacactagaactaaaatttggactaaaataatttagtctttagtccttcgcatatgtgctaaaagagactaaaccatattaattccatatttacccttcatttagttcaattgtactaatagcaggagaatgttaaaagtcattttagtcttcttataagtcatttagtatattcttactatttttagccctataactaaatatgttagggactaaactttaatcccctaactaaactttagtccctagactaaagaaatcaaacatagtcttagttcactaaagagcatacgggtaaaacacctgaaatgacgtgcgttatctattatctctgctagctcgcggaccatccagatccagtgccacctctgatgttcttatctgacggctcagtgctcacgtagatggtgcgggctgaagaggactccatggcccggttgagcttcctaaacagagggctgacggcgtcctccttccttgtcctcctgttgttctttcattcaggtctctctcatctttcatctgcatgaacggccgctgtgcttccatgcctgcgctgcgctgcgctggttaaatagaaaatacgcggtcgtgtggaaataagctgatgcctctgcgccctgcttcttccattttgtcaaggtccgtccgacactgaatgaattctatagtttttggagaaagaatgaatatatcctgattcctgaaccccgatccacaaccgggaaagggcaccttagctgatgtattgacgtcaggcgacataagcaaacggatcaaagaagcacgccgccagttacgagacgtgctggtgaccacccttacacacacacaaactaaaaacaccacgcgagcagcggatccagaaagatacggaggatggacttattccttttattttctgtatttaaaatcgcatttttaaatttcaagtataaaattatagcagaaacttaagaggggcttccggcttccggcctccggggaccgtagcgggggctcgatcgagcccggacagcggccgccccggtgctggatgcgcccctctcatctcatgagaagtaagctagaatgaattggtgttacagagatagtgcggaggagggagggctaataaccttggcaaaatcagggactcagggtggacggctgcgctgccgcttgccgatgcctggcgtccggcga

SEQ ID NO: 76067 - DNA, 2966 bp, Zea Mays
gatagaatctatcgatctgcttattttcttaaactgttgtatagtggtgcaaaatcccaaaaattatggccaacaacgaagataacatcaaaaacagtgtctgtctgcaagcttctcctgagaaatttaagctttctaatgctcaagttttgtctaccaaactaggaagaagaattgagtgagaaaaatctgctgcacttttgtcatatatactgagcgaacttagatgacatcagacgttgcagttatctgaaagcatcattggtcacctaaccaaatgttactcttggagatagttgttccccattactaggtctagcagagaataacggaattatacgacacaataggttactaaaagtcgtatttgggatcaagttgcctcaagtatctaggcatgtggcttagcacgcactcagcacaatactttctggtgtttgcttctctcgcttggtcacagtctatcatgaaaagttcagtaggaactcatgtaaccttctacgaattgcaggtgaacaatgcacttatggatctgataaaggccaccggatctgcgatgaaacctgaagagtggtcagcccagcctgagaacacatcggagaccggggcactcatttccgcgaggcccattaccgtcacgatgcgaacagatgaaggggtgatagtcatggggtttgagcacatcaggaacattgtaaggataatgaagccagcaagggttgcaccaattgactcgtgaggaccaaaatacgtgtaaattattctttgagaccttgttgtgggagtcgagatgatactttttcacttctcccccatacctggagatgatgattttagagtagcatctccaacacatgtgaaactcttcggaggaaaggcctgctcatagtggcagaataatccgacacggataacactgaacaaacagtgcccgcctggacagaagtgtctgggccacggttggtgtatgcacatgtacctgtataaagagtatctgtaacttgctgcttctatttcacggccacatgctgtgctggtgctgtccaccatgcttctgtaccatactgaaatttcaaaaccattctttgttgctcatttccgtgtggcttgctccgctgtctgttttctgcagtagcagatgtaggtgctctgagtgggttattgcagcagcagttaatctgttccgatcgagctgacatcatcatctttcttgcaaagacatacactgcgcttaagcggccgaaacgctgcaaacgtgaagatgctgcaatacatttcagcaaatagtagcatagggtaaaactgaaaagcgaacgagagcggcagccacagatctgggtttcacgacgtacaacacgataatatccagggcctagacgatctggctgggacggcgtgccaaccttaagccttgttcggttaatcccgttacccatggattggatgagataaagccttgttcggttaatcccgttacccatggattgggtgaaaccttaagccttgttcggttaatcccgttacccatggattggatgagataaagccttgttcggttaatcccgttacccatggattgggtgagattgaaaaaaattaagaaaggatttgacttagttgggatttaaactcatccaatctcactcaatccatgtggattgggagctaaccgaacaagcccttagtgtgtctgtaggacacgttagctttagggggtgtttggttagagggactaaagattagtctctagctttttgtctcatttagtcccttttttaccaaacactagaactaaaatttggactaaaataatttagtctttagtccttcgcatatgtgctaaaagagactaaaccatattaattccatatttacccttcatttagttcaattgtactaatagcaggagaatgttaaaagtcattttagtcttcttataagtcatttagtatattcttactatttttagccctataactaaatatgttagggactaaactttaatcccctaactaaactttagtccctagactaaagaaatcaaacatagtcttagttcactaaagagcatacgggtaaaacacctgaaatgacgtgcgttatctattatctctgctagctcgcggaccatccagatccagtgccacctctgatgttcttatctgacggctcagtgctcacgtagatggtgcgggctgaagaggactccatggcccggttgagcttcctaaacagagggctgacggcgtcctccttccttgtcctcctgttgttctttcattcaggtctctctcatctttcatctgcatgaacggccgctgtgcttccatgcctgcgctgcgctgcgctggttaaatagaaaatacgcggtcgtgtggaaataagctgatgcctctgcgccctgcttcttccattttgtcaaggtccgtccgacactgaatgaattctatagtttttggagaaagaatgaatatatcctgattcctgaaccccgatccacaaccgggaaagggcaccttagctgatgtattgacgtcaggcgacataagcaaacggatcaaagaagcacgccgccagttacgagacgtgctggtgaccacccttacacacacacaaactaaaaacaccacgcgagcagcggatccagaaagatacggaggatggacttattccttttattttctgtatttaaaatcgcatttttaaatttcaagtataaaattatagcagaaacttaagaggggcttccggcttccggcctccggggaccgtagcgggggctcgatcgagcccggacagcggccgccccggtgctggatgcgcccctctcatctcatgagaagtaagctagaatgaattggtgttacagagatagtgcggaggagggagggctaataaccttggcaaaatcagggactcagggtggacggctgcgctgccgcttgccgatgcctggcgtccggcga

SEQ ID NO: 76068 - DNA, 2799 bp, Zea Mays
attggatcatgtgatttggataggaatatgtgaagggcatatcgtcgacagggatgcaatctaattgtggttttgaagggcaaatcaatgcatgttggactcacaacatgactactaaggagctagatacaatacgatctgccggctttctagtttcagttattcatggaaggtacgatatcattgcgcaattgtgccatgcaaaacgtctagcagaaagccttcttcctgttgcaagaatggtagaacttcatggtgcacatctagtgagccatgaaagaccagacgaggtgaacaatgcacttatggatctgataaaggccaccggatctgcgatgaaacctgaagagtggtcagcccagcctgagaacacatcgggtaagcttaagaagactaaacacctccgatttctcttcaaggctaactgttctggatcaaatctcttacgctgcgtcctcatcagagaccggggcactcatttccgcgaggcccattaccgtcacgatgcgaacagatgaaggtgcaaatgctgccgtagcagtctataacttgcttggcaagctgcaactaagctttctttatctcataggggtgatagtcatggggtttgagcacatcaggaacattgtaaggataatgaagccagcaagggttgcaccaattgactcgtgaggaccaaaatacgtgtaaattattctttgagaccttgttgtgggagtcgagatgatactttttcacttctcccccatacctggagatgatgattttagagtagcatctccaacacatgtgaaactcttcggaggaaaggcctgtataaagagtatctgtaacttgctgcttctatttcacggccacatgctgtgctggtgctgtccaccatgcttctgtaccatactgaaatttcaaaaccattctttgttgctcatttccgtgtggcttgctccgctgtctgttttctgcagtagcagatgtaggtgctctgagtgggttattgcagcagcagttaatctgttccgatcgagctgacatcatcatctttcttgcaaagacatacactgcgcttaagcggccgaaacgctgcaaacgtgaagatgctgcaatacatttcagcaaatagtagcatagggtaaaactgaaaagcgaacgagagcggcagccacagatctgggtttcacgacgtacaacacgataatatccagggcctagacgatctggctgggacggcgtgccaaccttaagccttgttcggttaatcccgttacccatggattggatgagataaagccttgttcggttaatcccgttacccatggattgggtgaaaccttaagccttgttcggttaatcccgttacccatggattggatgagataaagccttgttcggttaatcccgttacccatggattgggtgagattgaaaaaaattaagaaaggatttgacttagttgggatttaaactcatccaatctcactcaatccatgtggattgggagctaaccgaacaagcccttagtgtgtctgtaggacacgttagctttagggggtgtttggttagagggactaaagattagtctctagctttttgtctcatttagtcccttttttaccaaacactagaactaaaatttggactaaaataatttagtctttagtccttcgcatatgtgctaaaagagactaaaccatattaattccatatttacccttcatttagttcaattgtactaatagcaggagaatgttaaaagtcattttagtcttcttataagtcatttagtatattcttactatttttagccctataactaaatatgttagggactaaactttaatcccctaactaaactttagtccctagactaaagaaatcaaacatagtcttagttcactaaagagcatacgggtaaaacacctgaaatgacgtgcgttatctattatctctgctagctcgcggaccatccagatccagtgccacctctgatgttcttatctgacggctcagtgctcacgtagatggtgcgggctgaagaggactccatggcccggttgagcttcctaaacagagggctgacggcgtcctccttccttgtcctcctgttgttctttcattcaggtctctctcatctttcatctgcatgaacggccgctgtgcttccatgcctgcgctgcgctgcgctggttaaatagaaaatacgcggtcgtgtggaaataagctgatgcctctgcgccctgcttcttccattttgtcaaggtccgtccgacactgaatgaattctatagtttttggagaaagaatgaatatatcctgattcctgaaccccgatccacaaccgggaaagggcaccttagctgatgtattgacgtcaggcgacataagcaaacggatcaaagaagcacgccgccagttacgagacgtgctggtgaccacccttacacacacacaaactaaaaacaccacgcgagcagcggatccagaaagatacggaggatggacttattccttttattttctgtatttaaaatcgcatttttaaatttcaagtataaaattatagcagaaacttaagaggggcttccggcttccggcctccggggaccgtagcgggggctcgatcgagcccggacagcggccgccccggtgctggatgcgcccctctcatctcatgagaagtaagctagaatgaattggtgttacagagatagtgcggaggagggagggctaataaccttggcaaaatcagggactcagggtggacggctgcgctgccgcttgccgatgcctggcgtccggcga

SEQ ID NO: 76069 - DNA, 2821 bp, Zea Mays
gtcatgttctgtcccgagacattgatttgggaatatgtgaagggcatatcgtcgacagggatgcaatctaattgtggttttgaagggcaaatcaatgcatgttggactcacaacatgactactaaggagctagatacaatacgatctgccggctttctagtttcagttattcatggaaggtacgatatcattgcgcaattgtgccatgcaaaacgtctagcagaaagccttcttcctgttgcaagaatggtagaacttcatggtgcacatctagtgagccatgaaagaccagacgaggtgaacaatgcacttatggatctgataaaggccaccggatctgcgatgaaacctgaagagtggtcagcccagcctgagaacacatcggagaccggggcactcatttccgcgaggcccattaccgtcacgatgcgaacagatgaaggtgcaaatgctgccgtagcagtctataacttgcttggcaagctgcaactaagctttctttatctcataggggtgatagtcatggggtttgagcacatcaggaacattgtaaggataatgaagccagcaagggttgcaccaattgactcgtgaggaccaaaatacgtgtaaattattctttgagaccttgttgtgggagtcgagatgatactttttcacttctcccccatacctggagatgatgattttagagtagcatctccaacacatgtgaaactcttcggaggaaaggcctgctcatagtggcagaataatccgacacggataacactgaacaaacagtgcccgcctggacagaagtgtctgggccacggttggtgtatgcacatgtacctgtataaagagtatctgtaacttgctgcttctatttcacggccacatgctgtgctggtgctgtccaccatgcttctgtaccatactgaaatttcaaaaccattctttgttgctcatttccgtgtggcttgctccgctgtctgttttctgcagtagcagatgtaggtgctctgagtgggttattgcagcagcagttaatctgttccgatcgagctgacatcatcatctttcttgcaaagacatacactgcgcttaagcggccgaaacgctgcaaacgtgaagatgctgcaatacatttcagcaaatagtagcatagggtaaaactgaaaagcgaacgagagcggcagccacagatctgggtttcacgacgtacaacacgataatatccagggcctagacgatctggctgggacggcgtgccaaccttaagccttgttcggttaatcccgttacccatggattggatgagataaagccttgttcggttaatcccgttacccatggattgggtgaaaccttaagccttgttcggttaatcccgttacccatggattggatgagataaagccttgttcggttaatcccgttacccatggattgggtgagattgaaaaaaattaagaaaggatttgacttagttgggatttaaactcatccaatctcactcaatccatgtggattgggagctaaccgaacaagcccttagtgtgtctgtaggacacgttagctttagggggtgtttggttagagggactaaagattagtctctagctttttgtctcatttagtcccttttttaccaaacactagaactaaaatttggactaaaataatttagtctttagtccttcgcatatgtgctaaaagagactaaaccatattaattccatatttacccttcatttagttcaattgtactaatagcaggagaatgttaaaagtcattttagtcttcttataagtcatttagtatattcttactatttttagccctataactaaatatgttagggactaaactttaatcccctaactaaactttagtccctagactaaagaaatcaaacatagtcttagttcactaaagagcatacgggtaaaacacctgaaatgacgtgcgttatctattatctctgctagctcgcggaccatccagatccagtgccacctctgatgttcttatctgacggctcagtgctcacgtagatggtgcgggctgaagaggactccatggcccggttgagcttcctaaacagagggctgacggcgtcctccttccttgtcctcctgttgttctttcattcaggtctctctcatctttcatctgcatgaacggccgctgtgcttccatgcctgcgctgcgctgcgctggttaaatagaaaatacgcggtcgtgtggaaataagctgatgcctctgcgccctgcttcttccattttgtcaaggtccgtccgacactgaatgaattctatagtttttggagaaagaatgaatatatcctgattcctgaaccccgatccacaaccgggaaagggcaccttagctgatgtattgacgtcaggcgacataagcaaacggatcaaagaagcacgccgccagttacgagacgtgctggtgaccacccttacacacacacaaactaaaaacaccacgcgagcagcggatccagaaagatacggaggatggacttattccttttattttctgtatttaaaatcgcatttttaaatttcaagtataaaattatagcagaaacttaagaggggcttccggcttccggcctccggggaccgtagcgggggctcgatcgagcccggacagcggccgccccggtgctggatgcgcccctctcatctcatgagaagtaagctagaatgaattggtgttacagagatagtgcggaggagggagggctaataaccttggcaaaatcagggactcagggtggacggctgcgctgccgcttgccgatgcctggcgtccggcga

SEQ ID NO: 76070 - DNA, 3760 bp, Zea Mays
gggccggccggtttgactcggcggcggacggcgacgcgccgacgtgtctccgccgccccgctcacatccgcccccgcgccatccgtccacgtgttcgcgcctctggaacggactcccccgcctgcaccttcttttccctcgcgccgcggcgcccgttctttccgagtcccgcggatataactacaaccagccgcccccttcctccgcagctccgctccccttcccccctcgtttttcctctgcgcactttttctcgtttccagccttccaggcagccacgcctcgcccgttctcggatcccctccaaaacggtcaaagccaaaccagccaaatcgcgcgcggcggcggcggcgacgagaacgagacggacgcgcgcgcgctagctgaatcaggtcaggaaggaggagagccgccggcgagcacagcagcaatgccttactgcgaggtgggcaggtacgcggacggcgacaagtgggagggcgtccgcgtctactaccgccgctacggccgcggcgccaccaaggtgctcctcatcatcgggttggcggggacgcacgactcgtggggcccgcagattaaggggctgacggggtcgctggagccggccgacgacgaggccctgcggccggacgaggaggccgccggcggcgacggcgacggcatcgaggtctgctgcttcgacaaccgcggcgccggccgcagctccgtgcccccgaacaaatcctactactcgacggcaatcatggcgacggatgccttggccttgatggatcatttggggtggaagaaagctcacgtctttggccactccatgggtgccatgattgcttgcaagcttgcggcgattgcgcctcacaggctatgttcgctggcattgcttaatgtcactggaggtggctttcagtgcttcccaaaggtagatgggcagatgctttctcttgcattccgtttcttaagggcaaaaacaccagaggaaagagcccttgtggacttggaaacgcattatacgaaggaataccttgaggagactgttgggtcgtgtaccagaagaatggtcctctatcaagaatatgtgaagggcatatcgtcgacagggatgcaatctaattgtggttttgaagggcaaatcaatgcatgttggactcacaacatgactactaaggagctagatacaatacgatctgccggctttctagtttcagttattcatggaaggtacgatatcattgcgcaattgtgccatgcaaaacgtctagcagaaagccttcttcctgttgcaagaatggtagaacttcatggtgcacatctagtgagccatgaaagaccagacgaggtgaacaatgcacttatggatctgataaaggccaccggatctgcgatgaaacctgaagagtggtcagcccagcctgagaacacatcggagaccggggcactcatttccgcgaggcccattaccgtcacgatgcgaacagatgaaggggtgatagtcatggggtttgagcacatcaggaacattgtaaggataatgaagccagaccaaaatacgtgtaaattattctttgagaccttgttgtgggagtcgagatgatactttttcacttctcccccatacctggagatgatgattttagagtagcatctccaacacatgtgaaactcttcggaggaaaggcctgctcatagtggcagaataatccgacacggataacactgaacaaacagtgcccgcctggacagaagtgtctgggccacggttggtgtatgcacatgtacctgtataaagagtatctgtaacttgctgcttctatttcacggccacatgctgtgctggtgctgtccaccatgcttctgtaccatactgaaatttcaaaaccattctttgttgctcatttccgtgtggcttgctccgctgtctgttttctgcagtagcagatgtaggtgctctgagtgggttattgcagcagcagttaatctgttccgatcgagctgacatcatcatctttcttgcaaagacatacactgcgcttaagcggccgaaacgctgcaaacgtgaagatgctgcaatacatttcagcaaatagtagcatagggtaaaactgaaaagcgaacgagagcggcagccacagatctgggtttcacgacgtacaacacgataatatccagggcctagacgatctggctgggacggcgtgccaaccttaagccttgttcggttaatcccgttacccatggattggatgagataaagccttgttcggttaatcccgttacccatggattgggtgaaaccttaagccttgttcggttaatcccgttacccatggattggatgagataaagccttgttcggttaatcccgttacccatggattgggtgagattgaaaaaaattaagaaaggatttgacttagttgggatttaaactcatccaatctcactcaatccatgtggattgggagctaaccgaacaagcccttagtgtgtctgtaggacacgttagctttagggggtgtttggttagagggactaaagattagtctctagctttttgtctcatttagtcccttttttaccaaacactagaactaaaatttggactaaaataatttagtctttagtccttcgcatatgtgctaaaagagactaaaccatattaattccatatttacccttcatttagttcaattgtactaatagcaggagaatgttaaaagtcattttagtcttcttataagtcatttagtatattcttactatttttagccctataactaaatatgttagggactaaactttaatcccctaactaaactttagtccctagactaaagaaatcaaacatagtcttagttcactaaagagcatacgggtaaaacacctgaaatgacgtgcgttatctattatctctgctagctcgcggaccatccagatccagtgccacctctgatgttcttatctgacggctcagtgctcacgtagatggtgcgggctgaagaggactccatggcccggttgagcttcctaaacagagggctgacggcgtcctccttccttgtcctcctgttgttctttcattcaggtctctctcatctttcatctgcatgaacggccgctgtgcttccatgcctgcgctgcgctgcgctggttaaatagaaaatacgcggtcgtgtggaaataagctgatgcctctgcgccctgcttcttccattttgtcaaggtccgtccgacactgaatgaattctatagtttttggagaaagaatgaatatatcctgattcctgaaccccgatccacaaccgggaaagggcaccttagctgatgtattgacgtcaggcgacataagcaaacggatcaaagaagcacgccgccagttacgagacgtgctggtgaccacccttacacacacacaaactaaaaacaccacgcgagcagcggatccagaaagatacggaggatggacttattccttttattttctgtatttaaaatcgcatttttaaatttcaagtataaaattatagcagaaacttaagaggggcttccggcttccggcctccggggaccgtagcgggggctcgatcgagcccggacagcggccgccccggtgctggatgcgcccctctcatctcatgagaagtaagctagaatgaattggtgttacagagatagtgcggaggagggagggctaataaccttggcaaaatcagggactcagggtggacggctgcgctgccgcttgccgatgcctggcgtccggcga

SEQ ID NO: 76071 - DNA, 3688 bp, Zea Mays
gggccggccggtttgactcggcggcggacggcgacgcgccgacgtgtctccgccgccccgctcacatccgcccccgcgccatccgtccacgtgttcgcgcctctggaacggactcccccgcctgcaccttcttttccctcgcgccgcggcgcccgttctttccgagtcccgcggatataactacaaccagccgcccccttcctccgcagctccgctccccttcccccctcgtttttcctctgcgcactttttctcgtttccagccttccaggcagccacgcctcgcccgttctcggatcccctccaaaacggtcaaagccaaaccagccaaatcgcgcgcggcggcggcggcgacgagaacgagacggacgcgcgcgcgctagctgaatcaggtcaggaaggaggagagccgccggcgagcacagcagcaatgccttactgcgaggtgggcaggtacgcggacggcgacaagtgggagggcgtccgcgtctactaccgccgctacggccgcggcgccaccaaggtgctcctcatcatcgggttggcggggacgcacgactcgtggggcccgcagattaaggggctgacggggtcgctggagccggccgacgacgaggccctgcggccggacgaggaggccgccggcggcgacggcgacggcatcgaggtctgctgcttcgacaaccgcggcgccggccgcagctccgtgcccccgaacaaatcctactactcgacggcaatcatggcgacggatgccttggccttgatggatcatttggggtggaagaaagctcacgtctttggccactccatgggtgccatgattgcttgcaagcttgcggcgattgcgcctcacaggctatgttcgctggcattgcttaatgtcactggaggtggctttcagtgcttcccaaaggtagatgggcagatgctttctcttgcattccgtttcttaagggcaaaaacaccagaggaaagagcccttgtggacttggaaacgcattatacgaaggaataccttgaggagactgttgggtcgtgtaccagaagaatggtcctctatcaagaatatgtgaagggcatatcgtcgacagggatgcaatctaattgtggttttgaagggcaaatcaatgcatgttggactcacaacatgactactaaggagctagatacaatacgatctgccggctttctagtttcagttattcatggaaggtacgatatcattgcgcaattgtgccatgcaaaacgtctagcagaaagccttcttcctgttgcaagaatggtagaacttcatggtgcacatctagtgagccatgaaagaccagacgaggtgaacaatgcacttatggatctgataaaggccaccggatctgcgatgaaacctgaagagtggtcagcccagcctgagaacacatcggagaccggggcactcatttccgcgaggcccattaccgtcacgatgcgaacagatgaaggggtgatagtcatggggtttgagcacatcaggaacattgtaaggataatgaagccagcaagggttgcaccaattgactcgtgaggaccaaaatacgtgtaaattattctttgagaccttgttgtgggagtcgagatgatactttttcacttctcccccatacctggagatgatgattttagagtagcatctccaacacatgtgaaactcttcggaggaaaggcctgtataaagagtatctgtaacttgctgcttctatttcacggccacatgctgtgctggtgctgtccaccatgcttctgtaccatactgaaatttcaaaaccattctttgttgctcatttccgtgtggcttgctccgctgtctgttttctgcagtagcagatgtaggtgctctgagtgggttattgcagcagcagttaatctgttccgatcgagctgacatcatcatctttcttgcaaagacatacactgcgcttaagcggccgaaacgctgcaaacgtgaagatgctgcaatacatttcagcaaatagtagcatagggtaaaactgaaaagcgaacgagagcggcagccacagatctgggtttcacgacgtacaacacgataatatccagggcctagacgatctggctgggacggcgtgccaaccttaagccttgttcggttaatcccgttacccatggattggatgagataaagccttgttcggttaatcccgttacccatggattgggtgaaaccttaagccttgttcggttaatcccgttacccatggattggatgagataaagccttgttcggttaatcccgttacccatggattgggtgagattgaaaaaaattaagaaaggatttgacttagttgggatttaaactcatccaatctcactcaatccatgtggattgggagctaaccgaacaagcccttagtgtgtctgtaggacacgttagctttagggggtgtttggttagagggactaaagattagtctctagctttttgtctcatttagtcccttttttaccaaacactagaactaaaatttggactaaaataatttagtctttagtccttcgcatatgtgctaaaagagactaaaccatattaattccatatttacccttcatttagttcaattgtactaatagcaggagaatgttaaaagtcattttagtcttcttataagtcatttagtatattcttactatttttagccctataactaaatatgttagggactaaactttaatcccctaactaaactttagtccctagactaaagaaatcaaacatagtcttagttcactaaagagcatacgggtaaaacacctgaaatgacgtgcgttatctattatctctgctagctcgcggaccatccagatccagtgccacctctgatgttcttatctgacggctcagtgctcacgtagatggtgcgggctgaagaggactccatggcccggttgagcttcctaaacagagggctgacggcgtcctccttccttgtcctcctgttgttctttcattcaggtctctctcatctttcatctgcatgaacggccgctgtgcttccatgcctgcgctgcgctgcgctggttaaatagaaaatacgcggtcgtgtggaaataagctgatgcctctgcgccctgcttcttccattttgtcaaggtccgtccgacactgaatgaattctatagtttttggagaaagaatgaatatatcctgattcctgaaccccgatccacaaccgggaaagggcaccttagctgatgtattgacgtcaggcgacataagcaaacggatcaaagaagcacgccgccagttacgagacgtgctggtgaccacccttacacacacacaaactaaaaacaccacgcgagcagcggatccagaaagatacggaggatggacttattccttttattttctgtatttaaaatcgcatttttaaatttcaagtataaaattatagcagaaacttaagaggggcttccggcttccggcctccggggaccgtagcgggggctcgatcgagcccggacagcggccgccccggtgctggatgcgcccctctcatctcatgagaagtaagctagaatgaattggtgttacagagatagtgcggaggagggagggctaataaccttggcaaaatcagggactcagggtggacggctgcgctgccgcttgccgatgcctggcgtccggcga

SEQ ID NO: 76072 - DNA, 4851 bp, Zea Mays
gggccggccggtttgactcggcggcggacggcgacgcgccgacgtgtctccgccgccccgctcacatccgcccccgcgccatccgtccacgtgttcgcgcctctggaacggactcccccgcctgcaccttcttttccctcgcgccgcggcgcccgttctttccgagtcccgcggatataactacaaccagccgcccccttcctccgcagctccgctccccttcccccctcgtttttcctctgcgcactttttctcgtttccagccttccaggcagccacgcctcgcccgttctcggatcccctccaaaacggtcaaagccaaaccagccaaatcgcgcgcggcggcggcggcgacgagaacgagacggacgcgcgcgcgctagctgaatcaggtcaggaaggaggagagccgccggcgagcacagcagcaatgccttactgcgaggtgggcaggtacgcggacggcgacaagtgggagggcgtccgcgtctactaccgccgctacggccgcggcgccaccaaggtgctcctcatcatcgggttggcggggacgcacgactcgtggggcccgcagattaaggggctgacggggtcgctggagccggccgacgacgaggccctgcggccggacgaggaggccgccggcggcgacggcgacggcatcgaggtctgctgcttcgacaaccgcggcgccggccgcagctccgtgcccccgaacaaatcctactactcgacggcaatcatggcgacggatgccttggccttgatggatcatttggggtggaagaaagctcacgtctttggccactccatgggtgccatgattgcttgcaagcttgcggcgattgcgcctcacaggctatgttcgctggcattgcttaatgtcactggaggtggctttcagtgcttcccaaaggtagatgggcagatgctttctcttgcattccgtttcttaagggcaaaaacaccagaggaaagagcccttgtggacttggaaacgcattatacgaaggaataccttgaggagactgttgggtcgtgtaccagaagaatggtcctctatcaagaatatgtgaagggcatatcgtcgacagggatgcaatctaattgtggttttgaagggcaaatcaatgcatgttggactcacaacatgactactaaggagctagatacaatacgatctgccggctttctagtttcagttattcatggaaggtacgatatcattgcgcaattgtgccatgcaaaacgtctagcagaaagccttcttcctgttgcaagaatggtagaacttcatggtgcacatctagtgagccatgaaagaccagacgaggtaaagtgagaactctcataaaacagcaacatgtgccactgaaacattaagggcattgatgtgattggttgttttgcttatttgcttaattaaactgaaactccccaaaattgctaagcaatgaaggtaacatcccaagctgtggctttgcaagtttctcaaaattgagctagctaacactaaacttttgtctaaccaaactaggaaggagcaccgaatgagaaatttctgttgcaacttgtccatagttgctgaacgagcaagatgccagccatctcagttaactgaaagcatatttcatcacctaaacgtgcaacagaataccagaattgccgagtgaactaagacgacaccagacatctcagttatccgaaagcatcatccatcacctaaacgtgaaacagaatacatgttgcttttgaaggcagctgttccccattactaggtttagcatgaaaagacagaattataggatccaataggttaccaaaagttataacgaaaccaagttgcctcaagtatctaggtatgtggcttactggcttaccacatgctcaagcatggcacacatctagggaaccatgaaaaactagatgaggtaaaatgcggacttcaataaaacaatagcgaaatgtgccactgaaatgctaggaaggacattgatagaatctatcgatctgcttattttcttaaactgttgtatagtggtgcaaaatcccaaaaattatggccaacaacgaagataacatcaaaaacagtgtctgtctgcaagcttctcctgagaaatttaagctttctaatgctcaagttttgtctaccaaactaggaagaagaattgagtgagaaaaatctgctgcacttttgtcatatatactgagcgaacttagatgacatcagacgttgcagttatctgaaagcatcattggtcacctaaccaaatgttactcttggagatagttgttccccattactaggtctagcagagaataacggaattatacgacacaataggttactaaaagtcgtatttgggatcaagttgcctcaagtatctaggcatgtggcttagcacgcactcagcacaatactttctggtgtttgcttctctcgcttggtcacagtctatcatgaaaagttcagtaggaactcatgtaaccttctacgaattgcaggtgaacaatgcacttatggatctgataaaggccaccggatctgcgatgaaacctgaagagtggtcagcccagcctgagaacacatcggagaccggggcactcatttccgcgaggcccattaccgtcacgatgcgaacagatgaagtcatggggtttgagcacatcaggaacattgtaaggataatgaagccagcaagggttgcaccaattgactcgtgaggaccaaaatacgtgtaaattattctttgagaccttgttgtgggagtcgagatgatactttttcacttctcccccatacctggagatgatgattttagagtagcatctccaacacatgtgaaactcttcggaggaaaggcctgtataaagagtatctgtaacttgctgcttctatttcacggccacatgctgtgctggtgctgtccaccatgcttctgtaccatactgaaatttcaaaaccattctttgttgctcatttccgtgtggcttgctccgctgtctgttttctgcagtagcagatgtaggtgctctgagtgggttattgcagcagcagttaatctgttccgatcgagctgacatcatcatctttcttgcaaagacatacactgcgcttaagcggccgaaacgctgcaaacgtgaagatgctgcaatacatttcagcaaatagtagcatagggtaaaactgaaaagcgaacgagagcggcagccacagatctgggtttcacgacgtacaacacgataatatccagggcctagacgatctggctgggacggcgtgccaaccttaagccttgttcggttaatcccgttacccatggattggatgagataaagccttgttcggttaatcccgttacccatggattgggtgaaaccttaagccttgttcggttaatcccgttacccatggattggatgagataaagccttgttcggttaatcccgttacccatggattgggtgagattgaaaaaaattaagaaaggatttgacttagttgggatttaaactcatccaatctcactcaatccatgtggattgggagctaaccgaacaagcccttagtgtgtctgtaggacacgttagctttagggggtgtttggttagagggactaaagattagtctctagctttttgtctcatttagtcccttttttaccaaacactagaactaaaatttggactaaaataatttagtctttagtccttcgcatatgtgctaaaagagactaaaccatattaattccatatttacccttcatttagttcaattgtactaatagcaggagaatgttaaaagtcattttagtcttcttataagtcatttagtatattcttactatttttagccctataactaaatatgttagggactaaactttaatcccctaactaaactttagtccctagactaaagaaatcaaacatagtcttagttcactaaagagcatacgggtaaaacacctgaaatgacgtgcgttatctattatctctgctagctcgcggaccatccagatccagtgccacctctgatgttcttatctgacggctcagtgctcacgtagatggtgcgggctgaagaggactccatggcccggttgagcttcctaaacagagggctgacggcgtcctccttccttgtcctcctgttgttctttcattcaggtctctctcatctttcatctgcatgaacggccgctgtgcttccatgcctgcgctgcgctgcgctggttaaatagaaaatacgcggtcgtgtggaaataagctgatgcctctgcgccctgcttcttccattttgtcaaggtccgtccgacactgaatgaattctatagtttttggagaaagaatgaatatatcctgattcctgaaccccgatccacaaccgggaaagggcaccttagctgatgtattgacgtcaggcgacataagcaaacggatcaaagaagcacgccgccagttacgagacgtgctggtgaccacccttacacacacacaaactaaaaacaccacgcgagcagcggatccagaaagatacggaggatggacttattccttttattttctgtatttaaaatcgcatttttaaatttcaagtataaaattatagcagaaacttaagaggggcttccggcttccggcctccggggaccgtagcgggggctcgatcgagcccggacagcggccgccccggtgctggatgcgcccctctcatctcatgagaagtaagctagaatgaattggtgttacagagatagtgcggaggagggagggctaataaccttggcaaaatcagggactcagggtggacggctgcgctgccgcttgccgatgcctggcgtccggcga

SEQ ID NO: 76073 - DNA, 1645 bp, Zea Mays
atgccatgtcgtgagccattgctggtgcaacccactcttattggcaggaagcaagttttgtcaaatagcggtattgcaagtatctcggttgtgttgatagcattagtcattagagggatagataggtgtttggattcaaaagagtcaactcttgttattgctcttattgatggtgttatcggacattatgcttgctgcaatggagatacatggtcatctgagctcgacattctttgtaaagctgagccacgaattatcacaacattcaaggtgttgttaagtcttttttatgattgcacaaatcattagcaaacatataatttttcactatttccttttgatttgttcagagtgcggcaggttaccattggtggtgtaaccatagatgggcttcttgcagcaacaactcgattctcgattaggcttgcatttgtgctgataggatttttcaccactcaatgtgctcctgatgtattctagaaccagctgctagctatacccttgtcacagctgccgacctatgtggaagtttgatggattccttcttgggcgcaacagttcagtatagtgggttctacagtgttcacaaaaaggtattacaaccaaactatttgaaaattttgccatatccttgtctcctctggttttgaaagcttattctctgctatgtcatgcttgttttgcttagcgactaaagactccacaaaatatgaaagtaatttttcctagaaattgcagacaagtgtgacaaaaacatgaagactagccgcaacaaacatgattcaaccatatttctcttttctaacattgatgaaattttcttctgatatctacattgcccaaattctgaaaaatcttctctaataactaattatcactttttggttggttatcttcatgaaggttccatatggttggtctcaacttcgttgtatacgagtccctcaaagactagctaatccagacaaattcatttggccttgcaaatgacaacgagattcacgtagttacaaggcttgagtgcggagctgtggctggaaccattggccagactgttgcataccctcttgatgtcatcagtagaagaatgcatatggttggttggagccatgctgactctattgttattggacaagtcaaagaagcactccagtacaatggcatgatcgatgcattcaagaagaccgttcgccatggagttggtgctctatacaagggtcttgtgccgaactcagtcaagagttctgtgcttgatgttcatacagagcgttttttgagatatctgttcgcgcctgagaagaaacctgacataatcaatggtctagctgataagaatcgtccctagcaaaagggcctctagaggtcggtttctatattgcttctttaaaaataattcgtgtgatattataatgttctctcggcattaatttattctatttgagtgggaagatttatatcaacattacatgtttatatcgttaatataatattattgttccggtaatattttgtcatggattttgcttatcatagtgacgtttgtcgttatatatttatattttatactaattttagctttcctggcaacgcacggtcaaatacctagttattattgcaaaaggaagaaacagagcggagcgaaaag

SEQ ID NO: 76074 - DNA, 555 bp, Zea Mays
ctcacagaactaacagttctgagatcgagctgcacaaggaaggaaagaaggagacacacaatcgtcgcctgcttaaccagagcgacaatgcccaagctcaggctcatcttcaccgttattcttgtggtgtctctactgttcagtggtgtgtcttcaggacaaactgcagctacacaagccagcgatgcagatctttctgaagcggttgagagacgcagtgggaaggttctgacgtacgttcaggactacgactacggcgggtccaaccccaaacatgacccacgcaggaagccagggagcggacaccctccataggtagccaaggataaacgtccggtgacgctccagccactggactctgctggtacctagctagtcttgctgagttgttcctgtaatgagtagaaagaatcagaacggtttggtcccgtccacgcccacgtcactttgttagctacgtagtagtataataaggtagtcttttagatgatgatgaaataaagatccagaatgttctgtcagtcgagacaccagactttaagtcctatttcttta

SEQ ID NO: 76075 - DNA, 549 bp, Zea Mays
ctcacagaactaacagttctgagatcgagctgcacaaggaaggaaagaaggagacacacaatcgtcgcctgcttaaccagagcgacaatgcccaagctcaggctcatcttcaccgttattcttgtggtgtctctactgttcagtggacaaactgcagctacacaagccagcgatgcagatctttctgaagcggttgaggttgagagacgcagtgggaaggttctgacgtacgttcaggactacgactacggcgggtccaaccccaaacatgacccacgcaggaagccagggagcggacaccctccataggtagccaaggataaacgtccggtgacgctccagccactggactctgctggtacctagctagtcttgctgagttgttcctgtaatgagtagaaagaatcagaacggtttggtcccgtccacgcccacgtcactttgttagctacgtagtagtataataaggtagtcttttagatgatgatgaaataaagatccagaatgttctgtcagtcgagacaccagactttaagtcctatttcttta

SEQ ID NO: 76076 - DNA, 584 bp, Zea Mays
atggagctcgcctcttccatggccgccctctgccccctcccttgcgtgctctctctctcctcttggcgacgactgggtgcttcttgtcccaccggccgttctggcactccgcgagaccagtaccttcaggatctcgtgacccagttccagaacgccacaaatgaaggttgttcttgagttattcttggactgcattacagagccaaatgaaaagcttgtcgagttcggcattggtggaatatgtaactcctgtgaagatcctgcaaattctttaatcattactcagtgtggtggaatcccgttggttgtacaatgcttatggagcctagtgcggaatactataagcatttctgaagatatagtgatcagctcttgagcagctagagtgatgtagttgtgggcttttgaacaatagctagagtgatatgaaacattagtgatgtagttgtggtgcttttgtgactgatcatctctggagcttttgtgaatgatctagctagctatccgtaaatgatctagttgtgaatgatattataattgtgatgcttttgtgaatatataattgtggtgcttttgtgtttatg

SEQ ID NO: 76077 - DNA, 1010 bp, Zea Mays
cttggtggccaacgcccctccctccatggagctcgcctcttccatggccgccctctgccccctcccttgcgtgctctctctctcctcttggcgacgactgggtggcaggtgcccaggtcttcttgggacccttcgccggcgacaagcaccaccaggtactcccaaccccgtcttcccttcctgcggtgccaaaccgagcacccaaaccctaactcgctatttgtattcggatctggtataattacaagattttgttaggaagatctgatgttgcaggttggggtgcattcattaaggtcagataaccgaacaaaatacctctgcgtgtgatgcttcctttcttgttctcgctaattttccttgccatatgtagaatcctgtaaataaaaatgattatcttggagaatatactggtgaattgatctctcacaaggaagcagacaaacacgggaaaatttatgaccgggcagactcatcgtttctgttcgatttaaatgaccaggtgcttcttgtcccaccggccgttctggcactccgcgagaccagtaccttcaggatctcgtgacccagttccagaacgccacaaatgaaggttgttcttgagttattcttggactgcattacagagccaaatgaaaagcttgtcgagttcggcattggtggaatatgtaactcctgtgaagatcctgcaaattctttaatcattactcagtgtggtggaatcccgttggttgtacaatgcttatggagcctagtgcggaatactataagcatttctgaagatatagtgatcagctcttgagcagctagagtgatgtagttgtgggcttttgaacaatagctagagtgatatgaaacattagtgatgtagttgtggtgcttttgtgactgatcatctctggagcttttgtgaatgatctagctagctatccgtaaatgatctagttgtgaatgatattataattgtgatgcttttgtgaatatataattgtggtgcttttgtgtttatg

SEQ ID NO: 76078 - DNA, 1777 bp, Zea Mays
cttcgtgccgtgcccgtgcgagccgctgccaacccgctccagctttgcccgttgccgtggccgtcccgtccggccgtccctagaaaaggccgcgtcccacgttgccttggttcccccaccctgctgtctccctccctccttccttccttccccgccactgcgcagcgcgagtgcggcgacagccagtcacacactcacactccctcgaccgctctcggccccgtccgcgtcgccgcagggcgaggaggcaatggcggcgggcgggaatggcgccggcggggacaccagggcggccttcgcgcggatctacaagacgctcaaggaggagctgctcaccgacccggccttcgagttcaccgaggagtcacgccagtggatcgaccgcatggttgactacaatgtactcggaggcaagtgtaaccgtgggctctctgtggtcgacagctacaagctgctcaagggcgctgatgctctgggcgaggaggaaacgttccttgcttgcaccctcggctggtgcattgaatggcttcaggctttctttcttgtgcttgatgatatcatggatgactctcacactcgtcgcggccagccttgctggttcagggtgcctcaggttggcttaattgctgcgaatgacgggatcatccttcgcaaccatatctcacggatccttcggcgccactttaagggcaaaccttactatgctgatctccttgatttgttcaatgaggttgagttcaagacagcttcaggtcagctgctggaccttatcactacccatgagggagaaaaagatctaacaaagtataacataacagttcacggtcgaattgttcaatacaagacagcctattattcattttatctgccggttgcatgtgccctgctgctctctggcgagaatttggacaattatggtgatgtagagaacatccttgttgaaatgggaacatactttcaagatgactatctggattgttatggtgatcctgaatttatcggcaagattggaacggacattgaagattacaagtgctcatggctagttgtgcaagcccttgagcgtgctgatgagagccaaaagcgcattctatttgaaaattatggcaagaaagatccagcctgtgtggcaaaagtgaagaacctctacaaagaacttgacctagaggcggtatttcaggagtacgagaatgagagctacaagaagctgattgcagacattgaagcccagccaagcattgcggttcagaaagtgctgaaatccttcttgcacaagatctacaagaggcagaagtagggtgctcttggataaacgagctcaggagtcgttactccttcgcatgcttgacataaccggacttcctcacctggttgctctagtatgatgtggagcgtctagttaaaaaaaatcgatgtagtatgaagcaccttgctgctctgaatattaacaggcaattaaggcaaggtgctgtttcggtttggtggaccgcatgttgcagataataaattagttgttttgtcatttgcgtctctatcgactttgctagtttgcttcttttggccaccgcccaactagtcgctttcaagagaatttctagcgtgtcacttctttgcttctctctctctctggccacccctactagtcgctttcaagttttttgcttttctctgaaaatgctcgcatcctctatgacttcgtggtacaatcttttgggaacaaaagtgccaagacatgatagaagaatattccaaaacctaaatttcaggagcttgagta

SEQ ID NO: 76079 - DNA, 1764 bp, Zea Mays
cttcgtgccgtgcccgtgcgagccgctgccaacccgctccagctttgcccgttgccgtggccgtcccgtccggccgtccctagaaaaggccgcgtcccacgttgccttggttcccccaccctgctgtctccctccctccttccttccttccccgccactgcgcagcgcgagtgcggcgacagccagtcacacactcacactccctcgaccgctctcggccccgtccgcgtcgccgcagggcgaggaggcaatggcggcgggcgggaatggcgccggcggggacaccagggcggccttcgcgcggatctacaagacgctcaaggaggagctgctcaccgacccggccttcgagttcaccgaggagtcacgccagtggatcgaccgcatggttgactacaatgtactcggaggcaagtgtaaccgtgggctctctgtggtcgacagctacaagctgctcaagggcgctgatgctctgggcgaggaggaaacgttccttgcttgcaccctcggctggtgcattgaatggcttcaggctttctttcttgtgcttgatgatatcatggatgactctcacactcgtcgcggccagccttgctggttcagggtgcctcaggttggcttaattgctgcgaatgacgggatcatccttcgcaaccatatctcacggatccttcggcgccactttaagggcaaaccttactatgctgatctccttgatttgttcaatgaggttgagttcaagacagcttcaggtcagctgctggaccttatcactacccatgagggagaaaaagatctaacaaagtataacataacagttcacggtcgaattgttcaatacaagacagcctattattcattttatctgccggttgcatgtgccctgctgctctctggcgagaatttggacaattatggtgatgtagagaacatccttgttgaaatgggaacatactttcaagtccaggatgactatctggattgttatggtgatcctgaatttatcggcaagattggaacggacattgaagattacaagtgctcatggctagttgtgcaagcccttgagcgtgctgatgagagccaaaagcgcattctatttatccagcctgtgtggcaaaagtgaagaacctctacaaagaacttgacctagaggcggtatttcaggagtacgagaatgagagctacaagaagctgattgcagacattgaagcccagccaagcattgcggttcagaaagtgctgaaatccttcttgcacaagatctacaagaggcagaagtagggtgctcttggataaacgagctcaggagtcgttactccttcgcatgcttgacataaccggacttcctcacctggttgctctagtatgatgtggagcgtctagttaaaaaaaatcgatgtagtatgaagcaccttgctgctctgaatattaacaggcaattaaggcaaggtgctgtttcggtttggtggaccgcatgttgcagataataaattagttgttttgtcatttgcgtctctatcgactttgctagtttgcttcttttggccaccgcccaactagtcgctttcaagagaatttctagcgtgtcacttctttgcttctctctctctctggccacccctactagtcgctttcaagttttttgcttttctctgaaaatgctcgcatcctctatgacttcgtggtacaatcttttgggaacaaaagtgccaagacatgatagaagaatattccaaaacctaaatttcaggagcttgagta

SEQ ID NO: 76080 - DNA, 1752 bp, Zea Mays
aaacggcggctctgtttcgtgcgctgtcccgtctccctccgtctcgtcagcttcgtgccgtgcccgtgcgagccgctgccaacccgctccagctttgcccgttgccgtggccgtcccgtccggccgtccctagaaaaggccgcgtcccacgttgccttggttcccccaccctgctgtctccctccctccttccttccttccccgccactgcgcagcgcgagtgcggcgacagccagtcacacactcacactccctcgaccgctctcggccccgtccgcgtcgccgcagggcgaggagctgctcaccgacccggccttcgagttcaccgaggagtcacgccagtggatcgaccgcatggttgactacaatgtactcggaggcaagtgtaaccgtgggctctctgtggtcgacagctacaagctgctcaagggcgctgatgctctgggcgaggaggaaacgttccttgcttgcaccctcggctggtgcattgaatggcttcaggctttctttcttgtgcttgatgatatcatggatgactctcacactcgtcgcggccagccttgctggttcagggtgcctcaggttggcttaattgctgcgaatgacgggatcatccttcgcaaccatatctcacggatccttcggcgccactttaagggcaaaccttactatgctgatctccttgatttgttcaatgaggttgagttcaagacagcttcaggtcagctgctggaccttatcactacccatgagggagaaaaagatctaacaaagtataacataacagttcacggtcgaattgttcaatacaagacagcctattattcattttatctgccggttgcatgtgccctgctgctctctggcgagaatttggacaattatggtgatgtagagaacatccttgttgaaatgggaacatactttcaagtccaggatgactatctggattgttatggtgatcctgaatttatcggcaagattggaacggacattgaagattacaagtgctcatggctagttgtgcaagcccttgagcgtgctgatgagagccaaaagcgcattctatttgaaaattatggcaagaaagatccagcctgtgtggcaaaagtgaagaacctctacaaagaacttgacctagaggcggtatttcaggagtacgagaatgagagctacaagaagctgattgcagacattgaagcccagccaagcattgcggttcagaaagtgctgaaatccttcttgcacaagatctacaagaggcagaagtagggtgctcttggataaacgagctcaggagtcgttactccttcgcatgcttgacataaccggacttcctcacctggttgctctagtatgatgtggagcgtctagttaaaaaaaatcgatgtagtatgaagcaccttgctgctctgaatattaacaggcaattaaggcaaggtgctgtttcggtttggtggaccgcatgttgcagataataaattagttgttttgtcatttgcgtctctatcgactttgctagtttgcttcttttggccaccgcccaactagtcgctttcaagagaatttctagcgtgtcacttctttgcttctctctctctctggccacccctactagtcgctttcaagttttttgcttttctctgaaaatgctcgcatcctctatgacttcgtggtacaatcttttgggaacaaaagtgccaagacatgatagaagaatattccaaaacctaaatttcaggagcttgagta

SEQ ID NO: 76081 - DNA, 1869 bp, Zea Mays
cggaaactataaacaaacggataacctgaagtgggccccaggtcgcagcagcaccaccagatctggatccaaacggcggctctgtttcgtgcgctgtcccgtctccctccgtctcgtcagcttcgtgccgtgcccgtgcgagccgctgccaacccgctccagctttgcccgttgccgtggccgtcccgtccggccgtccctagaaaaggccgcgtcccacgttgccttggttcccccaccctgctgtctccctccctccttccttccttccccgccactgcgcagcgcgagtgcggcgacagccagtcacacactcacactccctcgaccgctctcggccccgtccgcgtcgccgcagggcgaggaggcaatggcggcgggcgggaatggcgccggcggggacaccagggcggccttcgcgcggatctacaagacgctcaaggaggagctgctcaccgacccggccttcgagttcaccgaggagtcacgccagtggatcgaccgcatggttgactacaatgtactcggagctacaagctgctcaagggcgctgatgctctgggcgaggaggaaacgttccttgcttgcaccctcggctggtgcattgaatggcttcaggctttctttcttgtgcttgatgatatcatggatgactctcacactcgtcgcggccagccttgctggttcagggtgcctcaggttggcttaattgctgcgaatgacgggatcatccttcgcaaccatatctcacggatccttcggcgccactttaagggcaaaccttactatgctgatctccttgatttgttcaatgaggttgagttcaagacagcttcaggtcagctgctggaccttatcactacccatgagggagaaaaagatctaacaaagtataacataacagttcacggtcgaattgttcaatacaagacagcctattattcattttatctgccggttgcatgtgccctgctgctctctggcgagaatttggacaattatggtgatgtagagaacatccttgttgaaatgggaacatactttcaagtccaggatgactatctggattgttatggtgatcctgaatttatcggcaagattggaacggacattgaagattacaagtgctcatggctagttgtgcaagcccttgagcgtgctgatgagagccaaaagcgcattctatttgaaaattatggcaagaaagatccagcctgtgtggcaaaagtgaagaacctctacaaagaacttgacctagaggcggtatttcaggagtacgagaatgagagctacaagaagctgattgcagacattgaagcccagccaagcattgcggttcagaaagtgctgaaatccttcttgcacaagatctacaagaggcagaagtagggtgctcttggataaacgagctcaggagtcgttactccttcgcatgcttgacataaccggacttcctcacctggttgctctagtatgatgtggagcgtctagttaaaaaaaatcgatgtagtatgaagcaccttgctgctctgaatattaacaggcaattaaggcaaggtgctgtttcggtttggtggaccgcatgttgcagataataaattagttgttttgtcatttgcgtctctatcgactttgctagtttgcttcttttggccaccgcccaactagtcgctttcaagagaatttctagcgtgtcacttctttgcttctctctctctctggccacccctactagtcgctttcaagttttttgcttttctctgaaaatgctcgcatcctctatgacttcgtggtacaatcttttgggaacaaaagtgccaagacatgatagaagaatattccaaaacctaaatttcaggagcttgagta

SEQ ID NO: 76082 - DNA, 1657 bp, Zea Mays
ggcagcggcaatccaccctgcctctgcctgccacacggaaaggcctggcccagaccaatgcgcccgttttcactctagtgtagtgttgccacggccggaagaggaaccgctgtcggcctgctccacctccacggctccacctgtctgctctctgtctgtcccgcgtcctcctccgcagcacgacgaccgcatcgcgttctacgttctccgccctctccgctccccctactctgcttggtttcccagaagatttgattggtttccccaaatccggtgactccattcctgttgttcttcacgtcgaccccgggaacctcccagaaggctctagcgaccccggcgctctgagtgctgtgctgccggcggcgagatccaggagctgcctgccatggtgaaggacagcgcctactacgacgtcctaggggtcagcgtcgacgcgtcctccgccgagatcaagaaggcgtattacatcaaggcgaagctggtgcatccggacaagaatcccgggaaccctgacgccgcactcaagttccaggaacttggagaggcctatcaagttcttagtgatcctgggaaaaaggaggcttatgataagtatggaaaggagggtattccccaggataacatggtggatcctgctgctgtctttgggatgatttttggaagtgactattttgaagattacgttggccagcttgctctagcatctatagcctcagtagaggttgatgaaaactcaaacagtcaagaagcaagagcaaaggttcaagaaaagataaaagagttacaaagagagagagaacaaaagcttacccagagcctgaaagaccgacttcaaccatatgtagatgagagaaaggatgaatttgtgagctacgcaagcacagaagctaggcgtttatctgaagcagcatttggtgaggctatgcttcacactattgggtatatttacgtgcggcaagcagcaagagaacttgggaaaagtagaatttatatgggtgtaccgtttatagctgagtgggttagagacaaaggacaccacattaaatcacaggttaatgctgcttcaggtgctatttctctaatacaacttcaagaagggatgaaaaagatggaaggaagcgagaacagtgaagagcaacttatgaagagttttgaggagaaaaaagatgccatgcttagctcgctatggaaaattaatgtggttgatattgagtcaacactttcacgtgtctgccaagcagttctgagagataacacggtctccaaagatgtcctgaagctgcgagcgaaagcgttgaaaaagctcggaacgatattccaaggcgcaaaatctatgtaccgtcgtgaaaacagcctgcgcgttgaaacgagcacaaatcagcaagctaacccgtcacactgaagcccatggaccaccgtgtagcaagggatcggatttgatgtgagcatttaacacgaagctgtgaattgcgcttgatgcagcactataatctgtagctgtgtttttcttccaggattttaagcattgtatttgtatacttatgtgccaagtatgtcttgcttcatttcactctgaatcgctgatgtcctggccgttctgcaccttttcagggcacgggaattttccctgtataatttcaaagaaaaatcaaaa

SEQ ID NO: 76083 - DNA, 1106 bp, Zea Mays
cccacctcttctcttttaacctgcaacgtctaggaagaacaaattatggattactggaacggcactacaaactctctaggttaaaaactcaatagctctgaacatccagctatatccaattagccttgcgtcaatgccacagtctcattcagttgtagtcagtgttaaaaacatatctagggggtcagtttgcaatttcgcatgtagaaacagtacaatcggaatttcaaggcagaagttgcaatcaaaacccatgctgtgtgtgtgggcagaagcaggaagtaccacactcagtgcaacctgttagtcagccttgccagagtgtcacgcttcttactcggattttagaaaagcacataatgacgagggtaatttgtaacaaactgtgtcactgccacaacccatgaggttaccgacgtgctatacatacgggatagtctcctccacaacctagaaacaaatgtaaaagttcatctccagctcgaaattatgcttcgtgaaagtatacacagatgggaaagtctcctccgcaacctagaaacaaatgtaaaatccagctcgaaactaagcttcgtgaaagcaaagttcgttccttgcttcgacaacacatcacacgggcggaaaccctcaatccaagcctggagacggagagagagaaagagaaactaatttccccgaaccaaaccccaaacccgatcgtaagcatcaccaccccgcctagaaatcgaaccgacagggacacaggagcaatcgcgtcggaaccaacgaccaagtatcgccccccgcgcgttagatttagatccaggagagtgggaatgagggaacgcaccagatggagacgaggttaacgaagtttgcgaaggcgaaggcgaggagggcgacggcgagggggaagttgccgcctcctccgcccgcgccgatagcgcccgtgcccccggctccagcaaccaggtccgcggccgcggccgcccccgaggagaccgtggacggggccgtgccggcgccccccgcggcggtcaacatctcgctgcccctcatgccgctgggcctaggtgggtagtctggctcgctccgttccgtgcctcgtctcgtactctcgtccgtcg

SEQ ID NO: 76084 - DNA, 121 bp, Zea Mays
aggtagcgtacttgcgctcccggaaggagacgaggaggtgtacaggtcggccattccggatgcgcggtacaggcaggaccgaggggaagggaagagccttgccgaaagcgccggacgcgag

SEQ ID NO: 76085 - DNA, 852 bp, Zea Mays
ccttttcaccaatagcaccctggattagggtcatgtcggcagatatgctggagactacttgtccagtagtcatttctacatcaaagaatggcatatcctgtctgaggaccgacttgagatacaatgatcgaatacgagtagcctgcctctccccagtcattgtccaacatgatatctctggacttgcagactatatatagcttgcatagggggcagtaccttgctgactcggggaacaatggtgtccggggtggcgcccccaaaggcatcgaccatctgcccgaagatgatcgtcatgaccaccatcgacatgccgttgcccagcgccccaaccatgccggccagcatcagcagaacgtccgttctgtcggcacacttaaacatgctgtggaacggaaccttagccattgtcaccatcttctcgccactctcctccactttcccacccttcactgcatcgccagcggaagcttttacgacgctttcttctgccatgtcgtgcttggctgcctagcaccggctgggttctccctgctgcatatggctccggctgctctgctctatggagagttccttttgtagtgccgttctacaagcaacttgctttgcaggagctgtttgcctgttttctcgctttttctttatgttagctggatttgcaagaacgataatggcacagacaagcgtccaaactgactgacagaggtgctgggttcactgtggagtatcccgttgtaccgtagttgcttgcaagcattttttttaaaattaataatgtcgtgatctgttatccttagcttcagtcggcattcgagtcaaatctgttagattagttatgtttgatgcgacgat

SEQ ID NO: 76086 - DNA, 4341 bp, Zea Mays
cccgcctctgcttcctcccgccccgcgtgcgagagtccccggaatctgcactcccgcggccggcccccgccgctataaagcgcgccttgctctaccccagcgatgcaacgcccgtatcgtcgagcacgcggagccgaggagagagagggatggcctcaccagcaccagaagccctggaggaggaagagaagggagtggtgggtctgcaccggctgttccggttcgcggacggcgtggacgcggcgctcatggccgtgggggccgcgggggctgtcgccagcggcgtggcgcagccgctcatgacgctcgtcttcggcgaggtcgtcgacgccttcggctctgcgtcccgccatgacgtactgcaccgcgtctccggggtgtgcatcgaatctcgatcctcgttggactgatgaatgttagtgatgataaatctcgatctccggggtgcatcttatactgatgaaatattagttattcagatgctcaactattcgggtgatctggtattctgatcacacattcacatttcacacgggtagtgctagttactacttactactaagcacgtggcactccatagttcatttcgaacatgtgaagtaaattagtaaataaaataggactgttatccattgtactgcttgtgatcccattgtttgctggataacatcttcctgcgatggaaacagatgggattcatcctcgactaaaatcttttacactgctgtttcaggtgtgcctgaagttcttctatttggccattgggtcatggtttgtttgcttcctacaggttgcatgttggatgatcactggagaaagacaagcagctcgcatacgaggtctctatcttaaagctctattgagacaagacattgcattttttgacaaggaaatgaccactggacaattggttgagagtatgtccggagatacaatacttatccaggatgcaattggcgaaaaggttgggaagtttatacagcttactgccacatttgttggagggtttgcggttgctttctctaaaggatggcttttagctgctgttatgatgtcaagcgtccctcctatagtagttgctggagcagctatttcatggactgtatcgaaactggcgagccagggtcaagctaagtacaatgaagcaggcattgttgtggaacagacaattggagccatcagaacagttgcttccttcaatggtgagaatcgggccattgcgctgtacaataaatatatcaggaatgcatatgtagctgctgtccaagaaggaacggttactggcctgggcttcggttttgttatgcttattctgttctgtgcctatggtctaacagcatggtatggggcaaaactgattattgataaaggatatgaaggaggtcaggttgtaagtgtctggatggcattcatggcaggtgcaatgtcattaggtgaggcaacaccatgcgtgactgcttttgcttctggccgggctgctgggtatagaatgatgcagataatccaaaggaagccacaaattgatcctaatggaacagatgggatcgtgctagcaaacatgaagggtgatatagagctaagggatgtgtacttttcgtacccatctagacgtgatcaattggtatttgatggcttctcgctgcatgtaataagtgggaaaacaatggctatagtgggagagagtggcagtggaaagtccacagtgattaatcttgtggagagattctatgaccctcaggctggtgaagtttcaatagatggtgttaacataaaaagcctgaggcttggatggctaagggaaactattggtcttgttagtcaagaaccactgttgtttgccactagtattcgggagaacattgcctatgggaaagaagatgcaacagctgaggagataatggctgcaacaaagcttgctaatgcagcaaatttcatcgataagttaccatatggcctagacacaatggtcggtgagcatggagcacaattgtcaggagggcaaaaacaaagaattgcaatcacaagggcaatactgaaaaaccccaagatcttgctgcttgatgaagcaacaagtgcacttgatgtggagtctgagagagtggttcaggaggcccttaacagaattatggaaggcaagaccacgatcatagttgcccatcggttgagcactataaaagatgccgacactatatcagtcgtacatcgtggaaaagtagttgaactaggcacacacactgaactacttcaggaccccaatggtgcgtattcccagcttatccagctgcaggatagaactggagaaccagatacgtctgacatagattatcaaaggtctacttcagctgtcagaaatgtcgagtccttgagcaaatctatgcatactccatctctcaagaggtcaataattggtggcgcttcatttgggagtaccagtgcgcacttggtcgcaattgccaacacgattgtcccggagaacacagatactgaaccgctgcctaaagaatcggatgaaggtgaagaatgcaggaaggttgccctctgtcgtcttatttctctgaacaaacctgagatgccagtccttctgttaggtacagtggttgcagccatatcaggtgttttctttccaatgctaggtttattgatctccagttccatcaattcattttacgagcctcctcatcaactcaagaaagattcacggttctggacattgatgtacgtagcattaggagttggttcgtttattttcctgccggtggaacatttcctttttggagtagctggtggaaaattggttgaacgcgttcgctcgttatgttttcaaaggattgtttgccaagaaatcagctggtttgacaggccctcaaatgctagcggaaatgttggtgcaaggctgtctgttgatgcttcaaatatacgacgccttgtaggcgattcattggcattgatggttcgaagcacggttacagttattgctggatttgtcatcgcgatggctgcaaattggaggcttgcccttgttgccacggtagtgcttcctttggggggtctccagggattcctccaagtaaagttcttggagggattcagtgcagatgccaaggcaatgtatgaagaagcaacccaagtggcaaacgacgctgtcagtggtattcgaacaattgcttctttctgcgcggagcctaaggtaatgaagacctactatggaaaatgcaaagctccagtgcggcaggggatccgtcaaggcgttgtcagtggcttgggatttggcttgtcattcttcgtgctttactccacatatgccctctgcttctacgttggagcaaattttatgcttgatggcaaggccacgttcaccgatgtgttcagagtgttctttgctctgctcatggcgaccataggcgtttcacagacaagcgcgttaggtccaaactctgccaaggccaaagcatcagcatcaacaatatttgcactcattgacagtaaatcgaatatcgatcctagtagcgatgagggcatggtcttggctgacgtcactggcgaactcgagctccgccacatctgtttctcatacccatcccgccctggtacgcagatattcagagatctcaacttaagaataccatccgggaagacggttgtgcttgtcggggagagcggctgcggcaaatccaccgtcatcgctctcctggagaggttttacgaccctgattccggcacgatcacattggacggcgtggacatcaaagacctcaagacgggttggctgcggcggcagatggggctggtgagccaagagccggtcctgttcaacgacaccatccgcgcaaacatagcctacgggagagaaggcgaggcgacggaagaagagatcgtcgccgccgcggaggccgccaacgcgcacgagttcgtttcggcgctgccgcagggctacggcaccttggctggcgagaggggcgcccagctgtccggcgggcagaagcagcgggtggccatcgcgagggccgtgctgagggaccccaagatcctgctactcgacgaggcgacgagcgcgctggacgccgagtcggagcgcgccgtccaggaggcgctggaccgggcagcggtcggcaggaccacggtcgtggtggcgcaccggctgtccacgatcaggggcgccgacgtgatcgccgtgctcgggaacggcgaggtcgtcgcccagggcacgcacgagcagctcatggcggccagggccggcgtgtacgcgtcgctggtggagctccgcatgacttccgagcgcgccggagcttcctcctcgtcagcccccgatgtctgacaccacttgtacatgatcatgggacg

SEQ ID NO: 76087 - DNA, 714 bp, Zea Mays
atctttttttctattcccatttccattctcgcaccgcatccaccgcgccgccgcgagagagggtgagtactgaggaggagggtttccgatggagaacggcgaggatacgttcgcctcccccaccgccgccgccgcggacttctccaccaacggcggggacggcacgcccaagctccacgacgcggcggacgagatcgagtccctccgcgcggcgaagcgcgacctggaggagaagctcgatgccgtgcgccacgagaaccagttcctgtcctccgagtcccgccgccttgaggttctcgtgtcccaggcccgcgaggaggtcgccgccgccgagcaaggtgctgccaccaacgagagcgaggccgccacgctccgcagcgaggtcgagcgcctccaggatctcctcgccgcggagaaggctagccatgaggaggagatgcgcaggggtgcacggctcggggaccagctgcagaccgcgtaccaggagaaggccgccctcgaggaggagatcgagaccctgaagggttccgccactgccgagggcaagggcgtggaagagggatgtgattctattgctgccagggccgggacgcctaaggatcagggcgtggtgcctcccgcactggtggctgccgcggctgctggagcagctgccacggctggcatcgcagtggtcttgttcaacctcaagaggaaaagcgtgatggatggtag

SEQ ID NO: 76088 - DNA, 2210 bp, Zea Mays
gaaaagcagagcggcagactggcagaggcaggcgctctcggctctcctcgtggacaaaaccaccggctcccgatatccaaattggaacaggggattctgaacttggggtttgttccggggaccgattctggcatcggcagacgggatgtcagcccccctcgaccgacttgctaggccatggtttgtacataacgatgaaaggaaagagagcagatctgatgcagacaactcagaaggagataagaagactaagatcggatctttcaagaaaaaagcaattaacgcggggaacaaattcaggcattccctgagaaggagaagcaaaaagaagaccgaaaggggggattccatcaaggatataagggacattaaagaacttcaagatgttgagacatttcgacaatgcttaattgacgaggatttgctgccgccacagcatgacgattatcacatgatgttaagattcctaaaagcacggaaatttgatgttgagaaagctaagaatatgtggtcagacatgcttaaatggaggaaggaattcggggttgacaaaatagaggaatttgagtacgccgagttagatgaagttaaaaagtattacccacaattttatcatggggtagataaagagggaagacctgtctacatagaattaatagggaaagttgatgcgaacaagctagtacaagtgacaactctagatcggtatgtgaaataccatgtcaaggaatttgagaggtgcttccagatgagatttcctgcttgctccattgctgcaaaaaagcacatagattcgtcgacttctatttttgatgtgcaaggcgtgggtttcaagaacttctcaaaatctgccagggaattaatcacacgattacagaagatcgacaacgataactacccagagacattgtgccagatgtatataattaatgcgggccaaggcttcaagatgttatggagcacaataaaatcattccttgatccaaaaactgcttccaagattcatgttcttgggaataagtatcaacataagttgctcgaaataattgacgagtgtgaattgccagaatttcttggtggcaaatgcaagtgtattgaaggttgcgaaagatctgacaaaggtccttggaaggatcccaacataataaagagagtcctcaatggcgaggcgaactatggcaggcaaattgtgaccatatccagcactgatggaaggatagtcagttatgcttggccagtgcacccaaatagaaaaggcagtgatgcatctgccgagtctgggtctgaagtggaagacgtaacatctcctactgcatcaaggaacctgattacacatcctattttgacccctgttcacgaggagtcaaaattgtcggcacatggttcttcatctgttgttcatgcttctattggagaaaacattcctgttgtggacaagattgttgatgatggatggggtagtcccagatctagtccacaagctgcttcttcaggttctttgtccctgaggaatttgcatggcacatttgaaggactcagagctcaaactatcacatggctgacattcttgatgatgaccctttttgccatgctttgttctgtcccaagcaagatggctagaaggatctccaaccaatctgacggctgggtgagttggaggacaaggtgcaggtgcttgaaacgaagccgtctgagatgccgtttgaaaaggaagaattgctcaatgcagccgtccgccgtgtggatgcattggaagctgagctgatttccacaaagaaagccctttatgatgctttgatgcgacaggatgagctactcgcgtacattgataggcaggagctgatcaaatttcgtaaaaagaagttctgcttctaagatttgaccgtggagcagctgttcatgtccggagccgtttatgtgtatattggattgcggctaatatgtagtagaatgtaatgtgtccatctttagaagtgtgtaaagtatagtaggaaagaaaataggtgcgttgtggtgtgcgcctctcctccccgaggtgaatgtgtggtctagcacttgtgtgctaccctaaattgtaatcttggaagttggtgtatagctgattgcgtgctaatacgtagttgtaaatgaaatcgcatgtgctcgtgtttacatgaaaaactaaatatagcagcaccaaaaataaaaccggttatttggttagaatcata

SEQ ID NO: 76089 - DNA, 2206 bp, Zea Mays
ccgccacccattgaaaagcagagcggcagactggcagaggcaggcgctctcggctctcctcgtggacaaaaccaccggctcccgatatccaaattggaacaggggattctgaacttggggtttgttccggggaccgattctggcatcggcagacgggatgtcagcccccctcgaccgacttgctaggccatgttttgaagggtttgtacataacgatgaaaggaaagagagcagatctgatgcagacaactcagaaggagataagaagactaagatcggatctttcaagaaaaaagcaattaacgcggggaacaaattcaggcattccctgagaaggagaagcaaaaagaagaccgaaaggggggattccatcaaggatataagggacattaaagaacttcaagatgttgagacatttcgacaatgcttaattgacgaggatttgctgccgccacagcatgacgattatcacatgatgttaagattcctaaaagcacggaaatttgatgttgagaaagctaagaatatgtggtcagacatgcttaaatggaggaaggaattcggggttgacaaaatagaggaatttgagtacgccgagttagatgaagttaaaaagtattacccacaattttatcatggggtagataaagagggaagacctgtctacatagaattaatagggaaagttgatgcgaacaagctagtacaagtgacaactctagatcggtatgtgaaataccatgtcaaggaatttgagaggtgcttccagatgagatttcctgcttgctccattgctgcaaaaaagcacatagattcgtcgacttctatttttgatgtgcaaggcgtgggtttcaagaacttctcaaaatctgccagggaattaatcacacgattacagaagatcgacaacgataactacccagagacattgtgccagatgtatataattaatgcgggccaaggcttcaagatgttatggagcacaataaaatcattccttgatccaaaaactgcttccaagattcatgttcttgggaataagtatcaacataagttgctcgaaataattgacgagtgtgaattgccagaatttcttggtggcaaatgcaagtgtattgaaggttgcgaaagatctgacaaaggtccttggaaggatcccaacataataaagagagtcctcaatggcgaggcgaactatggcaggcaaattgtgaccatatccagcactgatggaaggatagtcagttatgcttggccagtgcacccaaatagaaaaggcagtgatgcatctgccgagtctgggtctgaagtggaagacgtaacatctcctactgcatcaaggaacctgattacacatcctattttgacccctgttcacgaggagtcaaaattgtcggcacatggttcttcatctgttgttcatgcttctattggagaaaacattcctgttgtggacaagattgttgatgatggatggggtagtcccagatctagtccacaagctgcttcttcaggttctttgtccctgaggaatttgcatggcacatttgaaggactcagagctcaaactatcacatggctgacattcttgatgatgaccctttttgccatgctttgttctgtcccaagcaagatggctagaaggatctccaaccaatctggtgcaggtgcttgaaacgaagccgtctgagatgccgtttgaaaaggaagaattgctcaatgcagccgtccgccgtgtggatgcattggaagctgagctgatttccacaaagaaagccctttatgatgctttgatgcgacaggatgagctactcgcgtacattgataggcaggagctgatcaaatttcgtaaaaagaagttctgcttctaagatttgaccgtggagcagctgttcatgtccggagccgtttatgtgtatattggattgcggctaatatgtagtagaatgtaatgtgtccatctttagaagtgtgtaaagtatagtaggaaagaaaataggtgcgttgtggtgtgcgcctctcctccccgaggtgaatgtgtggtctagcacttgtgtgctaccctaaattgtaatcttggaagttggtgtatagctgattgcgtgctaatacgtagttgtaaatgaaatcgcatgtgctcgtgtttacatgaaaaactaaatatagcagcaccaaaaataaaaccggttatttggttagaatcata

SEQ ID NO: 76090 - DNA, 2099 bp, Zea Mays
cccaacctccacctccaccgccacccattgaaaagcagagcggcagactggcagaggcaggcgctctcggctctcctcgtggacaaaaccaccggctcccgatatccaaattggaacaggggattctgaacttggggtttgttccggggaccgattctggcatcggcagacgggatgtcagcccccctcgaccgacttgctaggccatgttttgaagggtttgtacataacgatgaaaggaaagagagcagatctgatgcagacaactcagaaggagataagaagactaagatcggatctttcaagaaaaaagcaattaacgcggggaacaaattcaggcattccctgagaaggagaagcaaaaagaagaccgaaaggggggattccatcaaggatataagggacattaaagaacttcaagatgttgagacatttcgacaatgcttaattgacgaggatttgctgccgccacagcatgacgattatcacatgatgttaagattcctaaaagcacggaaatttgatgttgagaaagctaagaatatgtggtcagacatgcttaaatggaggaaggaattcggggttgacaaaatagagggtttcaagaacttctcaaaatctgccagggaattaatcacacgattacagaagatcgacaacgataactacccagagacattgtgccagatgtatataattaatgcgggccaaggcttcaagatgttatggagcacaataaaatcattccttgatccaaaaactgcttccaagattcatgttcttgggaataagtatcaacataagttgctcgaaataattgacgagtgtgaattgccagaatttcttggtggcaaatgcaagtgtattgaaggttgcgaaagatctgacaaaggtccttggaaggatcccaacataataaagagagtcctcaatggcgaggcgaactatggcaggcaaattgtgaccatatccagcactgatggaaggatagtcagttatgcttggccagtgcacccaaatagaaaaggcagtgatgcatctgccgagtctgggtctgaagtggaagacgtaacatctcctactgcatcaaggaacctgattacacatcctattttgacccctgttcacgaggagtcaaaattgtcggcacatggttcttcatctgttgttcatgcttctattggagaaaacattcctgttgtggacaagattgttgatgatggatggggtagtcccagatctagtccacaagctgcttcttcaggttctttgtccctgaggaatttgcatggcacatttgaaggactcagagctcaaactatcacatggctgacattcttgatgatgaccctttttgccatgctttgttctgtcccaagcaagatggctagaaggatctccaaccaatctggtaagcatgacgactatcatgttgagtatcctcaagagcaggagtgcaaggaggagtttcgacctccatctcctgccccatcctacacagaaaatgatgtgatttcatcgatgctgagacggctgggtgagttggaggacaaggtgcaggtgcttgaaacgaagccgtctgagatgccgtttgaaaaggaagaattgctcaatgcagccgtccgccgtgtggatgcattggaagctgagctgatttccacaaagaaagccctttatgatgctttgatgcgacaggatgagctactcgcgtacattgataggcaggagctgatcaaatttcgtaaaaagaagttctgcttctaagatttgaccgtggagcagctgttcatgtccggagccgtttatgtgtatattggattgcggctaatatgtagtagaatgtaatgtgtccatctttagaagtgtgtaaagtatagtaggaaagaaaataggtgcgttgtggtgtgcgcctctcctccccgaggtgaatgtgtggtctagcacttgtgtgctaccctaaattgtaatcttggaagttggtgtatagctgattgcgtgctaatacgtagttgtaaatgaaatcgcatgtgctcgtgtttacatgaaaaactaaatatagcagcaccaaaaataaaaccggttatttggttagaatcata

SEQ ID NO: 76091 - DNA, 2247 bp, Zea Mays
cgggacctcgcagcatctccctcgccccaccccaacctccacctccaccgccacccattgaaaagcagagcggcagactggcagaggcaggcgctctcggctctcctcgtggacaaaaccaccggctcccgatatccaaattggaacaggggattctgaacttggggtttgttccggggaccgattctggcatcggcagacgggatgtcagcccccctcgaccgacttgctaggccatgttttgaagggtttgtacataacgatgaaaggaaagagagcagatctgatgcagacaactcagaaggagataagaagactaagatcggatctttcaagaaaaaagcaattaacgcggggaacaaattcaggcattccctgagaaggagaagcaaaaagaagaccgaaaggggggattccatcaaggatataagggacattaaagaacttcaagatgttgagacatttcgacaatgcttaattgacgaggatttgctgccgccacagcatgacgattatcacatgatgttaagattcctaaaagcacggaaatttgatgttgagaaagctaagaatatgtggtcagacatgcttaaatggaggaaggaattcggggttgacaaaatagaggaatttgagtacgccgagttagatgaagttaaaaagtattacccacaattttatcatggggtagataaagagggaagacctgtctacatagaattaatagggaaagttgatgcgaacaagctagtacaagtgacaactctagatcggtatgtgaaataccatgtcaaggaatttgagaggtgcttccagatgagatttcctgcttgctccattgctgcaaaaaagcacatagattcgtcgacttctatttttgatgtgcaaggcgtgggtttcaagaacttctcaaaatctgccagggaattaatcacacgattacagaagatcgacaacgataactacccagagacattgtgccagatgtatataattaatgcgggccaaggcttcaagatgttatggagcacaataaaatcattccttgatccaaaaactgcttccaagattcatgttcttgggaataagtatcaacataagttgctcgaaataattgacgagtgtgaattgccagaatttcttggtggcaaatgcaagtgtattgaaggttgcgaaagatctgacaaaggtccttggaaggatcccaacataataaagagagtcctcaatggcgaggcgaactatggcaggcaaattgtgaccatatccagcactgatggaaggatagtcagttatgcttggccagtgcacccaaatagaaaaggcagtgatgcatctgccgagtctgggtctgaagtggaagacgtaacatctcctactgcatcaaggaacctgattacacatcctattttgacccctgttcacgaggagtcaaaattgtcggcacatggttcttcatctgttgttcatgcttctattggagaaaacattcctgttgtggacaagattgttgatgatggatggggtagtcccagatctagtccacaagctgcttcttcaggttctttgtccctgaggaatttgcatggcacatttgaaggactcagagctcaaactatcacatggctgacattcttgatgatgaccctttttgccatgctttgttctgtcccaagcaagatggctagaaggatctccaaccaatctggtgcttgaaacgaagccgtctgagatgccgtttgaaaaggaagaattgctcaatgcagccgtccgccgtgtggatgcattggaagctgagctgatttccacaaagaaagccctttatgatgctttgatgcgacaggatgagctactcgcgtacattgataggcaggagctgatcaaatttcgtaaaaagaagttctgcttctaagatttgaccgtggagcagctgttcatgtccggagccgtttatgtgtatattggattgcggctaatatgtagtagaatgtaatgtgtccatctttagaagtgtgtaaagtatagtaggaaagaaaataggtgcgttgtggtgtgcgcctctcctccccgaggtgaatgtgtggtctagcacttgtgtgctaccctaaattgtaatcttggaagttggtgtatagctgattgcgtgctaatacgtagttgtaaatgaaatcgcatgtgctcgtgtttacatgaaaaactaaatatagcagcaccaaaaataaaaccggttatttggttagaatcata

SEQ ID NO: 76092 - DNA, 2329 bp, Zea Mays
gccgggtccactcgggaagtgaccgggacctcgcagcatctccctcgccccaccccaacctccacctccaccgccacccattgaaaagcagagcggcagactggcagaggcaggcgctctcggctctcctcgtggacaaaaccaccggctcccgatatccaaattggaacaggggattctgaacttggggtttgttccggggaccgattctggcatcggcagacgggatgtcagcccccctcgaccgacttgctaggccatgttttgaagggtttgtacataacgatgaaaggaaagagagcagatctgatgcagacaactcagaaggagataagaagactaagatcggatctttcaagaaaaaagcaattaacgcggggaacaaattcaggcattccctgagaaggagaagcaaaaagaagaccgaaaggggggattccatcaaggatataagggacattaaagaacttcaagatgttgagacatttcgacaatgcttaattgacgaggatttgctgccgccacagcatgacgattatcacatgatgttaagattcctaaaagcacggaaatttgatgttgagaaagctaagaatatgtggtcagacatgcttaaatggaggaaggaattcggggttgacaaaatagaggaatttgagtacgccgagttagatgaagttaaaaagtattacccacaattttatcatggggtagataaagagggaagacctgtctacatagaattaatagggaaagttgatgcgaacaagctagtacaagtgacaactctagatcggtatgtgaaataccatgtcaaggaatttgagaggtgcttccagatgagatttcctgcttgctccattgctgcaaaaaagcacatagattcgtcgacttctatttttgatgtgcaaggcgtgggtttcaagaacttctcaaaatctgccagggaattaatcacacgattacagaagatcgacaacgataactacccagagacattgtgccagatgtatataattaatgcgggccaaggcttcaagatgttatggagcacaataaaatcattccttgatccaaaaactgcttccaagattcatgttcttgggaataagtatcaacataagttgctcgaaataattgacgagtgtgaattgccagaatttcttggtggcaaatgcaagtgtattgaaggttgcgaaagatctgacaaaggtccttggaaggatcccaacataataaagagagtcctcaatggcgaggcgaactatggcaggcaaattgtgaccatatccagcactgatggaaggatagtcagttatgcttggccagtgcacccaaatagaaaaggcagtgatgcatctgccgagtctgggtctgaagtggaagacgtaacatctcctactgcatcaaggaacctgattacacatcctattttgacccctgttcacgaggagtcaaaattgtcggcacatggttcttcatctgttgttcatgcttctattggagaaaacattcctgttgtggacaagattgttgatgatggatggggtagtcccagatctagtccacaagctgcttcttcaggttctttgtccctgaggaatttgcatggcacatttgaaggactcagagctcaaactatcacatggctgacattcttgatgatgaccctttttgccatgctttgttctgtcccaagcaagatggctagaaggatctccaaccaatctgaaaatgatgtgatttcatcgatgctgagacggctgggtgagttggaggacaaggtgcaggtgcttgaaacgaagccgtctgagatgccgtttgaaaaggaagaattgctcaatgcagccgtccgccgtgtggatgcattggaagctgagctgatttccacaaagaaagccctttatgatgctttgatgcgacaggatgagctactcgcgtacattgataggcaggagctgatcaaatttcgtaaaaagaagttctgcttctaagatttgaccgtggagcagctgttcatgtccggagccgtttatgtgtatattggattgcggctaatatgtagtagaatgtaatgtgtccatctttagaagtgtgtaaagtatagtaggaaagaaaataggtgcgttgtggtgtgcgcctctcctccccgaggtgaatgtgtggtctagcacttgtgtgctaccctaaattgtaatcttggaagttggtgtatagctgattgcgtgctaatacgtagttgtaaatgaaatcgcatgtgctcgtgtttacatgaaaaactaaatatagcagcaccaaaaataaaaccggttatttggttagaatcata

SEQ ID NO: 76093 - DNA, 2283 bp, Zea Mays
agccgggtccactcgggaagtgaccgggacctcgcagcatctccctcgccccaccccaacctccacctccaccgccacccattgaaaagcagagcggcagactggcagaggcaggcgctctcggctctcctcgtggacaaaaccaccggctcccgatatccaaattggaacaggggattctgaacttggggtttgttccggggaccgattctggcatcggcagacgggatgtcagcccccctcgaccgacttgctaggccatgttttgaagggtttgtacataacgatgaaaggaaagagagcagatctgatgcagacaactcagaaggagataagaagactaagatcggatctttcaagaaaaaagcaattaacgcggggaacaaattcaggcattccctgagaaggagaagcaaaaagaagaccgaaaggggggattccatcaaggatataagggacattaaagaacttcaagatgttgagacatttcgacaatgcttaattgacgaggatttgctgccgccacagcatgacgattatcacatgatgttaagattcctaaaagcacggaaatttgatgttgagaaagctaagaatatgtggtcagacatgcttaaatggaggaaggaattcggggttgacaaaatagaggaatttgagtacgccgagttagatgaagttaaaaagtattacccacaattttatcatggggtagataaagagggaagacctgtctacatagaattaatagggaaagttgatgcgaacaagctagtacaagtgacaactctagatcggtatgtgaaataccatgtcaaggaatttgagaggtgcttccagatgagatttcctgcttgctccattgctgcaaaaaagcacatagattcgtcgacttctatttttgatgtgcaaggcgtgggtttcaagaacttctcaaaatctgccagggaattaatcacacgattacagaagatcgacaacgataactacccagagacattgtgccagatgtatataattaatgcgggccaaggcttcaagatgttatggagcacaataaaatcattccttgatccaaaaactgcttccaagattcatgttcttgggaataagtatcaacataagttgctcgaaataattgacgagtgtgaattgccagaatttcttggtggcaaatgcaagtgtattgaaggttgcgaaagatctgacaaaggtccttggaaggatcccaacataataaagagagtcctcaatggcgaggcgaactatggcaggcaaattgtgaccatatccagcactgatggaaggatagtcagttatgcttggccagtgcacccaaatagaaaaggcagtgatgcatctgccgagtctgggtctgaagtggaagacgtaacatctcctactgcatcaaggaacctgattacacatcctattttgacccctgttcacgaggagtcaaaattgtcggcacatggttcttcatctgttgttcatgcttctattggagaaaacattcctgttgtggacaagattgttgatgatggatggggtagtcccagatctagtccacaagctgcttcttcaggttctttgtccctgaggaatttgcatggcacatttgaaggactcagagctcaaactatcacatggctgacattcttgatgatgaccctttttgccatgctttgttctgtcccaagcaagatggctagaaggatctccaaccaatctggacaaggtgcaggtgcttgaaacgaagccgtctgagatgccgtttgaaaaggaagaattgctcaatgcagccgtccgccgtgtggatgcattggaagctgagctgatttccacaaagaaagccctttatgatgctttgatgcgacaggatgagctactcgcgtacattgataggcaggagctgatcaaatttcgtaaaaagaagttctgcttctaagatttgaccgtggagcagctgttcatgtccggagccgtttatgtgtatattggattgcggctaatatgtagtagaatgtaatgtgtccatctttagaagtgtgtaaagtatagtaggaaagaaaataggtgcgttgtggtgtgcgcctctcctccccgaggtgaatgtgtggtctagcacttgtgtgctaccctaaattgtaatcttggaagttggtgtatagctgattgcgtgctaatacgtagttgtaaatgaaatcgcatgtgctcgtgtttacatgaaaaactaaatatagcagcaccaaaaataaaaccggttatttggttagaatcata

SEQ ID NO: 76094 - DNA, 2516 bp, Zea Mays
gtccgacctggccaacccctcctccacgcgtcacatcaccggcacactctccttgaacgcggtctacggttcacggccactgttccgtggtccccacagaaatcgtgccaggcccagggcacgcgcctccgaatccaaatgtaaacgagcctaccagacacaccgaataaggtccatgggcacagctcaaccgttcggctggtccgggtgcatgagccgggtccactcgggaagtgaccgggacctcgcagcatctccctcgccccaccccaacctccacctccaccgccacccattgaaaagcagagcggcagactggcagaggcaggcgctctcggctctcctcgtggacaaaaccaccggctcccgatatccaaattggaacaggggattctgaacttggggtttgttccggggaccgattctggcatcggcagacgggatgtcagcccccctcgaccgacttgctaggccatgttttgaagggtttgtacataacgatgaaaggaaagagagcagatctgatgcagacaactcagaaggagataagaagactaagatcggatctttcaagaaaaaagcaattaacgcggggaacaaattcaggcattccctgagaaggagaagcaaaaagaagaccgaaaggggggattccatcaaggatataagggacattaaagaacttcaagatgttgagacatttcgacaatgcttaattgacgaggatttgctgccgccacagcatgacgattatcacatgatgttaagattcctaaaagcacggaaatttgatgttgagaaagctaagaatatgtggtcagacatgcttaaatggaggaaggaattcggggttgacaaaatagaggaatttgagtacgccgagttagatgaagttaaaaagtattacccacaattttatcatggggtagataaagagggaagacctgtctacatagaattaatagggaaagttgatgcgaacaagctagtacaagtgacaactctagatcggtatgtgaaataccatgtcaaggaatttgagaggtgcttccagatgagatttcctgcttgctccattgctgcaaaaaagcacatagattcgtcgacttctatttttgatgtgcaaggcgtgggtttcaagaacttctcaaaatctgccagggaattaatcacacgattacagaagatcgacaacgataactacccagagacattgtgccagatgtatataattaatgcgggccaaggcttcaagatgttatggagcacaataaaatcattccttgatccaaaaactgcttccaagattcatgttcttgggaataagtatcaacataagttgctcgaaataattgacgagtgtgaattgccagaatttcttggtggcaaatgcaagtgtattgaaggttgcgaaagatctgacaaaggtccttggaaggatcccaacataataaagagagtcctcaatggcgaggcgaactatggcaggcaaattgtgaccatatccagcactgatggaaggatagtcagttatgcttggccagtgcacccaaatagaaaaggcagtgatgcatctgccgagtctgggtctgaagtggaagacgtaacatctcctactgcatcaaggaacctgattacacatcctattttgacccctgttcacgaggagtcaaaattgtcggcacatggttcttcatctgttgttcatgcttctattggagaaaacattcctgttgtggacaagattgttgatgatggatggggtagtcccagatctagtccacaagctgcttcttcaggttctttgtccctgaggaatttgcatggcacatttgaaggactcagagctcaaactatcacatggctgacattcttgatgatgaccctttttgccatgctttgttctgtcccaagcaagatggctagaaggatctccaaccaatctgacggctgggtgagttggaggacaaggtgcaggtgcttgaaacgaagccgtctgagatgccgtttgaaaaggaagaattgctcaatgcagccgtccgccgtgtggatgcattggaagctgagctgatttccacaaagaaagccctttatgatgctttgatgcgacaggatgagctactcgcgtacattgataggcaggagctgatcaaatttcgtaaaaagaagttctgcttctaagatttgaccgtggagcagctgttcatgtccggagccgtttatgtgtatattggattgcggctaatatgtagtagaatgtaatgtgtccatctttagaagtgtgtaaagtatagtaggaaagaaaataggtgcgttgtggtgtgcgcctctcctccccgaggtgaatgtgtggtctagcacttgtgtgctaccctaaattgtaatcttggaagttggtgtatagctgattgcgtgctaatacgtagttgtaaatgaaatcgcatgtgctcgtgtttacatgaaaaactaaatatagcagcaccaaaaataaaaccggttatttggttagaatcata

SEQ ID NO: 76095 - DNA, 1891 bp, Zea Mays
aaaaaagataaaccctacttgtacctggccggcccaggtgctttcccaccctgcgacagcccatctcctctccctccttgcttttctctatactccatgccaggtgggccccctagccaaaagcgctcctgttcttcttcaaccgcgcgtgagcaccgccacaaccaaccggaaatctaggtgttctgttaaacaaatcccaacaaattctttctcccccacccggctctacaacagagtacaaatttgtgaccggcttgcacccccttggccatcaattacataaaatctcggccattaccgaaggaagagcgcagagacataaaggatgccgttgcagttaaattcgaggaggaatggagcagatgccttgcagagaccatggatgtgatcaccagtgtctttctaacccgtttggcttatcggcgggctcggaaatgggctggcgtgatcggaattcgtcgtcagagtagtgatgccgctgcgcaccgcgcggttccgcgggtcggggtcatcacttcatcatcccagcgaggatacgagtcaattgaagagcaagttagtaccttgaatctcaagtcttaggcaagttgtgcccttgatcacttctttttacccagtcatgttttattaatcataatgatctgcataggttaattttgatgggacccaataggttaccctagtttagctatctttataccttgtttaccgctgaaatttttgggtagtacctgctattgctttatgtggttttgggtatagagatacacattatttatgatcctacttttaatatcagtttgttatttactattcatgataagatcattatgttaattggaacatggagaaccactcgggaaaatagtgctaccacaagggtggtatgagacgaccttagctgattaattaggaaagctagtggaggactaccttacccgaaaggggcaagggcagtaggggagtggtcagtgtagggaggcccttgggttgattttgctgcgtggcggtcaggcgaggggtccctacattggagcttcctagaaactgtagcgggttttctgaagctagtggaactttgtaaaggcctcatagtgttactctgcctcgcctcctcagtagaggtgtatgggaagtcgcgatcacttggcagatgggtaacatgacttgtgggtaaagatgtgcaacctctgcagaatgtaaaactggtatactagccgtgctcacggtcatgagcagctcggacactcacatgattaacttatggatttaaattcaatttgtcatttgtatcgcattgggatttattattattttgaatttctattactatggtttggtatttacttacacttagtaactgctaataaaattttgaccaacttataaaagcaatgctcatctttaaccatcctctttggtaagccttacacttacatgagctcccacctttggcgagttcatgcacattattccccacaccttgttgagcgatgaacgtatgtgagctcactcttgctgtctcacaccctcataggtcaagaacaggtaccgcaggataaggcatatggaggatgttgtgatgagttcgtgagaggtctaggccgtcgtctcccagtcaactttggattgctggatcgttgtctccttatgatgtaattatttattttgtgcatatctcctattatatagtaaagatgtgacattcgtttctgtaccacgattcatcatatgtgtgagacttggtcccagcaaacctggtgattaatttgtgcctgggtcttggtgcccccgaaactcaggtgtgacacatagatatgtgtattgaaggacagaggcttgactgcttaagctgttgttgtcgactttgttttcaagaatattcagc

SEQ ID NO: 76096 - DNA, 2951 bp, Zea Mays
aaaaaagataaaccctacttgtacctggccggcccaggtgctttcccaccctgcgacagcccatctcctctccctccttgcttttctctatactccatgccaggtgggccccctagccaaaagcgctcctgttcttcttcaaccgcgcgtgagcaccgccacaaccaaccggaaatctaggtgttctgttaaacaaatcccaacaaattctttctcccccacccggctctacaacagagtacaaatttgtgaccggcttgcacccccttggccatcaattacataaaatctcggccattaccgaaggaagagcgcagagacataaaggatgccgttgcagttaaattcgaggaggaatggagcagatgccttgcagagaccatggatgtgatcaccagtgtctttctaacccgtttggcttatcggcgggctcggaaatgggctggcgtgatcggaattcgtcgtcagagtagtgatgccgctgcgcaccgcgcggttccgcgggtcggggtcatcacttcatcatcccaggtaaaaagccaaccgataggatcgttgcgttgcgagcatcgtagcacggttacagatgtagttgggaccttggcacgctggtttgccgttcttcggcgggtgcgccgccacgaggtggccagctccaccatctagggtctcgggtggggaagaaggtgccatcatcatcgatctgttcgcggacggctgggatcgtactaggcatccggtttggccagatccgattgggaccgtagattgcgaatcgagtggttgtggttggtttgagttttcataaaatctgggccatcgggtctcaatccagtggctcatagcgcataccgtttcgggtagctgaaaatctaatccggggcatagatttcggatccaacggctgaaatcagtccatacctcttcggccgcgtgttcttgctaaaaagtccctcaacctttaacaaatcaaccagccgtcccgatttgcatgattgggtcctcggctgggtgcttaaaaattacaaagtgatcccaggaagtttacagaaacacccatggatgctaattctggtataaaataaatattaaattacctagaaacttagacaattcataacttttgcattccacctctgatttgatccgttcgaattgcgttagattcataataatatcccctatacagtatggcactaacttttatcacaccccataattttattattagaaatttgtctagcctatgtttaatagattaactcttctaatcaaagtttacatgtccataattataatttgactaaaatacgatctcgagtcaagttataatttagattaaaatggagttaattttttgaagtatgttatcccatatggcgtataataaccaaattatactatggtttaatatttaatcacttaaatcttccataaactatatctttctaattgtaactccgaatttagtgattctcgagcctacgatctcgtagcgatgcgtagaatattattatacggtttgttcttatggttggtgtaatgttaattttgtctatatcatgtttgtttgtattgctacgactagcagcgaggatacgagtcaattgaagagcaagttagtaccttgaatctcaagtcttaggcaagttgtgcccttgatcacttctttttacccagtcatgttttattaatcataatgatctgcataggttaattttgatgggacccaataggttaccctagtttagctatctttataccttgtttaccgctgaaatttttgggtagtacctgctattgctttatgtggttttgggtatagagatacacattatttatgatcctacttttaatatcagtttgttatttactattcatgataagatcattatgttaattggaacatggagaaccactcgggaaaatagtgctaccacaagggtggtatgagacgaccttagctgattaattaggaaagctagtggaggactaccttacccgaaaggggcaagggcagtaggggagtggtcagtgtagggaggcccttgggttgattttgctgcgtggcggtcaggcgaggggtccctacattggagcttcctagaaactgtagcgggttttctgaagctagtggaactttgtaaaggcctcatagtgttactctgcctcgcctcctcagtagaggtgtatgggaagtcgcgatcacttggcagatgggtaacatgacttgtgggtaaagatgtgcaacctctgcagaatgtaaaactggtatactagccgtgctcacggtcatgagcagctcggacactcacatgattaacttatggatttaaattcaatttgtcatttgtatcgcattgggatttattattattttgaatttctattactatggtttggtatttacttacacttagtaactgctaataaaattttgaccaacttataaaagcaatgctcatctttaaccatcctctttggtaagccttacacttacatgagctcccacctttggcgagttcatgcacattattccccacaccttgttgagcgatgaacgtatgtgagctcactcttgctgtctcacaccctcataggtcaagaacaggtaccgcaggataaggcatatggaggatgttgtgatgagttcgtgagaggtctaggccgtcgtctcccagtcaactttggattgctggatcgttgtctccttatgatgtaattatttattttgtgcatatctcctattatatagtaaagatgtgacattcgtttctgtaccacgattcatcatatgtgtgagacttggtcccagcaaacctggtgattaatttgtgcctgggtcttggtgcccccgaaactcaggtgtgacacatagatatgtgtattgaaggacagaggcttgactgcttaagctgttgttgtcgactttgttttcaagaatattcagc

SEQ ID NO: 76097 - DNA, 3151 bp, Zea Mays
atgaagagcggcaccgcctccgcgcccagcggcggcggcggcggcctggcgatcaccgagcggcagaagccggcgccgtcgcgcgtggcggcgctgttccagatgttcgccaagaggaagctcttctcctcgtcctccaagaagagcaagctgctgcccccagtgcgcgcgcacaagttctctcctgggagaccgctggccggcggcgacaagacgaggccccttctgattgattctgcagattactcaagaagcagaactgaatgcaacggcaccagtcactacccacagccacaacctggccaagacagaaactgcagcgagaatggaatgcgtgctcccggggtggttgcccggctgatgggtctgagctcgatgccggctgctgcgagccatcaacggcagaccagagccaccacaaactcccctgaacccggtgaccactggaattcaggccgtcaagatcggtctggttcgtctcgtggcatatacacatcacctcagcagcagcagcagcagaagacaaggcagcagcccgtagacgatcggcaccatggcaatgcaggtcagttcagtgctccagatacacggccattgtggccacgaaggcatgcacacagagcagcctcgcctgtcaagagcccaaggtcattgtcaagcaggaacagggctcggctgatcgaagcagcggtcagggttctggagcctggtttgcagtccaggaaccgccgtctctctaagaggcatgcgtatctggaatacccatgcagcaacggtgatggtgcgcccagttctgctgctgctgctgctgtccgacataatgtctccgatcagttcttgagaaatatttgtgatgctgacataccggcatcaggtgctcacaatctaggagctgcctctctgcacaactctatttctaatcggaggactgaagaagatacttgtaagaagagcattccaccgagtaggaggtcagaccagagcacatcatgtcagttgcaacctgagtacttgctcatcggctcaactgagaaggccgctggattcgctgatacaaaccaagacgcaccgagagaacagctgaagagcaacatatcccgggacagtgctcctcgtggccctctcaagcaaaacaacctgaagcagaatgcactgcccgcggcagatccagggtgtgtgatacaaagcaagaagcatggaagcggggagcgaaacgtgagaaacagaacccaggacttcgtttctctgaacaaaaggatggatggcagtgcgtctttgaggtcgaaaagaaaggcgcttgatagattcggcgagccacgttgtagtgcagaggacaggaacatgatgagcacgaaaggttgccgagccagcagccttcatggtggaacctctaacaagctggagctgaggactggaacaccaaaagctatggtaactgcaaaaggagcagggttaatcagcgagaagccgaagcctgccagtccaaaccgtgcaagaagtggtttacagagacagacagtgccacacaacgtttcaagggctaacaaagaaccaggcaccatctctctcacttccggttcaccggtgaaagctgcgcgtggtgacagtgctagtggaactggagctggtaccgctgttcaagttgatagttgccctgagagacgctctcgtagagactgtcagaagacgtgtcctcaaggagagatagttttctgggaagatttgaagcgcacatcaaatccgtcgcacactgaacccgggttctccagccaagatgaagtgaagaatagagtgattcttggtggtacagcagcctcttctttgtctgggaagaagagtggtggccaagttacagaggaatccttaagtgagggactgctcaggcagcgcaactcgctggactgtgcggtttacgacaacaaagacccttatgaagtggctagcttgcgtggaactcgctggtgcaaaaggtagcaagccatctccatctccatgtatatccagtcctacatctactcctcactctggacatgctggtgatgcctgcgttcctggtattccacgccgtactgcagcagaagctacctccaccaccagccatccatggcaagatacagctgccgagagaaaccccagaggcggcgatcctaacaactctggccaacatggcgtccaatttcagacatctgaaccccacgctggggaggctacgatcacaacatctgtcgaactgctgctagcaaacgtccgcgcgtccactactccacgtaaaccagaggaatcacccaaggcgttccttctccggacgaccgagcgcgctctcgccgccttgacggccggctccaagcagggcttcggcagcaccgccatcgagggcaagggagcgagcccgctgaggaacctcgcgctcgactgcgtctgggactgcctggactcgacgtgctctcggctctgcgactccggctacaggtcgttctcggagctgctcgctctggtctgcaccgagaagaggcttgcggacagggtcgggaaggaggtcgcgaggtgctgtggcgcggctgggaagggcttagacgagctggccgtgggcgaggtggagcgcgccgtggaggccggcatgggttcttccatgctcgaagcggttcagatcggggcccagattgagcaggatctggtccaggacctaatagatgaaattggagcagatgtgttcaggcgttggtgactaaatatatttctgtaacagtgtaacatgaagacatataaatctggtaaaattggatccataccattaaaagatcccatctatagctatgtaccatcaaaagattgatgtattgaaatataccattaaaagatagcacttcatagctgtttaccatctctgttatctctcagttatctgtgaccatttccttggtgagaaaaagtaaatatagctacaatccataatcattccagcagtaatatagatgcgttgcaactctcatttcagcaacattacagaaataaagaggacatgatttcagcaggatatgcccaggatataacataacatttcagtacatatataactgaactttgttgtcatttcagtacctaaattgcagcttacagttcttgcaattttgacaacagaagtaccacaaac

SEQ ID NO: 76098 - DNA, 3713 bp, Zea Mays
cgcaaccccctcctctcctctccgttctccactcaccactcaccaggctccagcagttgaataaataaataatctgctatcttgctctcgatcactccaactctgcaaagagcgtttgcttttgctggtagtccctcccagttttagtttataagacgagttcaagaggagttacagtccagtagtcatatcttgaacaagagtcacagcagcggctttgcttctcttttgttctctagcatctgtccatgattgttcatggggggtggggaggtgctggcatggacttttgggcatttactgatcccctcattctcaagatgcatgcagcaagtcgagaactggaggtggcgataaatgcctcaacaagtcaagaggagagagaaacctgcagcgtctgttcagcatctttttttgcttgtttgcatttattatttcgacgtctgtaagggagtgagacatccgaggttctagaggagacgcattgcagcacaaggcttggggagaattgagtttttagtttctctttttggtcgtggcgcggggacatgaagagcggcaccgcctccgcgcccagcggcggcggcggcggcctggcgatcaccgagcggcagaagccggcgccgtcgcgcgtggcggcgctgttccagatgttcgccaagaggaagctcttctcctcgtcctccaagaagagcaagctgctgcccccagtgcgcgcgcacaagttctctcctgggagaccgctggccggcggcgacaagacgaggccccttctgattgattctgcagattactcaagaagcagaactgaatgcaacggcaccagtcactacccacagccacaacctggccaagacagaaactgcagcgagaatggaatgcgtgctcccggggtggttgcccggctgatgggtctgagctcgatgccggctgctgcgagccatcaacggcagaccagagccaccacaaactcccctgaacccggtgaccactggaattcaggccgtcaagatcggtctggttcgtctcgtggcatatacacatcacctcagcagcagcagcagcagaagacaaggcagcagcccgtagacgatcggcaccatggcaatgcaggtcagttcagtgctccagatacacggccattgtggccacgaaggcatgcacacagagcagcctcgcctgtcaagagcccaaggtcattgtcaagcaggaacagggctcggctgatcgaagcagcggtcagggttctggagcctggtttgcagtccaggaaccgccgtctctctaagaggcatgcgtatctggaatacccatgcagcaacggtgatggtgcgcccagttctgctgctgctgctgctgtccgacataatgtctccgatcagttcttgagaaatatttgtgatgctgacataccggcatcaggtgctcacaatctaggagctgcctctctgcacaactctatttctaatcggaggactgaagaagatacttgtaagaagagcattccaccgagtaggaggtcagaccagagcacatcatgtcagttgcaacctgagtacttgctcatcggctcaactgagaaggccgctggattcgctgatacaaaccaagacgcaccgagagaacagctgaagagcaacatatcccgggacagtgctcctcgtggccctctcaagcaaaacaacctgaagcagaatgcactgcccgcggcagatccagggtgtgtgatacaaagcaagaagcatggaagcggggagcgaaacgtgagaaacagaacccaggacttcgtttctctgaacaaaaggatggatggcagtgcgtctttgaggtcgaaaagaaaggcgcttgatagattcggcgagccacgttgtagtgcagaggacaggaacatgatgagcacgaaaggttgccgagccagcagccttcatggtggaacctctaacaagctggagctgaggactggaacaccaaaagctatggtaactgcaaaaggagcagggttaatcagcgagaagccgaagcctgccagtccaaaccgtgcaagaagtggtttacagagacagacagtgccacacaacgtttcaagggctaacaaagaaccaggcaccatctctctcacttccggttcaccggtgaaagctgcgcgtggtgacagtgctagtggaactggagctggtaccgctgttcaagttgatagttgccctgagagacgctctcgtagagactgtcagaagacgtgtcctcaaggagagatagttttctgggaagatttgaagcgcacatcaaatccgtcgcacactgaacccgggttctccagccaagatgaagtgaagaatagagtgattcttggtggtacagcagcctcttctttgtctgggaagaagagtggtggccaagttacagaggaatccttaagtgagggactgctcaggcagcgcaactcgctggactgtgcggtttacgacaacaaagacccttatgaagtggctagcttgcgtggaactcgtaagaagaaacatgcggctggtgcaaaaggtagcaagccatctccatctccatgtatatccagtcctacatctactcctcactctggacatgctggtgatgcctgcgttcctggtattccacgccgtactgcagaagctacctccaccaccagccatccatggcaagatacagctgccgagagaaaccccagaggcggcgatcctaacaactctggccaacatggcgtccaatttcagacatctgaaccccacgctggggaggctacgatcacaacatctgtcgaactgctgctagcaaacgtccgcgcgtccactactccacgtaaaccagaggaatcacccaaggcgttccttctccggacgaccgagcgcgctctcgccgccttgacggccggctccaagcagggcttcggcagcaccgccatcgagggcaagggagcgagcccgctgaggaacctcgcgctcgactgcgtctgggactgcctggactcgacgtgctctcggctctgcgactccggctacaggtcgttctcggagctgctcgctctggtctgcaccgagaagaggcttgcggacagggtcgggaaggaggtcgcgaggtgctgtggcgcggctgggaagggcttagacgagctggccgtgggcgaggtggagcgcgccgtggaggccggcatgggttcttccatgctcgaagcggttcagatcggggcccagattgagcaggatctggtccaggacctaatagatgaaattggagcagatgtgttcaggcgttggtgactaaatatatttctgtaacagtgtaacatgaagacatataaatctggtaaaattggatccataccattaaaagatcccatctatagctatgtaccatcaaaagattgatgtattgaaatataccattaaaagatagcacttcatagctgtttaccatctctgttatctctcagttatctgtgaccatttccttggtgagaaaaagtaaatatagctacaatccataatcattccagcagtaatatagatgcgttgcaactctcatttcagcaacattacagaaataaagaggacatgatttcagcaggatatgcccaggatataacataacatttcagtacatatataactgaactttgttgtcatttcagtacctaaattgcagcttacagttcttgcaattttgacaacagaagtaccacaaac

SEQ ID NO: 76099 - DNA, 1763 bp, Zea Mays
gcggtctcaaaaccttctcgcctcctcctacccctcggccggcctcgcctcacacgctcgctctcgccgcctcgtcggcgacgcacgcacccgaccgccgccgcgagctggagtgacggccatggcggcgacggcagatccgcgggcgaagcctacggcagcggcggcgcaccacctagccgttccgtgggcgcatcaggcgtcgccagccgcacaccgcatgccgccgcccgtcttagccgcggccgcgggcggcggtggctgcggcgcccgcgatcgccaccggtcgtcgtcggcccaccgccaagtccaggccgtcggggaggacaacccgtacgacggtgggatcgaggcgctccgggccaagctcatgggccacctgcgcgacgcggcggaccggctccgcgtgccccagcctctctggagcctcgccgcctcgcgcccgccttatcctcgccctccgccgcccaaggctgctaccgcgagctcgccgccgccgcccggtacggactccgagcccgagctcagggcgccgcctccgcttcggcctcctacacctgcgcccccgcaagcggaagctgccgtcgcgactgcgaccgggaggccgtggaacctgcgggagcgcacgcggcggcgccccgcctccaccaggtcgtgggccgcgtccccgccgcctccgtcgtcgtcgtcgcggaggcggcgcaagcgcgccccgttctccgtgtccctgaaggcggaggagatcgaggaggacatctacgcgctcaccggctcccggccgcggcggcggcctcggaagcggccgcgcgccgtgcagcggcacgtcgattcgctgttcccggggctgtggctgaccgagatcaccgctgacgcgtaccgagtgccggacgagtagctccacgagtgacgagtccagcactccagcttgatgctgctgccccagccaaccggccagcagagcgcgcaagctccaacttgatccagggcatcgtccagcgagccaactagcatcctcccgagctttgtttgtttttttcctcccctcgcccttccctctcctcagtcctcactcgtcgtctggtctctgcttgctgcctctactgtggtctgtacagtgaagtgtttgtgattacaactagtgctaatctactgtcagctcttccatccgttacctgatgactgctagctactctgtgcgctgttgagtgttcgtcaccgttgtcgtccagctccagcgcgccgcctttacgtgtcagcctgtcccactcccgagctctcgatccacccattttttcgagctagtagtacgctgccacagcccacagccagcacctggcaagcctgcacagggccgtgtctggtggtgccgtgtcgttgaggagtcggagacgggtgccgagagccgagagccgagagtcggagaccggtgtgttcctcgtcctcgttgtcgaggtcaaggtctcaatactatggatcttgacccggctgcagaggatgaggaggcggagcgacaacttgaggaccacaatgaggcgatggatgctagacaagccttattgggtgttggtgtcactcatttagatccagtcgacctcgaggatttcgtcgcctctagaacaggcactggcactgctacggactccacgagcccaccagcatctaccactgcctctgctggtggcggctcaaggaagagatccaaagtttggaacaatttcgacgagttaaccaatctggtaaatggtaagcgtgtaagtatttag

SEQ ID NO: 76100 - DNA, 884 bp, Zea Mays
tcgtgaccataagatgggggacggagggagtagcatgttttcacggtttcccaccttctgggtctggagttgttgcagatacggatccacgtcagaattttaacagatctggttttgtgtctcaagatattcgtgctaagacacaggtcaacttcaacaacacagataatggagcggcgatgtctgggacaccccgtggccagaaccctttcagctcaagggagggcttcacagtcaacctccgcacctttgccatggaccacgaacagtattccaagaagagagctttcgtccacgtcctactgaagagaaagaagaccttcgtgacggtgacagactccagcgggaacaaaaagacgggtgcctccgccggctgcttggaggacaggaaaggacggtcccgtctctcccgatacgcttccgaagcggtcgcggagcaggtcggacggtccgccaggaagatggggttgagctccatcgtcatgaaggtgaaaggggcttcgttcttcaagaagaagaagaaggtgatcctgagcttcagagaagggttccgaggcgaaagggtgagggaccaatctcctatcatgtacatccacgacgtgacccagcttcctcacaatgggtgccggctccccaagcagcgccgggtgtagtttcggagtggactggaactagagctgggtttaaagaaagaaccggggaagtgtcggaggtgattttcggaaacttaacgtaatcgttgtgttgttggcctagttgatgtaataatatggacatgtgttttgggcaaatctacccttgttcttgtattgtatggaagcaacttactcgctcgatgagttatagacaattctgcgtaataatgctgttgagttctgaaatgt

SEQ ID NO: 76101 - DNA, 2024 bp, Zea Mays
attccaaacgtccctgataacacagtccggaaggaccttttctcgtttttttctctcgctagcaccttgcctccttgcgatttgcgagcgccgcatcgacccccaccgccgacgaacgccgcgccgccgacgtcctgccttctcctcgccggcgagcgccgttccgctgtaccctccgtgattccgccccaacctctgcgtccgaatctcccgcgaaacagtcacggcgatggcggcggccggtggcgtttcaactgacgatgtcccgatcctgcaggcagagaacctcaccagcaacgtcaagtccgtctactacagtcgaacattcttgtcaatcattggtggagttgttgctggaatctggggattcacaggcttgatggggcgtacttcgatagttggaccaggatttcaattgaaggagtttttggtggcctgatgtcattcgtgctgttttggacgtatcctttttcgttgacaatttaaaaacagtactattcatactttatttctgttcttcttgtgcttatatagattatttgattagataggctgaagattgcaaccggctgggatggtaaaccaacatgttcatactccactggttgtagattgggtaacatgctgctattatcgagggactgaacgcctaccaacgaatatttcagatttgtgtttactgctgccatatattttgtcattgtggaatataaataaaaattcaacattttagacaatcatagaaaacaatcagtgaaccagcaaagcagtttatttttttctaaactcaaaacatgtttatgcgtctttcctatctatattcatctgttttcagtgttggtccgtttctgcatgagttcatccttgacgacgtatatagatttgcttatgacattgttcacatcttctgacggacatagaaagagctacactccggaggaaacacggaatcgtcgacgatgaacattcccaattggctttttgtacactcaatttttgtattggtaattgatatagtctgtagtgagactatatcggtgtagacctaagcaaagctcatgaactttgcatttccttggatgatccgtagcagttgcaatttttcatttcaagtgatggatatgaactttgatgttttctggcacaatgttttgtaccctcgagttttctggcacttcgattgatgtacacacttctcaatgcttcaactgatcgagtcactgttaactagccatgtgcgtcttttggaggaactacccatgttatttccaaatcaaaatgcgtccgtgatctaagaagcttcagcactgctaactgaacccatctcttcttatcaggccgaaattttatacacgggcctaagcccagatccaaacttccaaacgcatcttcctctcccatgctgcatcccgcagccagaaccctagcctcgtcgccatggcctcctccttgctccgctcaggcgattgtcgagcgaatgaaggcagttggcgccaaggtcattattgactgattagaacaagccttttcagtggtgaggtcctgcaaatttatgcttcgtttcggatcaacttttaagtgcaaggatggatgagtggcttgtggagaattctcctctatgaacttgtggagaattgatgtggcattgcacaaataggttttcaagcgcgttaatcaaatgaacttgtagagtattgtatcaatgatcaatcactcatcattatgttgtcggatgtgacattagttgtggggctttgggatggaaatggactattatattgttatttgctatgaagattttgtgacctttgaattacaaagtaaaaatgagttacttcatttccaaattgtaagttgtttgggcttttctaaatacataacttctactgtgtatctagacatcatgtacatggagacgcgtggaaaaaaaagatatgtatctgttcataagagtatgctgttttggacaaagtcgcccatatggataacattatcctgctttcttgaatttacgtactgtttcc

SEQ ID NO: 76102 - DNA, 2589 bp, Zea Mays
agaaatctcatccagcgcattttcactggaaaatacgagaagcagttaaaaaatcccgtattccaaacgtccctgataacacagtccggaaggaccttttctcgtttttttctctcgctagcaccttgcctccttgcgatttgcgagcgccgcatcgacccccaccgccgacgaacgccgcgccgccgacgtcctgccttctcctcgccggcgagcgccgttccgctgtaccctccgtgattccgccccaacctctgcgtccgaatctcccgcgaaacagtcacggcgatggcggcggccggtggcgtttcaactgacgatgtcccgatcctgcaggcagagaacctcaccagcaacgtcaagtccgtctactacagtcgaacattcttgtcaatcattggtggagttgttgctggaatctggggattcacaggcttgatggggcgtacttcgatagttggaccaggatttcaattgaaggagtttttggtggcctgatgtcattcgtgctgttttggacgtatcctttttcgttgacaatttaaaaacagtactattcatactttatttctgttcttcttgtgcttatatagattatttgattagataggctgaagattgcaaccggctgggatggtaaaccaacatgttcatactccactggttgtagattgggtaacatgctgctattatcgagggactgaacgcctaccaacgaatatttcagatttgtgtttactgctgccatatattttgtcattgtggaatataaataaaaattcaacattttagacaatcatagaaaacaatcagtgaaccagcaaagcagtttatttttttctaaactcaaaacatgtttatgcgtctttcctatctatattcatctgttttcagtgttggtccgtttctgcatgagttcatccttgacgacgtatatagatttgcttatgacattgttcacatcttctgacggacatagaaagagctacactccggaggaaacacggaatcgtcgacgatgaacattcccaattggctttttgtacactcaatttttgtattggtaattgatatagtctgtagtgagactatatcggtgtagacctaagcaaagctcatgaactttgcatttccttggatgatccgtagcagttgcaatttttcatttcaagtgatggatatgaactttgatgttttctggcacaatgttttgtaccctcgagttttctggcacttcgattgatgtacacacttctcaatgcttcaactgatcgagtcactgttaactagccatgtgcgtcttttggaggaactacccatgttatttccaaatcaaaatgcgtccgtgatctaagaagcttcagcactgctaactgaacccatctcttcttatcaggccgaaattttatacacgggcctaagcccagatccaaacttccaaacgcatcttcctctcccatgctgcatcccgcagccagaaccctagcctcgtcgccatggcctcctccttgctccgctccggctacggcctcttccttcgccgccctcgcctttccgccgcattctccaccgctgctgccgaggagctcatcgacgtccgcaagctccccaccgactacgacccctccaccttcgacccgtcctccccgtcccgcccgccgccgtccgaccgcgtgtggcgcctcgtcgaggaggtctcctctctcaccctcgcggagactgcttctctgtcctctctcctcctccgccgcctcgacatcccctccgcgccacccatcgccatcctcaactccgccacggggctgggcggcggtggcgccacggccggcgcggcgggtgagaaggcggcggcggcagctgagaagacggtcttcgagctgcggctggaggcctacgatgctgcgagcaagatcaaggtgatcaaggagatccggtcattcactgacctggggctgaaggaggccaaggagctggtggagaaggcgcctgcggtgatcaagggaggcctatccaaggaggaggctcaggcgattgtcgagcgaatgaaggcagttggcgccaaggtcattattgactgattagaacaagccttttcagtggtgaggtcctgcaaatttatgcttcgtttcggatcaacttttaagtgcaaggatggatgagtggcttgtggagaattctcctctatgaacttgtggagaattgatgtggcattgcacaaataggttttcaagcgcgttaatcaaatgaacttgtagagtattgtatcaatgatcaatcactcatcattatgttgtcggatgtgacattagttgtggggctttgggatggaaatggactattatattgttatttgctatgaagattttgtgacctttgaattacaaagtaaaaatgagttacttcatttccaaattgtaagttgtttgggcttttctaaatacataacttctactgtgtatctagacatcatgtacatggagacgcgtggaaaaaaaagatatgtatctgttcataagagtatgctgttttggacaaagtcgcccatatggataacattatcctgctttcttgaatttacgtactgtttcc

SEQ ID NO: 76103 - DNA, 2172 bp, Zea Mays
gtagaaatctcatccagcgcattttcactggaaaatacgagaagcagttaaaaaatcccgtattccaaacgtccctgataacacagtccggaaggaccttttctcgtttttttctctcgctagcaccttgcctccttgcgatttgcgagcgccgcatcgacccccaccgccgacgaacgccgcgccgccgacgtcctgccttctcctcgccggcgagcgccgttccgctgtaccctccgtgattccgccccaacctctgcgtccgaatctcccgcgaaacagtcacggcgatggcggcggccggtggcgtttcaactgacgatgtcccgatcctgcaggcagagaacctcaccagcaacgtcaagtccgtctactacagtcgaacattcttgtcaatcattggtggagttgttgctggaatctggggattcacaggcttgatggggcgtacttcgatagttggaccaggatttcaattgaaggagtttttggtggcctgatgtcattcgtgctgttttggacatttgcttatgacattgttcacatcttctgacggacatagaaagagctacactccggaggaaacacggaatcgtcgacgatgaacattcccaattggctttttgtacactcaatttttgtattggtaattgatatagtctgtagtgagactatatcggtgtagacctaagcaaagctcatgaactttgcatttccttggatgatccgtagcagttgcaatttttcatttcaagtgatggatatgaactttgatgttttctggcacaatgttttgtaccctcgagttttctggcacttcgattgatgtacacacttctcaatgcttcaactgatcgagtcactgttaactagccatgtgcgtcttttggaggaactacccatgttatttccaaatcaaaatgcgtccgtgatctaagaagcttcagcactgctaactgaacccatctcttcttatcaggccgaaattttatacacgggcctaagcccagatccaaacttccaaacgcatcttcctctcccatgctgcatcccgcagccagaaccctagcctcgtcgccatggcctcctccttgctccgctccggctacggcctcttccttcgccgccctcgcctttccgccgcattctccaccgctgctgccgaggagctcatcgacgtccgcaagctccccaccgactacgacccctccaccttcgacccgtcctccccgtcccgcccgccgccgtccgaccgcgtgtggcgcctcgtcgaggaggtctcctctctcaccctcgcggagactgcttctctgtcctctctcctcctccgccgcctcgacatcccctccgcgccacccatcgccatcctcaactccgccacggggctgggcggcggtggcgccacggccggcgcggcgggtgagaaggcggcggcggcagctgagaagacggtcttcgagctgcggctggaggcctacgatgctgcgagcaagatcaaggtgatcaaggagatccggtcattcactgacctggggctgaaggaggccaaggagctggtggagaaggcgcctgcggtgatcaagggaggcctatccaaggaggaggctcaggcgattgtcgagcgaatgaaggcagttggcgccaaggtcattattgactgattagaacaagccttttcagtggtgaggtcctgcaaatttatgcttcgtttcggatcaacttttaagtgcaaggatggatgagtggcttgtggagaattctcctctatgaacttgtggagaattgatgtggcattgcacaaataggttttcaagcgcgttaatcaaatgaacttgtagagtattgtatcaatgatcaatcactcatcattatgttgtcggatgtgacattagttgtggggctttgggatggaaatggactattatattgttatttgctatgaagattttgtgacctttgaattacaaagtaaaaatgagttacttcatttccaaattgtaagttgtttgggcttttctaaatacataacttctactgtgtatctagacatcatgtacatggagacgcgtggaaaaaaaagatatgtatctgttcataagagtatgctgttttggacaaagtcgcccatatggataacattatcctgctttcttgaatttacgtactgtttcc

SEQ ID NO: 76104 - DNA, 345 bp, Zea Mays
attccaaacgtccctgataacacagtccggaaggaccttttctcgtttttttctctcgctagcaccttgcctccttgcgatttgcgagcgccgcatcgacccccaccgccgacgaacgccgcgccgccgacgtcctgccttctcctcgccggcgagcgccgttccgctgtaccctccgtgattccgccccaacctctgcgtccgaatctcccgcgaaacagtcacggcgatggcggcggccggtggcgtttcaactgacgatgtcccgatcctgcaggcagagaacctcaccagcaacgtcaagtccgtctactacaggcctagggattagggattgaattccgc

SEQ ID NO: 76105 - DNA, 1414 bp, Zea Mays
caaagtcttctctactgtgaaccggccgagctcaatcactttgcactacccttttatctagtcgctgcagggccagggcagtgaagtctcttctcgttcttgagttctagcgagagtgcatcgtgtgagtgttgtggttcatgttcacgtcggtgtttactctccccggccatcagtgtctcattgggaacgccgcggtgccgccggtgaacgccgctgggaatgatctcgacatggcagaccttgtttggggccggttgcgtgcgtgatctagggttggtctgctctatggagaagttttattcccttatcttttggttagttacttcatgtggaggccttgaagcttagaatgtttatgtatacatcttatggaaaggcttcacccttccaattattgtaataagttatgcactttgggtactatcaggacttgtaataattacaattcttcttatgttgtaaaacttgagatttggaaatgtaaaatatattttgtaaagtcttccgctctatctctgaagtgtgtatgtatcgagtgtgattactgtaatatgcatgaatgtgggagatccttgggataatgagttcaagttgttgaactcgtgatagccttgttaagttacccggtacacatgcacagccatctgaggccgttaatggcaagggttggtgcatgtgtgcctgataacttgggaggactgtcacagcaacgcagcagaagacgcgttgtcgaaactaggatccagtcgagctcaggtcccacccagagttttcgtccaggaagtgccacgcccaagcattctttcagatcaggcggaagagtgcaacgctttgagccagccagagtcagactctaatgactggagagagcctatcatcaagtatataaaaaatgaagaagaaccggatgacaaggccgcagcagagcgtatcgcaagacagtaggcccactacaccctcataggggaggcactatacagaaggggtgcaacaggagtcctcataaaatgcatttcctcgatcactaggagacagctactagatgagattcacgctggacagtgtggaatacacgcaacatctagaactctggttgggaaagtcttcaggtctggtttctactagccgacaacaaagagtgatgcggtcgagttagtccagaaatgtgaagcttgccaattcttgtcaaagcaacaacattttaccagcacagcaactgcagaccatacctgtaacatggtcgtttgcgtgctagggactggacatgattggacccttcaagaaagctcagggaggctatactcacgtgttggtcgccattgataaattcaacaaatggatagaatacaaacccattgcttctctaacttcagccaaggcagtgtaattcataaaagatataatattcagg

SEQ ID NO: 76106 - DNA, 3388 bp, Zea Mays
gtttgagccatgttgtgctggcgccatcaaagtcttctctactgtgaaccggccgagctcaatcactttgcactacccttttatctagtcgctgcagggccagggcagtgaagtctcttctcgttcttgagttctagcgagagtgcatcgtgtgagtgttgtggttcatgttcacgtcggtgtttactctccccggccatcagtgtctcattgggaacgccgcggtgccgccggtgaacgccgctgggaatgatctcgacatggcagaccttgtttggggccggttgcgtgcgtgatctagggttggtctgctctatggtgagtcgctagtgcctgctccaccgtggttgggaactctactgcgtcgtcgttccggcttaacaccgtcagagttgggcgccgccggcacgcgcagaggaagcgcgggcgcgcgtggtgctggagcctagggctgtaagcgctatctgagtgggccagttttgcctggagttgggctggctgggtcagttctggcccgagactgttcatgtgtttagcattttcttttacctaatgtctgtttatttatgccaaaaattgtggaaaagtgttaaattagtaaaacaaatttggttagataggtaaattggtagagttccaggtaaaaatagttttggagttttgtagcaaatagatatttttagatgaataaaacctgctttaaatgaacttatatgaaattttagtaataaaaatagagcactaaaaattgtaggaaaattggtgtaagcttatcttgagcatatgaatccttggataaagtttagaactgtttggacaagatttgcttagcaaattaattattgctcaataaaagaaaagagttttaccccagagtatttaggacacctagtgtcttagtaaggaatgaagttgtttagcaagttttggatggttagatgagttctaaggataagtagatccctggtagctattacttatgatgatagcttgtaggtgtaatcatgtaatgctttataataccttatttgctaactacataggcataagcattcatgatcatgtcatttcatgtagagctcccaaaataaagagtgaagatttaagataaagtggttgctggagaggagtctactccagtgcctgttcatcaagtggatggagccatctaactgatcatcgtgttagaagtatctagaacctcttctctgcaacaaaggcaagccccggtgcatttgccccttccttgtgttttaaatgctttatcaccttaaatgatgcattaggtgataggagttgtgtgatgaacaattgatgcattaccattccttggaatttgaatactataccttgatccctgatttataaaaagaactgatagtgcttaaccctgcttagaaactgaaaaatcatttgttttcaaaaagaatgattgtggaacattggttatgggctttttgattcaaaaatcaaagcaaactaagtgatgactccacttcggccggagtgggctcatcattggaaaagagtacccctgccgggtaccaaaaatggggaaatggttaataaatctagaccaggcgctgagcagacagagtcgcccgtctgtgtcgattaaggaccgtaccgttgactggcctgttgtggttgagactttgccactagccacataccctggtatgggacagggtaagcttgaacccggctattccatacgtgaagggacaatcgcgcactgggagtggagagatggcgagagtagcatgtaccctcctggcacagagcacgcctggtaggtaatgtgctctcgggtggcgcggacctgttcatgtagtggaggactccgtgggaacggttgacatatgcaagggttaagtgctacatatgtcgtgtggttagagatcctcagctgggtataatcggttcgaatcgtcgttgctcctcggttatggagactcatcccggtgaccatcatcatagttagcaagtgaaatatgagaatgaataaaatgcagctagtataggctaagtgcttgaactagaccaggcaaatatagattcaggtaataacctaactagtgaaacaaaatttggcttaaggatcaactggtagcaagcttttctgcaaaaaggagtctttgatcattgataaactttaccttgattcccaatcagctagcatacccttgaaagtcttttctttagtcgggtaagtcttgctgagtaattgcatactcagggttttattccctgttgtttttgcaggagaagttttattcccttatcttttggttagttacttcatgtggaggccttgaagcttagaatgtttatgtatacatcttatggaaaggcttcacccttccaattattgtaataagttatgcactttgggtactatcaggacttgtaataattacaattcttcttatgttgtaaaacttgagatttggaaatgtaaaatatattttgtaaagtcttccgctctatctctgaagtgtgtatgtatcgagtgtgattactgtaatatgcatgaatgtgggagatccttgggataatgagttcaagttgttgaactcgtgatagccttgttaagttacccggtacacatgcacagccatctgaggccgttaatggcaagggttggtgcatgtgtgcctgataacttgggaggactgtcacagcaacgcagcagaagacgcgttgtcgaaactaggatccagtcgagctcaggtcccacccagagttttcgtccaggaagtgccacgcccaagcattctttcagatcaggcggaagagtgcaacgctttgagccagccagagtcagactctaatgactggagagagcctatcatcaagtatataaaaaatgaagaagaaccggatgacaaggccgcagcagagcgtatcgcaagacagtaggcccactacaccctcataggggaggcactatacagaaggggtgcaacaggagtcctcataaaatgcatttcctcgatcactaggagacagctactagatgagattcacgctggacagtgtggaatacacgcaacatctagaactctggttgggaaagtcttcaggtctggtttctactagccgacaacaaagagtgatgcggtcgagttagtccagaaatgtgaagcttgccaattcttgtcaaagcaacaacattttaccagcacagcaactgcagaccatacctgtaacatggtcgtttgcgtgctagggactggacatgattggacccttcaagaaagctcagggaggctatactcacgtgttggtcgccattgataaattcaacaaatggatagaatacaaacccattgcttctctaacttcagccaaggcagtgtaattcataaaagatataatattcagg

SEQ ID NO: 76107 - DNA, 2862 bp, Zea Mays
ctttggtgctgcttgcatgttggcgtggggcttggaagcttagccacgtgtttgagccatgttgtgctggcgccatcaaagtcttctctactgtgaaccggccgagctcaatcactttgcactacccttttatctagtcgctgcagggccagggcagtgaagtctcttctcgttcttgagttctagcgagagtgcatcgtgtgagtgttgtggttcatgttcacgtcggtgtttactctccccggccatcagtgtctcattgggaacgccgcggtgccgccggtgaacgccgctgggaatgatctcgacatggcagaccttgtttggggccggttgcgtgcgtgatctagggttggtctgctctatggtgagtcgctagtgcctgctccaccgtggttgggaactctactgcgtcgtcgttccggcttaacaccgtcagagttgggcgccgccggcacgcgcagaggaagcgcgggcgcgcgtggtgctggagcctagggctgtaagcgctatctgagtgggccagttttgcctggagttgggctggctggagctcccaaaataaagagtgaagatttaagataaagtggttgctggagaggagtctactccagtgcctgttcatcaagtggatggagccatctaactgatcatcgtgttagaagtatctagaacctcttctctgcaacaaaggcaagccccggtgcatttgccccttccttgtgttttaaatgctttatcaccttaaatgatgcattaggtgataggagttgtgtgatgaacaattgatgcattaccattccttggaatttgaatactataccttgatccctgatttataaaaagaactgatagtgcttaaccctgcttagaaactgaaaaatcatttgttttcaaaaagaatgattgtggaacattggttatgggctttttgattcaaaaatcaaagcaaactaagtgatgactccacttcggccggagtgggctcatcattggaaaagagtacccctgccgggtaccaaaaatggggaaatggttaataaatctagaccaggcgctgagcagacagagtcgcccgtctgtgtcgattaaggaccgtaccgttgactggcctgttgtggttgagactttgccactagccacataccctggtatgggacagggtaagcttgaacccggctattccatacgtgaagggacaatcgcgcactgggagtggagagatggcgagagtagcatgtaccctcctggcacagagcacgcctggtaggtaatgtgctctcgggtggcgcggacctgttcatgtagtggaggactccgtgggaacggttgacatatgcaagggttaagtgctacatatgtcgtgtggttagagatcctcagctgggtataatcggttcgaatcgtcgttgctcctcggttatggagactcatcccggtgaccatcatcatagttagcaagtgaaatatgagaatgaataaaatgcagctagtataggctaagtgcttgaactagaccaggcaaatatagattcaggtaataacctaactagtgaaacaaaatttggcttaaggatcaactggtagcaagcttttctgcaaaaaggagtctttgatcattgataaactttaccttgattcccaatcagctagcatacccttgaaagtcttttctttagtcgggtaagtcttgctgagtaattgcatactcagggttttattccctgttgtttttgcaggagaagttttattcccttatcttttggttagttacttcatgtggaggccttgaagcttagaatgtttatgtatacatcttatggaaaggcttcacccttccaattattgtaataagttatgcactttgggtactatcaggacttgtaataattacaattcttcttatgttgtaaaacttgagatttggaaatgtaaaatatattttgtaaagtcttccgctctatctctgaagtgtgtatgtatcgagtgtgattactgtaatatgcatgaatgtgggagatccttgggataatgagttcaagttgttgaactcgtgatagccttgttaagttacccggtacacatgcacagccatctgaggccgttaatggcaagggttggtgcatgtgtgcctgataacttgggaggactgtcacagcaacgcagcagaagacgcgttgtcgaaactaggatccagtcgagctcaggtcccacccagagttttcgtccaggaagtgccacgcccaagcattctttcagatcaggcggaagagtgcaacgctttgagccagccagagtcagactctaatgactggagagagcctatcatcaagtatataaaaaatgaagaagaaccggatgacaaggccgcagcagagcgtatcgcaagacagtaggcccactacaccctcataggggaggcactatacagaaggggtgcaacaggagtcctcataaaatgcatttcctcgatcactaggagacagctactagatgagattcacgctggacagtgtggaatacacgcaacatctagaactctggttgggaaagtcttcaggtctggtttctactagccgacaacaaagagtgatgcggtcgagttagtccagaaatgtgaagcttgccaattcttgtcaaagcaacaacattttaccagcacagcaactgcagaccatacctgtaacatggtcgtttgcgtgctagggactggacatgattggacccttcaagaaagctcagggaggctatactcacgtgttggtcgccattgataaattcaacaaatggatagaatacaaacccattgcttctctaacttcagccaaggcagtgtaattcataaaagatataatattcagg

SEQ ID NO: 76108 - DNA, 2016 bp, Zea Mays
attagttatgctactgtactagcttctggtttgctgtattttccttaaacatgaactaacactcacacttgttttgtgggaaatggtcttcaatgctgccgtgaggaaggagatagctgatgaaaccgacagagaaacaggccgttcaaagcaaatatcacctgtccctatccatttaagcatattttctccatatgttgtgaatcttactcttattgatcttcctgggcttactaaagtagccgttgagggccaaccggagaatattgttcaggacattgaaaacatggttcgctcatatattgaaaagccaatcaggaccttgctacttctgatgcaatcaagatatcacgggaagttgatcccaaaggtgaaaggacctttggtgttctcacaaaaattgatctgatggacaagggtaccgatgctgttgatatactggaaggaagatcttaccgtctccaaacaccatgggttggtgttgttaatcgatcccaacaagatatcaacaagaatgtggacatgattgctgctaggcgtagagagcgagagtattttgcaactacaccagaatataagcacatggcttctaggatgggatctgaatatttaggaaagatgctttcaaagcatttggaacaagttatcaaatcaaggatcccggggatccaatctcttataacaaagacaattgcagagctggaaactgaacttaatcgacttggaaaacccattgctaatgatgctggggggaagctgtacacgatcatggaaatttgtcgtatgtttgacagtatctacaaagagcatctggacggagtgcgccctggcggagaaaaagtttaccacgtcttcgacaatcaatttcctgtagctattaaacggttgcagtttgataagcaactctctatggaaaatgtaaagaagcttataacagaagctgatggataccagcctcacttaatagctccagaacaaggatatcgacgccttatagaatcttgtcttattagtatcagaggtcctgccgaggcagctgttgatgcggtacatgcaattctgaaggacctcgtccgcaaggctatcaatgaaacacatgagctgaagcagtttcccacccttcgtgtggaagtaggcaatgcagcttttgagtcattggatagaatgagggatgaaagcaagaaaaatacattaaagctagttgacatggaatgcagctacttgacagtagatttcttcaggaagcttccccaggatgttgagaggggtggaaatccaagccactctatttttgatagatataatgactcttatcttagacgaattggacaaactgttctgtcatatgttaatatggtgtgttcgaccttgaggaactccatcccaaaatctattgtttattgccaagtgcgagaggccaagcgctcgctgctcgatcacttcttcactgaactgggagcaagagagatgaagcaactttccaagcttctcgacgaagatccagcagtcatggaacgcagaactaaccttgcaaagaggctggagctgtaccggagtgcccaatcggaaatcgatgcagtcgcatggtccaaatagccctgatggctaagatatctgttcttacatgttctttatccctcgtctggcgattgtctcccctattctggggcatatatagctgatttttgtctgttgtaggtcaggtcattctatagattaccgcagctgtacggtgtcgtttagttgtgcttttgttccttgtacttgagggtctaggggacaccaggctgctgtacgcttgcatcacggacaagttcataaattgtgtttttgttaccatgcattcttttattccatctatgtgcagctatatgaagcatgttcttctgtcagtatgttcaaagtcttgataggccttgatcggttgcaagaggaacgaggggattgagcaattttaattagcaagggatgtaatctctccaatctccttcaatccatccttaactgaacaagctt

SEQ ID NO: 76109 - DNA, 2160 bp, Zea Mays
gttcatgactgatgagatataattatatcaaattacattgtcacctatggttgaggactgctctatagttgaatttcatgatgctcattgaaacatcctttttatattattgcattagttatgctactgtactagcttctggtttgctgtattttccttaaacatgaactaacactcacacttgttttgtgggaaatggtcttcaatgctgccgtgaggaaggagatagctgatgaaaccgacagagaaacaggccgttcaaagcaaatatcacctgtccctatccatttaagcatattttctccatatgttgtgaatcttactcttattgatcttcctgggcttactaaagtagccgttgagggccaaccggagaatattgttcaggacattgaaaacatggttcgctcatatattgaaaagccaaattgtataattctggctgtttccccagccaatcaggaccttgctacttctgatgcaatcaagatatcacgggaagttgatcccaaaggtgaaaggacctttggtgttctcacaaaaattgatctgatggacaagggtaccgatgctgttgatatactggaaggaagatcttaccgtctccaaacaccatgggttggtgttgttaatcgatcccaacaagatatcaacaagaatgtggacatgattgctgctaggcgtagagagcgagagtattttgcaactacaccagaatataagcacatggcttctaggatgggatctgaatatttaggaaagatgctttcaaagcatttggaacaagttatcaaatcaaggatcccggggatccaatctcttataacaaagacaattgcagagctggaaactgaacttaatcgacttggaaaacccattgctaatgatgctggggggaagctgtacacgatcatggaaatttgtcgtatgtttgacagtatctacaaagagcatctggacggagtgcgccctggcggagaaaaagtttaccacgtcttcgacaatcaatttcctgtagctattaaacggttgcagtttgataagcaactctctatggaaaatgtaaagaagcttataacagaagctgatggataccagcctcacttaatagctccagaacaaggatatcgacgccttatagaatcttgtcttattagtatcagaggtcctgccgaggcagctgttgatgcggtacatgcaattctgaaggacctcgtccgcaaggctatcaatgaaacacatgagctgaagcagtttcccacccttcgtgtggaagtaggcaatgcagcttttgagtcattggatagaatgagggatgaaagcaagaaaaatacattaaagctagttgacatggaatgcagctacttgacagtagatttcttcaggaagcttccccaggatgttgagaggggtggaaatccaagccactctatttttgatagatataatgactcttatcttagacgaattggacaaactgttctgtcatatgttaatatggtgtgttcgaccttgaggaactccatcccaaaatctattgtttattgccaagtgcgagaggccaagcgctcgctgctcgatcacttcttcactgaactgggagcaagagagatgaagcaactttccaagcttctcgacgaagatccagcagtcatggaacgcagaactaaccttgcaaagaggctggagctgtaccggagtgcccaatcggaaatcgatgcagtcgcatggtccaaatagccctgatggctaagatatctgttcttacatgttctttatccctcgtctggcgattgtctcccctattctggggcatatatagctgatttttgtctgttgtaggtcaggtcattctatagattaccgcagctgtacggtgtcgtttagttgtgcttttgttccttgtacttgagggtctaggggacaccaggctgctgtacgcttgcatcacggacaagttcataaattgtgtttttgttaccatgcattcttttattccatctatgtgcagctatatgaagcatgttcttctgtcagtatgttcaaagtcttgataggccttgatcggttgcaagaggaacgaggggattgagcaattttaattagcaagggatgtaatctctccaatctccttcaatccatccttaactgaacaagctt

SEQ ID NO: 76110 - DNA, 2147 bp, Zea Mays
gggaagctagtcactagtgtgagcaaagctctggtaaatcctctgtgttggagagcgtggttgggaaggatttcttaccgaggggttcaggcattgtaacccggcggccgctggtactgcagctccacagaattgatggtgacagggaatacgccgagtttatgcaccttccaagaaagagatttacagattttgctgccgtgaggaaggagatagctgatgaaaccgacagagaaacaggccgttcaaagcaaatatcacctgtccctatccatttaagcatattttctccatatgttgtgaatcttactcttattgatcttcctgggcttactaaagtagccgttgagggccaaccggagaatattgttcaggacattgaaaacatggttcgctcatatattgaaaagccaaattgtataattctggctgtttccccagccaatcaggaccttgctacttctgatgcaatcaagatatcacgggaagttgatcccaaaggtgaaaggacctttggtgttctcacaaaaattgatctgatggacaagggtaccgatgctgttgatatactggaaggaagatcttaccgtctccaaacaccatgggttggtgttgttaatcgatcccaacaagatatcaacaagaatgtggacatgattgctgctaggcgtagagagcgagagtattttgcaactacaccagaatataagcacatggcttctaggatgggatctgaatatttaggaaagatgctttcaaagcatttggaacaagttatcaaatcaaggatcccggggatccaatctcttataacaaagacaattgcagagctggaaactgaacttaatcgacttggaaaacccattgctaatgatgctggggggaagctgtacacgatcatggaaatttgtcgtatgtttgacagtatctacaaagagcatctggacggagtgcgccctggcggagaaaaagtttaccacgtcttcgacaatcaatttcctgtagctattaaacggttgcagtttgataagcaactctctatggaaaatgtaaagaagcttataacagaagctgatggataccagcctcacttaatagctccagaacaaggatatcgacgccttatagaatcttgtcttattagtatcagaggtcctgccgaggcagctgttgatgcggtacatgcaattctgaaggacctcgtccgcaaggctatcaatgaaacacatgagctgaagcagtttcccacccttcgtgtggaagtaggcaatgcagcttttgagtcattggatagaatgagggatgaaagcaagaaaaatacattaaagctagttgacatggaatgcagctacttgacagtagatttcttcaggaagcttccccaggatgttgagaggggtggaaatccaagccactctatttttgatagatataatgactcttatcttagacgaattggacaaactgttctgtcatatgttaatatggtgtgttcgaccttgaggaactccatcccaaaatctattgtttattgccaagtgcgagaggccaagcgctcgctgctcgatcacttcttcactgaactgggagcaagagagatgaagcaactttccaagcttctcgacgaagatccagcagtcatggaacgcagaactaaccttgcaaagaggctggagctgtaccggagtgcccaatcggaaatcgatgcagtcgcatggtccaaatagccctgatggctaagatatctgttcttacatgttctttatccctcgtctggcgattgtctcccctattctggggcatatatagctgatttttgtctgttgtaggtcaggtcattctatagattaccgcagctgtacggtgtcgtttagttgtgcttttgttccttgtacttgagggtctaggggacaccaggctgctgtacgcttgcatcacggacaagttcataaattgtgtttttgttaccatgcattcttttattccatctatgtgcagctatatgaagcatgttcttctgtcagtatgttcaaagtcttgataggccttgatcggttgcaagaggaacgaggggattgagcaattttaattagcaagggatgtaatctctccaatctccttcaatccatccttaactgaacaagctt

SEQ ID NO: 76111 - DNA, 2152 bp, Zea Mays
cttggatctgcaatttctcggagtccaggaaagctctggtaaatcctctgtgttggagagcgtggttgggaaggatttcttaccgaggggttcaggcattgtaacccggcggccgctggtactgcagctccacagaattgatggtgacagggaatacgccgagtttatgcaccttccaagaaagagatttacagattttgctgccgtgaggaaggagatagctgatgaaaccgacagagaaacaggccgttcaaagcaaatatcacctgtccctatccatttaagcatattttctccatatgttgtgaatcttactcttattgatcttcctgggcttactaaagtagccgttgagggccaaccggagaatattgttcaggacattgaaaacatggttcgctcatatattgaaaagccaaattgtataattctggctgtttccccagccaatcaggaccttgctacttctgatgcaatcaagatatcacgggaagttgatcccaaaggtgaaaggacctttggtgttctcacaaaaattgatctgatggacaagggtaccgatgctgttgatatactggaaggaagatcttaccgtctccaaacaccatgggttggtgttgttaatcgatcccaacaagatatcaacaagaatgtggacatgattgctgctaggcgtagagagcgagagtattttgcaactacaccagaatataagcacatggcttctaggatgggatctgaatatttaggaaagatgctttcaaagcatttggaacaagttatcaaatcaaggatcccggggatccaatctcttataacaaagacaattgcagagctggaaactgaacttaatcgacttggaaaacccattgctaatgatgctggggggaagctgtacacgatcatggaaatttgtcgtatgtttgacagtatctacaaagagcatctggacggagtgcgccctggcggagaaaaagtttaccacgtcttcgacaatcaatttcctgtagctattaaacggttgcagtttgataagcaactctctatggaaaatgtaaagaagcttataacagaagctgatggataccagcctcacttaatagctccagaacaaggatatcgacgccttatagaatcttgtcttattagtatcagaggtcctgccgaggcagctgttgatgcggtacatgcaattctgaaggacctcgtccgcaaggctatcaatgaaacacatgagctgaagcagtttcccacccttcgtgtggaagtaggcaatgcagcttttgagtcattggatagaatgagggatgaaagcaagaaaaatacattaaagctagttgacatggaatgcagctacttgacagtagatttcttcaggaagcttccccaggatgttgagaggggtggaaatccaagccactctatttttgatagatataatgactcttatcttagacgaattggacaaactgttctgtcatatgttaatatggtgtgttcgaccttgaggaactccatcccaaaatctattgtttattgccaagtgcgagaggccaagcgctcgctgctcgatcacttcttcactgaactgggagcaagagagatgaagcaactttccaagcttctcgacgaagatccagcagtcatggaacgcagaactaaccttgcaaagaggctggagctgtaccggagtgcccaatcggaaatcgatgcagtcgcatggtccaaatagccctgatggctaagatatctgttcttacatgttctttatccctcgtctggcgattgtctcccctattctggggcatatatagctgatttttgtctgttgtaggtcaggtcattctatagattaccgcagctgtacggtgtcgtttagttgtgcttttgttccttgtacttgagggtctaggggacaccaggctgctgtacgcttgcatcacggacaagttcataaattgtgtttttgttaccatgcattcttttattccatctatgtgcagctatatgaagcatgttcttctgtcagtatgttcaaagtcttgataggccttgatcggttgcaagaggaacgaggggattgagcaattttaattagcaagggatgtaatctctccaatctccttcaatccatccttaactgaacaagctt

SEQ ID NO: 76112 - DNA, 2559 bp, Zea Mays
acgccggtacgccagacgccacgcccatttcttctccacgaagcctttgaagtcccaaatcaactcccgcagacgcctccaaacacccagaccagaccaccgtcggccgtcgctagcctgcgcaacatctccaggtccagggtccaggccacagctcgagcccgacgaccgacgcctagacgcggctgggcggtcggcctcgcctcgtctcccccctccacgcctcctttctcctgctccgcgtctcgatctcgcctcccccgccgcgtggcgcgacccggccaggtatcgcccaccctgcgctgcggccatggataacttgatcaccctcgtcaacaagctgcagagggcctgcacggctctcggagaccacggagaggagagtgcactcccgacgctctgggactcgctgccggccatcgccgtcgttggaggacagagctctggtaaatcctctgtgttggagagcgtggttgggaaggatttcttaccgaggggttcaggcattgtaacccggcggccgctggtactgcagctccacagaattgatggtgacagggaatacgccgagtttatgcaccttccaagaaagagatttacagattttgctgccgtgaggaaggagatagctgatgaaaccgacagagaaacaggccgttcaaagcaaatatcacctgtccctatccatttaagcatattttctccatatgttgtgaatcttactcttattgatcttcctgggcttactaaagtagccgttgagggccaaccggagaatattgttcaggacattgaaaacatggttcgctcatatattgaaaagccaaattgtataattctggctgtttccccagccaatcaggaccttgctacttctgatgcaatcaagatatcacgggaagttgatcccaaaggtgaaaggacctttggtgttctcacaaaaattgatctgatggacaagggtaccgatgctgttgatatactggaaggaagatcttaccgtctccaaacaccatgggttggtgttgttaatcgatcccaacaagatatcaacaagaatgtggacatgattgctgctaggcgtagagagcgagagtattttgcaactacaccagaatataagcacatggcttctaggatgggatctgaatatttaggaaagatgctttcaaagcatttggaacaagttatcaaatcaaggatcccggggatccaatctcttataacaaagacaattgcagagctggaaactgaacttaatcgacttggaaaacccattgctaatgatgctggggggaagctgtacacgatcatggaaatttgtcgtatgtttgacagtatctacaaagagcatctggacggaggcgccctggcggagaaaaagtttaccacgtcttcgacaatcaatttcctgtagctattaaacggttgcagtttgataagcaactctctatggaaaatgtaaagaagcttataacagaagctgatggataccagcctcacttaatagctccagaacaaggatatcgacgccttatagaatcttgtcttattagtatcagaggtcctgccgaggcagctgttgatgcggtacatgcaattctgaaggacctcgtccgcaaggctatcaatgaaacacatgagctgaagcagtttcccacccttcgtgtggaagtaggcaatgcagcttttgagtcattggatagaatgagggatgaaagcaagaaaaatacattaaagctagttgacatggaatgcagctacttgacagtagatttcttcaggaagcttccccaggatgttgagaggggtggaaatccaagccactctatttttgatagatataatgactcttatcttagacgaattggacaaactgttctgtcatatgttaatatggtgtgttcgaccttgaggaactccatcccaaaatctattgtttattgccaagtgcgagaggccaagcgctcgctgctcgatcacttcttcactgaactgggagcaagagagatgaagcaactttccaagcttctcgacgaagatccagcagtcatggaacgcagaactaaccttgcaaagaggctggagctgtaccggagtgcccaatcggaaatcgatgcagtcgcatggtccaaatagccctgatggctaagatatctgttcttacatgttctttatccctcgtctggcgattgtctcccctattctggggcatatatagctgatttttgtctgttgtaggtcaggtcattctatagattaccgcagctgtacggtgtcgtttagttgtgcttttgttccttgtacttgagggtctaggggacaccaggctgctgtacgcttgcatcacggacaagttcataaattgtgtttttgttaccatgcattcttttattccatctatgtgcagctatatgaagcatgttcttctgtcagtatgttcaaagtcttgataggccttgatcggttgcaagaggaacgaggggattgagcaattttaattagcaagggatgtaatctctccaatctccttcaatccatccttaactgaacaagctt

SEQ ID NO: 76113 - DNA, 695 bp, Zea Mays
tctctgtgatcgtctttctgtctttcatatagctgtattgatgttataacttctctgagatagtttatgccttatctgaattctactagatagtcggttaatgtcaaggcatacgcataccttgccagaccttttctgggttttcactgttttaatgaaactcctttatgaattatgtgccatgtttctttctatttgcttttttgattcttacttgtgccattgccttttgtatggccaatacttgacaacagtttgccgtgaagaggaaagcagttggtatctggggatgcaaggactgtgggaaggttaaggccggtggcgcctacacaatgaacactgctagtgcggtcactgtgagaagcacaatccggcgcctgcgggagcagaccgaagcatgattgcgggcagcttgaaaaggagtacctggatttttgtagttcagccaagagccgtgaaccattttgcctttttagctaaatgaacaagaaatgtttatctatctgtagtgaccactttgtactcatggtttgtcatgctaaattgatggtatgcactatgcaatgcaaatacttgcgtaatcgtatgttttcttgtgctgccgaacaactttgatgctctgtgatggttctggtggtgtttagctgctgctagtatcgagatctgggacatcgttatacctaattgttcatgct

SEQ ID NO: 76114 - DNA, 2997 bp, Zea Mays
tcctcccccgtcgcccgtcggcacgagatccttgcccgaacaaaaaccagaagatgggcgaggggagggggagacgagatctcactccccgcttcctctccacctctcaaatggcgccaccgagtgctaaccgtagccaccagcagctcgtcgtcctaccggtcctgctcctactcctgatccggatccccgcatccgcggtagcggcggcagatacctccctgtccaccttatcctactcccaccactgccccaacctcccgtccgcgctcgacctgcccggcggcgaagtttcggcgctcgggcccgacgcccgtgtccccgtccccgaggtctccaccgggtacttcgtcggcggggaccgcatcttcggccccgacccctcctcccagccgcgctccttctcgttgctcccctcctccgtcgcccgcaccaccaacgcctcgctcctccacgtctccgccactctcaccgtctccggcgggcggcgcccgttccgcgaccgcggcggccggaacctcttcgagtacgacggccgcgcgcgccacttccgcccgcgcctcccgcgcttcacggggcggcgcggctccatcaccttcggcctggagggctactactccaccgggtccggggacctctgcatggtcggcaccgggtccgggcgcgccgccgacggctcgcccgtgcacttcctccccgtcgtgctccgtctcggctttcccagccccgccaacgtgacgcggcccttcgtcaccggtcgcctcgagaacgttgacaccatcagccccatcgagcccatctcactcgtcgcctacacccaggagggctacgcgtacggggagagcgcctcctgcccgccgccgcctgcggggaggcttgatgcgctccaggtgttcgagaataggaatttctcgtgcgcccatctcagttccatgctcaaatcgccgttcaggttggactacccgagtggcagcgagtcgaccgcatcttcactcgggattcaccaaagctacatgtatgtcaaccggatgcactgcaacgatgacggcgctgtccgtgcttatgtggcgttcactaaccagacagagttatcaaggtactacttcatgctgggcgagaaggccgtcgtggtggatggattctgggatcagaagagcagccggctttgcctcaaagggtgtcacgtggtgaagtcggggccatcccgtgcagatttggcagtaggtgagtgtggaattgggatgagcttctggttcccggcagtgtggtcgttacagcaacggagcttttctgctggtctggtctggaatgcaagtctgaaaagtggtgaggctatgaaatactatgagaaatctggattgaacaagaacaggaaagggaagttcccagatagcaattcataccaggacttggtgttccgttttttcgtgaagagaggaggcggctctggatatgcctcacctgtcacaattgggtcaatgttgtttgatggtaactctttggtggttcaagatcccttttctcgccatgtcacagccgagatgaagcaaaggctgcttaatgtcagctatgatatctactatgttgggaaatggtctctagaatcattccatcgtcgacatatctctgccgagggtgtttatgatactaagacaggttccctttgcatgatcgcttgtcgcgagcttaatgtctcgtcagattgtgaaatcctggtgactgctcagttttcttctttagatgcaaaagttgcacagcatgtgaaaggggcgatcaaaagcttgaggaagaagactgaccctcttttctttgaaacgctggacattgcttcatatgggatgtacgtagagcaagtggatgcatcaatctggagaatggacatagaaagcaccatgaccttgatctctatgacactggcgtgcgtcttcattgctgtgcagctatttcatgtcaacaaggtccctgaagcacttcccgccatgtcgatcaccatgctggtcgttctggctttgggttacatgatccctctcgtgctgaactttgacgctctcttcaagaacagcaacaagcagaccgttccactctcaggtggcggatggcttgaggtgaacgaagtcatggtgcggatcattaccatggtaacctttctgctgcagctgcggcttcttcagcaggcctggtccgcacggtccgtggatgcaagcaaagccgagtcatgggctgccgagaagaaagtgctctggatatgcctgccactgtacatcattggcggagctattacttgggttgttcacatgaggtcaaaccacagccgaagaatgctaaggcaggttgtacacttgaagccagttgagcagcatgcgttctgggaggaccttgtgtcttattgtggactgatactcgatgggttcctgctccctcaagtgatcctaaacgtgttctcagactccaaagttagagccctctccccagggttctacatcggaagcaccttgatccgtgtcctgcctcatgtgtacgatgtgttcaggagacagcactttgttccaagcctgagaccatcttacatgtatgcaggccctcgtgacgacctcttcagcctcgcttgggacatcgtcataccttgcggagcactgctactgtcggcgctcctcttcttccagcagtggcgcggaggagctttcttcctctgttcgaagaacaggaggacgagagagtacgaaatggtttccgtggccagctcttaagaaaaatcgagtggatatgaaatgcttttatagccggttcttgacatcgttattgcaagggaaatgtagaggaggtttacttatagactttttaaaaaatagctattccatttttcggatccatgtttctttttgcaaatgtgcttggttgcagcgaaaaccaccgtgcatgtatacgaaagacgatactaaacaagttgggcaaagtattggggttttgatttaggattcttgttaccttttggtgtcg

SEQ ID NO: 76115 - DNA, 1987 bp, Zea Mays
ctcagtttccaccgccgcactcctccacccagaccctcctccctcacggccccacccacctcgcgtcctcgccggaaccctaacggtgaccgcctgccgtgcccatcggcggcgatcgcgttgctgcgcccccgatgagttacctctgcgcgggcagttcgtcgttcgatgaccccgacgtggttgaggtgtcttcggccaccgccgcggctgcggggtgggcctccggccaccacaagaggaagcggagccaggttgtccctcaagaagtaattgaaattgatgatgatgatcctgatggagtcataattattggtgataaagcaccattggacaagaataagcaaactgttgtatgccctatggattggccaaagcatgccaagagtggttgggttcaggacatcgctggcccaagcacatatgcttcaaaatatatcgattcctgtgttgacctgaaagtgtttcaagatgaggcagtttacaactattctgatgactgtccctatgcgggatttgaagactatatgtatgatgaagatgagtttgaggttgatggttatgatgctctgcttattgaaagtgagtttaaatttggtttgtctgccaagtttgataacctccatgctccacctgttctggaggtttctttaccatggatgcagaagactgctattgatattgcaaataagaccaaacccactaaggttgtagatgataaaatcgaagaaaaatacaaggccttcaaacgatttgatactgttgatgatcatagtgatcattattattcaaagccaacgtcgagaaaggttcaggtggtaaaaaagccatcaaaagactgggtgaaacgtatacagcatgagtggaaagtcctagagagagatttgccagatactatatttgtgagggcatatgaggatagaatggacctgcttagaggtgtcattatgggaccggctgggactccttaccatgacgggctcttcttctttgacatatactttcctcctcggtatccaaatgtcccaccgatggtgaattaccgtgctggtggtttgcggcttaatccaaacctgtatgattgcgggaaggtgtgccttagcctcctcaacacctgggacggcagcggatgtgagaagtggaatccggccaattcaactatgctgcaggtcctggtctctatccaggctttggttttgaacgcaaagccctttttcaacgagcctggctacgctatgcatgctaacacggctcacggggagaagaaatcgctggcatataacgaggacacgttcctgctatcctgcaggacgatgttgtattctcttcgaaatccaccaaaggttcttgggaaggttggtttggtgttgatgaatcagttcgtatcaaagaacttcgaggatttcgttgctggccatttccgccagcatgggcgcaacatccttgtcgcttgcagagcctacctggacggtgcccaggttggatgcctatcgggcgatggagtgcaggacgttgatgaaggcgacacgagctgctcggtgaggttcaagcagtcactgaagaaactcgttgaggagctgttgacggagttcactgtgaagggcgcggactgcggcaagttcctcaccgaggagaaggcaaagaggtcgtctggagcttgctccacatggacagcggacaccacattgaggctgacatgaagcattggcccctcatagctcccctgccgtcctacgggagaggaagggacgagcctggcgcaaggtacaacaatttcattggaggatccaatctcactgacgtcatcatcacaggcaaaaatggaacgatcaacgggaaggggaaggtctggtgggacaagttccacgccaaggagctcaagttcatccgcggccacctcctcgagctcctctactctgagaacatcatcatctccaatgtcaccttcgtcaacgcgccgtactggaacctccacctaaatgattag

SEQ ID NO: 76116 - DNA, 1798 bp, Zea Mays
tcagtttccaccgccgcactcctccacccagaccctcctccctcacggccccacccacctcgcgtcctcgccggaaccctaacggtgaccgcctgccgtgcccatcggcggcgatcgcgttgctgcgcccccgatgagttacctctgcgcgggcagttcgtcgttcgatgaccccgacgtggttgaggtgtcttcggccaccgccgcggctgcggggtgggcctccggccaccacaagaggaagcggagccaggttgtccctcaagaagtaattgaaattgatgatgatgatcctgatggagtcataattattggtgataaagcaccattggacaagaataagcaaactgttgtatgccctatggattggccaaagcatgccaagagtggttgggttcaggacatcgctggcccaagcacatatgcttcaaaatatatcgattcctgtgttgacctgaaagtgtttcaagatgaggcagtttacaactattctgatgactgtccctatgcgggatttgaagactatatgtatgatgaagatgagtttgaggttgatggttatgatgctctgcttattgaaagtgagtttaaatttggtttgtctgccaagtttgataacctccatgctccacctgttctggaggtttctttaccatggatgcagaagactgctattgatattgcaaataagaccaaacccactaaggttgtagatgataaaatcgaagaaaaatacaaggccttcaaacgatttgatactgttgatgatcatagtgatcattattattcaaagccaacgtcgagaaaggttcaggtggtaaaaaagccatcaaaagactgggtgaaacgtatacagcatgagtggaaagtcctagagagagatttgccagatactatatttgtgagggcatatgaggatagaatggacctgcttagaggtgtcattatgggaccggctgggactccttaccatgacgggctcttcttctttgacatatactttcctcctcggtatccaaatgtcccaccgatggtgaattaccgtgctggtggtttgcggcttaatccaaacctgtatgattgcgggaaggtgtgccttagcctcctcaacacctgggacggcagcggatgtgagaagtggaatccggccaattcaactatgctgcaggtcctggtctctatccaggctttggttttgaacgcaaagccctttttcaacgagcctggctacgctatgcatgctaacacggctcacggggagaagaaatcgctggcatataacgaggacacgttcctgctatcctgcaggacgatgttgtattctcttcgaaatccaccaaaggttcttgggaaggttggtttggtgttgatgaatcagttcgtatcaaagaacttcgaggatttcgttgctggccatttccgccagcatgggcgcaacatccttgtcgcttgcagagcctacctggacggtgcccaggttggatgcctatcgggcgatggagtgcaggacgttgatgaaggcgacacgagctgctcggtgaggttcaagcagtcactgaagaaactcgttgaggagctgttgacggagttcactgtgaagggcgcggactgcggcaagttcctcaccgaggagaaggcaaagaggtcgtctggagcttgctccacatggacagcggacaccacattgaggctgtgacatgaagcattggcccctcatagctcccctgccgtcctacgggagaggaagggacgagcctggcgcaaggtacaacaatttcattggaggatccaatctcac

SEQ ID NO: 76117 - DNA, 1788 bp, Zea Mays
gaaaattacatttttctgtataagaagaaatctcctctgctcagtttccaccgccgcactcctccacccagaccctcctccctcacggccccacccacctcgcgtcctcgccggaaccctaacggtgaccgcctgccgtgcccatcggcggcgatcgcgttgctgcgcccccgatgagttacctctgcgcgggcagttcgtcgttcgatgaccccgacgtggttgaggtgtcttcggccaccgccgcggctgcggggtgggcctccggccaccacaagaggaagcggagccaggttgtccctcaagaagtaattgaaattgatgatgatgatcctgatggagtcataattattggtgataaagcaccattggacaagaataagcaaactgttgtatgccctatggattggccaaagcatgccaagagtggttgggttcaggacatcgctggcccaagcacatatgcttcaaaatatatcgattcctgtgttgacctgaaagtgtttcaagatgaggcagtttacaactattctgatgactgtccctatgcgggatttgaagactatatgtatgatgaagatgagtttgaggttgatggttatgatgctctgcttattgaaagtgagtttaaatttggtttgtctgccaagtttgataacctccatgctccacctgttctggaggtttctttaccatggatgcagaagactgctattgatattgcaaataagaccaaacccactaaggttgtagatgataaaatcgaagaaaaatacaaggccttcaaacgatttgatactgttgatgatcatagtgatcattattattcaaagccaacgtcgagaaaggttcaggtggtaaaaaagccatcaaaagactgggtgaaacgtatacagcatgagtggaaagtcctagagagagatttgccagatactatatttgtgagggcatatgaggatagaatggacctgcttagaggtgtcattatgggaccggctgggactccttaccatgacgggctcttcttctttgacatatactttcctcctcggtatccaaatgtcccaccgatggtgaattaccgtgctggtggtttgcggcttaatccaaacctgtatgattgcgggaaggtgtgccttagcctcctcaacacctgggacggcagcggatgtgagaagtggaatccggccaattcaactatgctgcaggtcctggtctctatccaggctttggttttgaacgcaaagccctttttcaacgagcctggctacgctatgcatgctaacacggctcacggggagaagaaatcgctggcatataacgaggacacgttcctgctatcctgcaggacgatgttgtattctcttcgaaatccaccaaagaacttcgaggatttcgttgctggccatttccgccagcatgggcgcaacatccttgtcgcttgcagagcctacctggacggtgcccaggttggatgcctatcgggcgatggagtgcaggacgttgatgaaggcgacacgagctgctcggtgaggttcaagcagtcactgaagaaactcgttgaggagctgttgacggagttcactgtgaagggcgcggactgcggcaagttcctcaccgaggagaaggcaaagaggtcgtctggagcttgctccacatggacagcggacaccacattgaggctgacatgaagcattggcccctcatagctcccctgccgtcctacgggagaggaagggacgagcctggcgcaaggtacaacaatttcattggaggatccaatctcac

SEQ ID NO: 76118 - DNA, 2066 bp, Zea Mays
tcagtttccaccgccgcactcctccacccagaccctcctccctcacggccccacccacctcgcgtcctcgccggaaccctaacggtgaccgcctgccgtgcccatcggcggcgatcgcgttgctgcgcccccgatgagttacctctgcgcgggcagttcgtcgttcgatgaccccgacgtggttgaggtgtcttcggccaccgccgcggctgcggggtgggcctccggccaccacaagaggaagcggagccaggttgtccctcaagaagtaattgaaattgatgatgatgatcctgatggagtcataattattggtgataaagcaccattggacaagaataagcaaactgttgtatgccctatggattggccaaagcatgccaaggacatcgctggcccaagcacatatgcttcaaaatatatcgattcctgtgttgacctgaaagtgtttcaagatgaggcagtttacaactattctgatgactgtccctatgcgggatttgaagactatatgtatgatgaagatgagtttgaggttgatggttatgatgctctgcttattgaaagtgagtttaaatttggtttgtctgccaagtttgataacctccatgctccacctgttctggaggtttctttaccatggatgcagaagactgctattgatattgcaaataagaccaaacccactaaggttgtagatgataaaatcgaagaaaaatacaaggccttcaaacgatttgatactgttgatgatcatagtgatcattattattcaaagccaacgtcgagaaaggttcaggtggtaaaaaagccatcaaaagactgggtgaaacgtatacagcatgagtggaaagtcctagagagagatttgccagatactatatttgtgagggcatatgaggatagaatggacctgcttagaggtgtcattatgggaccggctgggactccttaccatgacgggctcttcttctttgacatatactttcctcctcggtatccaaatgtcccaccgatggtgaattaccgtgctggtggtttgcggcttaatccaaacctgtatgattgcgggaaggtgtgccttagcctcctcaacacctgggacggcagcggatgtgagaagtggaatccggccaattcaactatgctgcaggtcctggtctctatccaggctttggttttgaacgcaaagccctttttcaacgagcctggctacgctatgcatgctaacacggctcacggggagaagaaatcgctggcatataacgaggacacgttcctgctatcctgcaggacgatgttgtattctcttcgaaatccaccaaagaacttcgaggatttcgttgctggccatttccgccagcatgggcgcaacatccttgtcgcttgcagagcctacctggacggtgcccaggttggatgcctatcgggcgatggagtgcaggacgttgatgaaggcgacacgagctgctcggtgaggttcaagcagtcactgaagaaactcgttgaggagctgttgacggagttcactgtgaagggcgcggactgcggcaagttcctcaccgaggagaaggcaaagaggtcgtctggagcttgctccacatggacagcggacaccacattgaggctgtaaggcggagtcggcttgctttaagagtttgaagttatacagtagaaacttactattcaggctacggctccattccggccctcagtcgattgtggggtgccacatcgccatatagcatctaactgctttgtgtaggtagtctattttggtgtttgaatgcactagagcctagttagctgctaaaattagctgaagacaaccaaacattatatctgttcagctattagctaattttagcaatttagctaacaattagctagttatttgttagttagctaattttagtagcattttttagccaacaaactattggttctagtgcattcaaacaccccctatctctagctcttctggtaaaaacatatttggcgctcagggacaacattctaccgtagcatgtataaaattcgtcttggtcaggtgtatcgtatgtatc

SEQ ID NO: 76119 - DNA, 2114 bp, Zea Mays
tcagtttccaccgccgcactcctccacccagaccctcctccctcacggccccacccacctcgcgtcctcgccggaaccctaacggtgaccgcctgccgtgcccatcggcggcgatcgcgttgctgcgcccccgatgagttacctctgcgcgggcagttcgtcgttcgatgaccccgacgtggttgaggtgtcttcggccaccgccgcggctgcggggtgggcctccggccaccacaagaggaagcggagccaggttgtccctcaagaagtaattgaaattgatgatgatgatcctgatggagtcataattattggtgataaagcaccattggacaagaataagcaaactgttgtatgccctatggattggccaaagcatgccaaggacatcgctggcccaagcacatatgcttcaaaatatatcgattcctgtgttgacctgaaagtgtttcaagatgaggcagtttacaactattctgatgactgtccctatgcgggatttgaagactatatgtatgatgaagatgagtttgaggttgatggttatgatgctctgcttattgaaagtgagtttaaatttggtttgtctgccaagtttgataacctccatgctccacctgttctggaggtttctttaccatggatgcagaagactgctattgatattgcaaataagaccaaacccactaaggttgtagatgataaaatcgaagaaaaatacaaggccttcaaacgatttgatactgttgatgatcatagtgatcattattattcaaagccaacgtcgagaaaggttcaggtggtaaaaaagccatcaaaagactgggtgaaacgtatacagcatgagtggaaagtcctagagagagatttgccagatactatatttgtgagggcatatgaggatagaatggacctgcttagaggtgtcattatgggaccggctgggactccttaccatgacgggctcttcttctttgacatatactttcctcctcggtatccaaatgtcccaccgatggtgaattaccgtgctggtggtttgcggcttaatccaaacctgtatgattgcgggaaggtgtgccttagcctcctcaacacctgggacggcagcggatgtgagaagtggaatccggccaattcaactatgctgcaggtcctggtctctatccaggctttggttttgaacgcaaagccctttttcaacgagcctggctacgctatgcatgctaacacggctcacggggagaagaaatcgctggcatataacgaggacacgttcctgctatcctgcaggacgatgttgtattctcttcgaaatccaccaaaggttcttgggaaggttggtttggtgttgatgaatcagttcgtatcaaagaacttcgaggatttcgttgctggccatttccgccagcatgggcgcaacatccttgtcgcttgcagagcctacctggacggtgcccaggttggatgcctatcgggcgatggagtgcaggacgttgatgaaggcgacacgagctgctcggtgaggttcaagcagtcactgaagaaactcgttgaggagctgttgacggagttcactgtgaagggcgcggactgcggcaagttcctcaccgaggagaaggcaaagaggtcgtctggagcttgctccacatggacagcggacaccacattgaggctgtaaggcggagtcggcttgctttaagagtttgaagttatacagtagaaacttactattcaggctacggctccattccggccctcagtcgattgtggggtgccacatcgccatatagcatctaactgctttgtgtaggtagtctattttggtgtttgaatgcactagagcctagttagctgctaaaattagctgaagacaaccaaacattatatctgttcagctattagctaattttagcaatttagctaacaattagctagttatttgttagttagctaattttagtagcattttttagccaacaaactattggttctagtgcattcaaacaccccctatctctagctcttctggtaaaaacatatttggcgctcagggacaacattctaccgtagcatgtataaaattcgtcttggtcaggtgtatcgtatgtatc

SEQ ID NO: 76120 - DNA, 1420 bp, Zea Mays
ctcctctgctcagtttccaccgccgcactcctccacccagaccctcctccctcacggccccacccacctcgcgtcctcgccggaaccctaacggtgaccgcctgccgtgcccatcggcggcgatcgcgttgctgcgcccccgatgagttacctctgcgcgggcagttcgtcgttcgatgaccccgacgtggttgaggtgtcttcggccaccgccgcggctgcggggtgggcctccggccaccacaagaggaagcggagccaggttgtccctcaagaagtaattgaaattgatgatgatgatcctgatggagtcataattattggtgataaagcaccattggacaagaataagcaaactgttgtatgccctatggattggccaaagcatgccaagagtggttgggttcaggacatcgctggcccaagcacatatgcttcaaaatatatcgattcctgtgttgacctgaaagtgtttcaagatgaggcagtttacaactattctgatgactgtccctatgcgggatttgaagactatatgtatgatgaagatgagtttgaggttgatggttatgatgctctgcttattgaaagtgagtttaaatttggtttgtctgccaagtttgataacctccatgctccacctgttctggaggtttctttaccatggatgcagaagactgctattgatattgcaaataagaccaaacccactaaggttgtagatgataaaatcgaagaaaaatacaaggccttcaaacgatttgatactgttgatgatcatagtgatcattattattcaaagccaacgtcgagaaaggttcaggtggtaaaaaagccatcaaaagactgggtgaaacgtatacagcatgagtggaaagtcctagagagagatttgccagatactatatttgtgagggcatatgaggatagaatggacctgcttagaggtgtcattatgggaccggctgggactccttaccatgacgggctcttcttctttgacatatactttcctcctcggtatccaaatgtcccaccgatggtgaattaccgtgctggtggtttgcggcttaatccaaacctgtatgattgcgggaaggtgtgccttagcctcctcaacacctgggacggcagcggatgtgagaagtggaatccggccaattcaactatgctgcaggtcctggtctctatccaggctttggttttgaacgcaaagccctttttcaacgagcctggctacgctatgcatgctaacacggctcacggggagaagaaatcgctggcatataacgaggacacgttcctgctatcctgcaggacgatgttgtattctcttcgaaatccaccaaagaagcatctcgagcctcatcaacaagaatggaaaagtttctattcccaatatccgaaataatagctttgg

SEQ ID NO: 76121 - DNA, 826 bp, Zea Mays
aacaaatagacacatgggcccaccacgttggcgaaggcagatattaaaacatgaaaacattttctactcttatttttgttcttgaaccgagttctcatgcttggttcacaaactcaaacagttattgggaggccaatactacctgatgctgctgttcatgctgttgtggaagagcatgccttagatgcaaaagtgatcatattcaagaagaaacggagaaaaaattaccgccggacaaagggccatcgtcaggagttgacaaaactgagaataatcaacattgaaggaatagataagccagagactgctgctgttgctgcctaaattcatgggaaagagaaaattagcagcataccagttaaatgtcggtcagtcagatttcgatagttgataccagtgaaatgtcgcttcttttcttgttaattcaaacgttagaggctgtcagcattatgactcgggtaaagtacctgacatgaagcctatgtaccgagcagtttgggtggtgtggatcagctgatgtagtttacctagtgacacatatttttcatttttggttagcttttctgtgcacatcctttatatatgtgtactcagcctgttcgcctgactttaatttgtactgacttctaattctacagtgtttttgtctctatgcattgaagttgtagcagtccaaatagtcgactttaattttaagcgaacagccccgagcttctactgcttagttccacgttagactgctagagtgtaatagtgaaaccgcccttcggttccatgttagaaagagttaataatgaaaccgcggtgcttcgtttctccctggttc

SEQ ID NO: 76122 - DNA, 1425 bp, Zea Mays
ggattggacatggctctcattggacgcctttaatcgggattgtctgatctgtcactgtgttatgtgtagtctgatctatcactgtgtagtctcgtcaaaaccgctgtcaccgagtatttccatttctacactttcgtgccctccgttcccctgcctccgccgtcgccgcagccatggcgtcgcggcgctgcctcctccgcctactctcgagccgcctcgtccctcagagatctcaaccttttgcaccgggctcgatcgcgacaagaaccctgaccacttcgtccgaggccctcggccccccagctcccggggccctcccctcccctcggctgtactacctctcgcgctgccacttcgcgacccgctcctccggcgacgaggacgacgaatatgaagacgaagaagaacactacgacgaggaggatagcgagggggaatggggggacgatgaggaggcggtggcggcgaagaaaccgagcgggaagacggaagaggagaaggtagcggaggcggcggagatcggctacaaggtgctcgcaccgctcggggctgacgagaaacccttcaagccctacgagcccgtcttcgccatcatcggctcgcatcaattcaaggtgagcaatggcgactcaatcttcacggagaggttgaagttctgtgatgtgaacgacaagttgttcttgaaccgagttctcatgcttggttcacaaactcaaacagttattgggaggccaatactacctgatgctgctgttcatgctgttgtggaagagcatgccttagatgcaaaagtgatcatattcaagaagaaacggagaaaaaattaccgccggacaaagggccatcgtcaggagttgacaaaactgagaataatcaacattgaaggaatagataagccagagactgctgctgttgctgcctaaattcatgggaaagagaaaattagcagcataccagttaaatgtcggtcagtcagatttcgatagttgataccagtgaaatgtcgcttcttttcttgttaattcaaacgttagaggctgtcagcattatgactcgggtaaagtacctgacatgaagcctatgtaccgagcagtttgggtggtgtggatcagctgatgtagtttacctagtgacacatatttttcatttttggttagcttttctgtgcacatcctttatatatgtgtactcagcctgttcgcctgactttaatttgtactgacttctaattctacagtgtttttgtctctatgcattgaagttgtagcagtccaaatagtcgactttaattttaagcgaacagccccgagcttctactgcttagttccacgttagactgctagagtgtaatagtgaaaccgcccttcggttccatgttagaaagagttaataatgaaaccgcggtgcttcgtttctccctggttc

SEQ ID NO: 76123 - DNA, 1621 bp, Zea Mays
gtctaagcacgttccgttcccagcggttcccaccgcgcatcaatcaaaccctaaaccctgctctcgcgccgccgcccgcccgcccgctatgtcgctgccacacccggtgccccgagagacggtggccagcgccgtcgcctccctcacgatgtggatgaagaagcgcacagcgcagacgcgcccaaacctcctcgccgacgagcgcgacgacctcgtcgtcctccagctctcgctccgccgtatccccgcctcgtccagcgccaggccgcgcctcctcccgctcccgcatcccgtcatcggacacgacggcgcctccgtctgcgtaatctcggacgaccgccccaagtcgcggtccccttccgcctccgatctcctccacgcgtcgaagtcgctccaccgcctcccagtctctgacgtcatcccgctctccacgctccgcacggactaccgcccctacgagtcgcggcgccgcctcgcagcctcccacgacctcttcatcgccgaccgcgccattgtcccccttctgccgcgcgtcctcgggaaggcgttctacgccaccaagaaggctccgattggagtcgatttcagccgcgtcggatggccggagcaggtccgcaaggtccttggctctgcttttctgtacctgcggtcggggacctgctcggggatcaaggtgggtaggctggacatggaggaagaggtgatcgtggacaatgtgatggccgcagtggaggaggctgtcgagaaggtgccaaagaagtgggccaacgttagggcactgcatctgaaggctgtggattcagttgctctaccaatttaccaggttgtaccagagttgggtatgaaaatcgaggtgcctgaaattattggatctggggaggttattgatgccgcagaagcggagacttgtgggaagaagattgacaagaagggggatgctggtgcccgtggaagagaggtatttgccaatgtgagtgccaagaggaagaggaataagaaggggcaggttgaggatgatgttgcgatgcaggaagaagtccaggtggagatagagaaaaagaagaggaaaagcattgtgatttctgctaatgacagccagatggctggcaagaagggtgaaaagaagggcaaacgtggtttggaaaataaggtgaacgaagccagtttggacaacaagaaggttaagatggggaagactgagcagaggaagaagaagagcatgaacggtgatggtgaagtcggtactgaggaaatgcagggagataagaagatcaaggtggagaaatcagatgtcaagatcaagaagttgaggaccaggataagagtataagattttccatcaatcagatatacctcaaaacttggtcccttaggtttcttctgaatttgtttcttcaggttttgcgagcttggtagctcaaacctattggttatagaagtatggcagaattgtttcttgctaaagctatgtacttcgcttgactcacaacgattgtgtgttgatcttctaagaatatgcttatgttgtcattgttgtcttggcttctcggaagtatccctcacgatgtacctccccttaataatgatggttctatccggcattttaggctgcattatttgc

SEQ ID NO: 76124 - DNA, 1231 bp, Zea Mays
gggcttgggtagttgagatccaaatttccgccttcaggctcgacaaaaaaaaggctcgggtgacagggacaccgcgggtgcaggcctccaggggcacggcgatgggacagcacgactctcttctctgagaaaacccaacaaaaaccctcgctcgcctcacttgttcgctcacctcggtgcggcgcgtcgttcggacacggagatacagcggcgattccggcgatggagtacgtgaaccccctcaccggcttccgcgtcgacggccgccgccccaacgagatgcggcaactcaagggcgaggtcggcgtcgttgcgcgcgcagacgggtcggcgctgttcgagatgggcaacaccagagtcatcgccgccgtctacggcccgcgagaggttcagaacaaaggtcagcaagtaaacagcaaggaggctttggttcgttgtgagtacaggatggcagagtttagtacaggagatcggaggagaaaaccgaagggtgacaggcgatcaacagaaatttctcttgttattcgacagacaatggaggcaagcatattaacacatttaatgccacactcacagattgatatatatgtccaagttcttcaagctgatggtggaacaaggtcagcttgcataaatgctgcaacactagctcttgcagatgctgggattccaatgcgagacattgccacatcatgtagtgctggttatctgtgttctactcctttgctcgatctgaattacctcgaagacagtgctgggggttctgatgtcactgttggcattcttgcaaagatggacaaagtgactttgcttcagatggatgcaaaattaccaattgatacatttgaaaatgtaatgggacttgcaatagaagggtgcaaagcaattgcaacttacatccgagaggtgctattggagaatacaaagaagcttgagtgtcagcgtggttaaccttaggaggcagtgcaggcaggttgatgacctgaacctacccaacaacggacatcacacagcccattaaaaggcttactggttgtggttgtgggtggctggctctagtgcagtgcacaggaacttccaacggagtatgtgcaagtcgtcagaagttgttcaaggcagcttgtttgtcatcatcaccagggatacaagacatgcttcctcaggtccaaggataagagagagaaattcaagtcatgtcatgccagttgatacatcattaggcttggtagag

SEQ ID NO: 76125 - DNA, 667 bp, Zea Mays
ggagcatacttttctaattattgttgtgcgcaaatggataaaaatagttcaagtgattgcaacaaagaggaagaaatagcctcgtctttgcctaagaagcgtagaaggattgctaaaagcacccctaccaagccaaaggaaagaaaaagagggtttgggattgccaagctagaaaggatgagaatagaagaggaaataaaagagtattttgaagacacccatagtccgtcaccaattcatagagttggcatccaaggcttgatgatgtatggaacaagaagagaagagatgagtgaacggttcaagattcctatgataaggtcatcttatgtcaatccaaacagcatgattcctacacaactgcatctctttgaagcacctaatcatatggaatatgatcatattgacatgaaaaggaaggacgatgggaacctattggaggagtccaccagcaagaacttcaattatgacccacaagaacttgatcttgacttgaagctataatcctagaactcatagaagtgtctagtccaatcattcaatatgatggtggttccaacattttacaaagtgaaattgtatgagtttgatgcatggtcttgaatttgagaaccaatattggttctataaactaataaataatatgtgatcaaatagatcaaggatt

SEQ ID NO: 76126 - DNA, 1660 bp, Zea Mays
cacacacgtctatgccatccacggaccatggtgtgccctctacttatcctcctctcggctacctccaccattcctctgctcagctcgaacgaacaaaaaggactcacctcggccctctcctcttgtgcttctgcttccccaccgagtctcctcaaccccaggcactcgccctctgtcccctcccttcctcgcctccgatgccgccgccgccgccgctcctcgagccgcgcgactacctcggcgccggcgccacctcgtcgtgctgctcgtcgtgctgctcctccggccgcgagggcgcggggccccacctcgcgctgcggctcgggcttccggggtccgacgactcccccggccgcggcgcggacacggagcacgcccgcgcccacgtcgacgccgcgctcaccctcggccccggccccggccccgcgcctcccaggggcagcgccaagcgcgggttcgccgactccctcgaccggtccgcgaagctggacggcgttgccgcggatgacgctgctgggggcgtcacgcgggtagctggagctgctgccggagctccgcccgctgccaaggcacaagttgttggatggccgcctgttaggagctaccggaagaataccctagctgccagtgccacaaagacaaatgggggagatgaaggtaggagtgaggcgggatgctgttatgtcaaggtcagcatggatggagccccatacctaaggaaggtggacctcaagacctattcaagctatgaggatctctcgcttggtctggagaaaatgttcagttgcttcatcactggtcaaaacagttcatgcaagacttcaagaagggataggcttactgatggttctagggttgatgcccttcaggaccaagaatatgtccttacttacgaagataaagatgctgactggatgctcgttggtgatctgccctgggacttgttcaccacattttgccggaaacttaggatcatgagaggctctgatgctgctggcatggctcctccaagaccaccggaacagacagttcggaacaaatgagggcggacagcttacttacctggcgctgaactgaagggagagcgacgctgccttggtcaggccttctttcacttgtgcagtgggatctgcgtcctgctgtctcggacgcccattttgcccacgagctggtcgtcacgtgctgtcgctttttgtctgggaaagatagcgtactgcttgctgtatgatactttcatctgtgttcggaagtttgtagcgcttcatatcctggaagggagtaaagaaaatgtccatgctgtccggtgagaatttctttccccgtgctgtgtctgcgagtcaaactaactattgagcgatatgagcatgcattggcatcagtttacctgccagtttgctgccccagtttgctgcctaggatccgaatccgaagctcgcgaaggctgctttacctgccacagtggcctgttctcttcacggccacacaaggtccccttgttcgtaggggactcattaatcaaccaagctaaagaacaagttcggcttatttgtgaactcgagttggctcgcgagcaaaaaaaaaatagtatacatgtgtatatacaacaatataatcaattgttagttaattttataataatttaaattatgcgggttttctc

SEQ ID NO: 76127 - DNA, 1671 bp, Zea Mays
cacacacgtctatgccatccacggaccatggtgtgccctctacttatcctcctctcggctacctccaccattcctctgctcagctcgaacgaacaaaaaggactcacctcggccctctcctcttgtgcttctgcttccccaccgagtctcctcaaccccaggcactcgccctctgtcccctcccttcctcgcctccgatgccgccgccgccgccgctcctcgagccgcgcgactacctcggcgccggcgccacctcgtcgtgctgctcgtcgtgctgctcctccggccgcgagggcgcggggccccacctcgcgctgcggctcgggcttccggggtccgacgactcccccggccgcggcgcggacacggagcacgcccgcgcccacgtcgacgccgcgctcaccctcggccccggccccggccccgcgcctcccaggggcagcgccaagcgcgggttcgccgactccctcgaccggtccgcgaagctggacggcgttgccgcggatgacgctgctgggggcgtcacgcgggtagctggagctgctgccggagctccgcccgctgccaaggcacaagttgttggatggccgcctgttaggagctaccggaagaataccctagctgccagtgccacaaagacaaatgggggagatgaaggtaggagtgaggcgggatgctgttatgtcaaggtcagcatggatggagccccatacctaaggaaggtggacctcaagacctattcaagctatgaggatctctcgcttggtctggagaaaatgttcagttgcttcatcactgtgatattgcaggtcaaaacagttcatgcaagacttcaagaagggataggcttactgatggttctagggttgatgcccttcaggaccaagaatatgtccttacttacgaagataaagatgctgactggatgctcgttggtgatctgccctgggacttgttcaccacattttgccggaaacttaggatcatgagaggctctgatgctgctggcatggctcctccaagaccaccggaacagacagttcggaacaaatgagggcggacagcttacttacctggcgctgaactgaagggagagcgacgctgccttggtcaggccttctttcacttgtgcagtgggatctgcgtcctgctgtctcggacgcccattttgcccacgagctggtcgtcacgtgctgtcgctttttgtctgggaaagatagcgtactgcttgctgtatgatactttcatctgtgttcggaagtttgtagcgcttcatatcctggaagggagtaaagaaaatgtccatgctgtccggtgagaatttctttccccgtgctgtgtctgcgagtcaaactaactattgagcgatatgagcatgcattggcatcagtttacctgccagtttgctgccccagtttgctgcctaggatccgaatccgaagctcgcgaaggctgctttacctgccacagtggcctgttctcttcacggccacacaaggtccccttgttcgtaggggactcattaatcaaccaagctaaagaacaagttcggcttatttgtgaactcgagttggctcgcgagcaaaaaaaaaatagtatacatgtgtatatacaacaatataatcaattgttagttaattttataataatttaaattatgcgggttttctc

SEQ ID NO: 76128 - DNA, 1702 bp, Zea Mays
ggccggtcggccacttgtcactgtcacactcacacacgtctatgccatccacggaccatggtgtgccctctacttatcctcctctcggctacctccaccattcctctgctcagctcgaacgaacaaaaaggactcacctcggccctctcctcttgtgcttctgcttccccaccgagtctcctcaaccccaggcactcgccctctgtcccctcccttcctcgcctccgatgccgccgccgccgccgctcctcgagccgcgcgactacctcggcgccggcgccacctcgtcgtgctgctcgtcgtgctgctcctccggccgcgagggcgcggggccccacctcgcgctgcggctcgggcttccggggtccgacgactcccccggccgcggcgcggacacggagcacgcccgcgcccacgtcgacgccgcgctcaccctcggccccggccccggccccgcgcctcccaggggcagcgccaagcgcgggttcgccgactccctcgaccggtccgcgaagctggacggcgttgccgcggatgacgctgctgggggcgtcacgcgggtagctggagctgctgccggagctccgcccgctgccaatgccatggacagggcacaagttgttggatggccgcctgttaggagctaccggaagaataccctagctgccagtgccacaaagacaaatgggggagatgaaggtaggagtgaggcgggatgctgttatgtcaaggtcagcatggatggagccccatacctaaggaaggtggacctcaagacctattcaagctatgaggatctctcgcttggtctggagaaaatgttcagttgcttcatcactggtcaaaacagttcatgcaagacttcaagaagggataggcttactgatggttctagggttgatgcccttcaggaccaagaatatgtccttacttacgaagataaagatgctgactggatgctcgttggtgatctgccctgggacttgttcaccacattttgccggaaacttaggatcatgagaggctctgatgctgctggcatggctcctccaagaccaccggaacagacagttcggaacaaatgagggcggacagcttacttacctggcgctgaactgaagggagagcgacgctgccttggtcaggccttctttcacttgtgcagtgggatctgcgtcctgctgtctcggacgcccattttgcccacgagctggtcgtcacgtgctgtcgctttttgtctgggaaagatagcgtactgcttgctgtatgatactttcatctgtgttcggaagtttgtagcgcttcatatcctggaagggagtaaagaaaatgtccatgctgtccggtgagaatttctttccccgtgctgtgtctgcgagtcaaactaactattgagcgatatgagcatgcattggcatcagtttacctgccagtttgctgccccagtttgctgcctaggatccgaatccgaagctcgcgaaggctgctttacctgccacagtggcctgttctcttcacggccacacaaggtccccttgttcgtaggggactcattaatcaaccaagctaaagaacaagttcggcttatttgtgaactcgagttggctcgcgagcaaaaaaaaaatagtatacatgtgtatatacaacaatataatcaattgttagttaattttataataatttaaattatgcgggttttctc

SEQ ID NO: 76129 - DNA, 1586 bp, Zea Mays
ccgagactggaactggagggcagaaagcgcttgcccgcggccggtcggccacttgtcactgtcacactcacacacgtctatgccatccacggaccatggtgtgccctctacttatcctcctctcggctacctccaccattcctctgctcagctcgaacgaacaaaaaggactcacctcggccctctcctcttgtgcttctgcttccccaccgagtctcctcaaccccaggcactcgccctctgtcccctcccttcctcgcctccgatgccgccgccgccgccgctcctcgagccgcgcgactacctcggcgccggcgccacctcgtcgtgctgctcgtcgtgctgctcctccggccgcgagggcgcggggccccacctcgcgctgcggctcgggcttccggggtccgacgactcccccggccgcggcgcggacacggagcacgcccgcgcccacgtcgacgccgcgctcaccctcggccccggccccggccccgcgcctcccaggggcagcgccaagcgcgggttcgccgactccctcgaccggtccgcgaagctggacggcgttgccgcggatgacgctgctgggggcgtcacgcgggtagctggagctgctgccggagctccgcccgctgccaaggcacaagttgttggatggccgcctgttaggagctaccggaagaataccctagctgccagtgccacaaagacaaatgggggagatgaaggtaggagtgaggcgggatgctgttatgtcaaggtcagcatggatggagccccatacctaaggaaggtggacctcaagacctattcaagctatgaggatctctcgcttggtctggagaaaatgttcagttgcttcatcactgcttgttcaccacattttgccggaaacttaggatcatgagaggctctgatgctgctggcatggctcctccaagaccaccggaacagacagttcggaacaaatgagggcggacagcttacttacctggcgctgaactgaagggagagcgacgctgccttggtcaggccttctttcacttgtgcagtgggatctgcgtcctgctgtctcggacgcccattttgcccacgagctggtcgtcacgtgctgtcgctttttgtctgggaaagatagcgtactgcttgctgtatgatactttcatctgtgttcggaagtttgtagcgcttcatatcctggaagggagtaaagaaaatgtccatgctgtccggtgagaatttctttccccgtgctgtgtctgcgagtcaaactaactattgagcgatatgagcatgcattggcatcagtttacctgccagtttgctgccccagtttgctgcctaggatccgaatccgaagctcgcgaaggctgctttacctgccacagtggcctgttctcttcacggccacacaaggtccccttgttcgtaggggactcattaatcaaccaagctaaagaacaagttcggcttatttgtgaactcgagttggctcgcgagcaaaaaaaaaatagtatacatgtgtatatacaacaatataatcaattgttagttaattttataataatttaaattatgcgggttttctc

SEQ ID NO: 76130 - DNA, 1174 bp, Zea Mays
gtgccatgatcatatggttgctactgaaatggaccttgaaagggaaaaggctgccagggcagaaattgagaaaacatcttcccgtgaagcgcctaaagctccacttcccgatcaaacaagaaatgcccctctcagaaagctgtctagttctggcagtataaatagtctagaagaaagccattttcttcaagcatcgttggatttatctgacaatgcttcattagagaggcgaatgtcttcagaaagtaatatgtcgtattatctgaagaccatgactccaagtgcttttgaatcagcacttcgtcaaaaagatggagagctggcttcttacatgtcacgcttggcctcattggaatctattcggaattcactagcagaggagttggtaaaactgacagaacaatgtgaaaagttacggactgaagccactgctgtgcctggcttaagggctgaattggaagctctgaaacaaaggcactttcaagctctagaactcatgggggaacgtgatgaagagttggaggagctaagaaatgatattgttgacttaaaagagatgtacagagagcaggtggatcttcttgttagccagctccagtcattgggtgctcgtgtatagcgctgcctgcgctggtatgaatttgtcataccatctaattctcgtccagtgcatcgcggccaggccaagataccagttgttgggtttaggaggatacgttgttgtatactagtaggttgagtagtttcacagctttacgtgtattctttgtgatttgtttccgttgaaatgtatcaaatttgaatccatttgcaagtgtacctcagaggaatgcaatcaataatatcgagagctccttttgtccctttttgtatgttttattctcagtttcattcatagagatcatgtgggagctgtggaaggcaaatagccaaacaatgttccataataacgatcgttcagttctttttatcgccgatttgttcaggccattcgagttcccgcccttttctcttgtttccttccctatcttaagtttgtaaccaaagatataaaagaagttacagaagttctgtttggaattagaatgaaagatttgccatgctcatgcactcatgctacagcagttcagtgcgcagctctgcagaagaacaaagcgaagccacgctgtagaac

SEQ ID NO: 76131 - DNA, 4133 bp, Zea Mays
cactgctcactgcaccgagccgagcgcaggttaggcgggcgcgcgatcaccgaagccgacgcggcgcccgcacgcgccaacggccgaacgcactctctctctctctctctctctctctctctctcccctctccgttgtgctccccgacccaaccctacgcgctcctgccgcccccccgcaggccgcagctacatctctcctcccacctcgccagtcgccaccgcgcggtgggagctcgctgaagtgcttccccccgctttgcggcagcgtcagctcagaccccttgcccgcgctctcgttgtctggcgggctcagctggtttggtcagcgtggcgaggttgtcctggccagatcctgctcccgcccgcgcacgactgggtgtgggcggtggattggctgcgcgggtcatcagatctatgccggagatctagggcgccaggtgccgaggtggaggccgtgagccggtggcgatcggagggccgaggacagggatggcgtggtggtccgggaaggtgtcgctcggcggcctgcaggacatcgctggagccgtcaacaagatcagcgagagcgtgaagaacatcgaaaagaacttcgacagcgcgctcggcctagaggagaagcgtgacgatgaagatgcatcaggatcacagacatccaactctgatagaataggattcttcaatcctgtcatggctttcatgggacacaatggtgaggaggatggcactgaagtatcagaaaagccacaatctctgaagaatctgtcagcagaggaaggaattaatagcacaccaactaagaaacatatatctgaggtagatccttcggaagtatcaggaacaacatctccaaaactgccttcaaaatcggaagaagttcatagtatttccaatgggtcacctgtttctaaggcagatgtttctgagcaatccataacaccacaaactccaacacatccttcagtagcagaagaaaagcttgatagctctactgaggcacctgcatctaaggtgggtgatgctgaagcatcagaaacatcacaatctgcaggacatccttcaacagtggaagaaaaccagcaccatcaagttagcaaacattctgatcctagtgatgaagcagagccgaatcagcttagagagtctgttcgagacttacctgatggtagtgcatcttcttcgcctactaaaatacatcaatcaggtgacaccgaaacaggggaatctattcacacaggaaaggaagatacgtctgataggaacatcttgcagtcacaaccagcagagtctgcgctagctagttcagatgatataacggaagctgaggacaatattgctcaagaatatgatgccccaaaagaacttagtggcccacaggagagtagtgatatggtagacaaaggtactcatcttgaagttaaattacatgatagcaatattaatactgaaaaaagtgaggaagaaagcaataagatggagtcaggggaatcatctgttgttgtacaggaggataatgcaatggagcaacctcaagacttaacgttgaagtccttaactgcagagcatgactcaaattcgcagaacgagtcagtgatcaattcgactgatatacctgttggactaggtgaaggtcctccaaatgattttacaaaagaagaaaagattctagaatctgttagaggcacagattctcagactctggactctgttgtttctgtcgatgagctagagaaattaagacgtgaattgaagatgatggaagctgcattgcaaggtgctgcaagacagtcacagtccaaagctgatgaaattgcaaggttgataaatgagaatgagcaactaaaatcaacaatcgatgatctcaagagtaagtcatctgaagcagaaatggattcactgaaggatgaatatcaccaaagagtagcaactcttgaaaggaaggtatatgcactaaccaaagagcgtgatacactaaggagagaacagaataaaaaaagtgatgcagctgcccttttgaaagaaaaggatgagatcatcaatcagattcgtgagtttgaagaagaaaaacaacgcctgaactcaaagatccaggttgaggaggctaaggttgagagcatcaagagagacaaagcagcaactgagaagttgcttcaagaaacaatagaaagaaatcagactgaacttgcagctcaaaaggagttctacaccaatgctcttaatgcggctaaagaggctgaggcattggctgaagcaagagtcaacagtgaagccaaaattgaactggagaatcttttaggagaagctggtgaaaaagaaaatatgctgattaagacaatcgaggagttgaggcattttctcacccggcaagaacaggaggctgctttcagggaaaaaagactaaaaggggactatgatgatcttcaaaagcggtatcaagccagtgaacttcgttataatgaactggtaacgcaagttcctgagtctaccagaccgcttctaagacaaattgaagccatgcaggagacaactgctcgaagggaagatgcttgggctggtgtggagagaaccttaaactctcgccttcaggaagcagaagctaaagctgcttcttcagaagaaaaggagcgatctgtaaatgagagattgtcacaaagtttatcccggataactgtccttgagacccagattacaattcttagaacagagcagacacagctgagccgatctcttgaaaaggagaggcagagagcatctgaaagtagacaggagtacctagcaatcaaagaggaggcagcaatacaagaagggcgagctaaacagtttgaagaagagatgaaggagcttagagctaggcacaaggaggagctgcaagaagcagcagaacacagggacctgcttgagaaggaccttgaaagggaaaaggctgccagggcagaaattgagaaaacatcttcccgtgaagcgcctaaagctccacttcccgatcaaacaagaaatgcccctctcagaaagctgtctagttctggcagtataaatagtctagaagaaagccattttcttcaagcatcgttggatttatctgacaatgcttcattagagaggcgaatgtcttcagaaagtaatatgtcgtattatctgaagaccatgactccaagtgcttttgaatcagcacttcgtcaaaaagatggagagctggcttcttacatgtcacgcttggcctcattggaatctattcggaattcactagcagaggagttggtaaaactgacagaacaatgtgaaaagttacggactgaagccactgctgtgcctggcttaagggctgaattggaagctctgaaacaaaggcactttcaagctctagaactcatgggggaacgtgatgaagagttggaggagctaagaaatgatattgttgacttaaaagagatgtacagagagcaggtggatcttcttgttagccagctccagtcattgggtgctcgtgtatagcgctgcctgcgctggtatgaatttgtcataccatctaattctcgtccagtgcatcgcggccaggccaagataccaggtccgtgacttgagcatgttttgtttcaaattttgtaacaccatacaacggcactgaatgttttcgtttgtatacatcggaacacagttgttgggtttaggaggatacgttgttgtatactagtaggttgagtagtttcacagctttacgtgtattctttgtgatttgtttccgttgaaatgtatcaaatttgaatccatttgcaagtgtacctcagaggaatgcaatcaataatatcgagagctccttttgtccctttttgtatgttttattctcagtttcattcatagagatcatgtgggagctgtggaaggcaaatagccaaacaatgttccataataacgatcgttcagttctttttatcgccgatttgttcaggccattcgagttcccgcccttttctcttgtttccttccctatcttaagtttgtaaccaaagatataaaagaagttacagaagttctgtttggaattagaatgaaagatttgccatgctcatgcactcatgctacagcagttcagtgcgcagctctgcagaagaacaaagcgaagccacgctgtagaac

SEQ ID NO: 76132 - DNA, 3698 bp, Zea Mays
caggccgagatccactgctcactgcaccgagccgagcgcaggttaggcgggcgcgcgatcaccgaagccgacgcggcgcccgcacgcgccaacggccgaacgcactctctctctctctctctctctctctctctctcccctctccgttgtgctccccgacccaaccctacgcgctcctgccgcccccccgcaggccgcagctacatctctcctcccacctcgccagtcgccaccgcgcggtgggagctcgctgaagtgcttccccccgctttgcggcagcgtcagctcagaccccttgcccgcgctctcgttgtctggcgggctcagctggtttggtcagcgtggcgaggttgtcctggccagatcctgctcccgcccgcgcacgactgggtgtgggcggtggattggctgcgcgggtcatcagatctatgccggagatctagggcgccaggtgccgaggtggaggccgtgagccggtggcgatcggagggccgaggacagggatggcgtggtggtccgggaaggtgtcgctcggcggcctgcaggacatcgctggagccgtcaacaagatcagcgagagcgtgaagaacatcgaaaagaacttcgacagcgcgctcggcctagaggagaagcgtgacgatgaagatgcatcaggatcacagacatccaactctgatagaataggattcttcaatcctgtcatggctttcatgggacacaatggtgaggaggatggcactgaagtatcagaaaagccacaatctctgaagaatctgtcagcagaggaaggaattaatagcacaccaactaagaaacatatatctgaggtagatccttcggaagtatcaggaacaacatctccaaaactgccttcaaaatcggaagaagttcatagtatttccaatgggtcacctgtttctaaggcagatgtttctgagcaatccataacaccacaaactccaacacatccttcagtagcagaagaaaagcttgatagctctactgaggcacctgcatctaaggtgggtgatgctgaagcatcagaaacatcacaatctgcaggacatccttcaacagtggaagaaaaccagcaccatcaagttagcaaacattctgatcctagtgatgaagcagagccgaatcagcttagagagtctgttcgagacttacctgatggtagtgcatcttcttcgcctactaaaatacatcaatcaggtgacaccgaaacaggggaatctattcacacaggaaaggaagatacgtctgataggaacatcttgcagtcacaaccagcagagtctgcgctagctagttcagatgatataacggaagctgaggacaatattgctcaagaatatgatgccccaaaagaacttagtggcccacaggagagtagtgatatggtagacaaaggtactcatcttgaagttaaattacatgatagcaatattaatactgaaaaaagtgaggaagaaagcaataagatggagtcaggggaatcatctgttgttgtacaggaggataatgcaatggagcaacctcaagacttaacgttgaagtccttaactgcagagcatgactcaaattcgcagaacgagtcagtgatcaattcgactgatatacctgttggactaggtgaaggtcctccaaatgattttacaaaagaagaaaagattctagaatctgttagaggcacagattctcagactctggactctgttgtttctgtcgatgagctagagaaattaagacgtgaattgaagatgatggaagctgcattgcaaggtgctgcaagacagtcacagtccaaagctgatgaaattgcaaggttgataaatgagaatgagcaactaaaatcaacaatcgatgatctcaagagtaagtcatctgaagcagaaatggattcactgaaggatgaatatcaccaaagagtagcaactcttgaaaggaaggtatatgcactaaccaaagagcgtgatacactaaggagagaacagaataaaaaaagtgatgcagctgcccttttgaaagaaaaggatgagatcatcaatcaggtcatggctgaaggtgaagaactatccaaaaaacaagctgctcaagaagctacaatacgaaaactgagagcacagattcgtgagtttgaagaagaaaaacaacgcctgaactcaaagatccaggttgaggaggctaaggttgagagcatcaagagagacaaagcagcaactgagaagttgcttcaagaaacaatagaaagaaatcagactgaacttgcagctcaaaaggagttctacaccaatgctcttaatgcggctaaagaggctgaggcattggctgaagcaagagtcaacagtgaagccaaaattgaactggagaatcttttaggagaagctggtgaaaaagaaaatatgctgattaagacaatcgaggagttgaggcattttctcacccggcaagaacaggaggctgctttcagggaaaaaagactaaaaggggactatgatgatcttcaaaagcggtatcaagccagtgaacttcgttataatgaactggtaacgcaagttcctgagtctaccagaccgcttctaagacaaattgaagccatgcaggagacaactgctcgaagggaagatgcttgggctggtgtggagagaaccttaaactctcgccttcaggaagcagaagctaaagctgcttcttcagaagaaaaggagcgatctgtaaatgagagattgtcacaaagtttatcccggataactgtccttgagacccagattacaattcttagaacagagcagacacagctgagccgatctcttgaaaaggagaggcagagagcatctgaaagtagacaggagtacctagcaatcaaagaggaggcagcaatacaagaagggcgagctaaacagtttgaagaagagatgaaggagcttagagctaggcacaaggaggagctgcaagaagcagcagaacacagggacctgcttgagaaggaccttgaaagggaaaaggctgccagggcagaaattgagaaaacatcttcccgtgaagcgcctaaagctccacttcccgatcaaacaagaaatgcccctctcagaaagctgtctagttctggcagtataaatagtctagaagaaagccattttcttcaagcatcgttggatttatctgacaatgcttcattagagaggcgaatgtcttcagaaagtaatatgtcgtattatctgaagaccatgactccaagtgcttttgaatcagcacttcgtcaaaaagatggagagctggcttcttacatgtcacgcttggcctcattggaatctattcggaattcactagcagaggagttggtaaaactgacagaacaatgtgaaaagttacggactgaagccactgctgtgcctggcttaagggctgaattggaagctctgaaacaaaggcactttcaagctctagaactcatgggggaacgtgatgaagagttggaggagctaagaaatgatattgttgacttaaaagagatgtacagagagcaggtggatcttcttgttagccagctccagtcattgggtgctcgtgtatagcgctgcctgcgctggtatgaatttgtcataccatctaattctcgtccagtgcatcgcggccaggccaagataccagtgcgcagctctgcagaagaacaaagcgaagccacgctgtagaac

SEQ ID NO: 76133 - DNA, 4237 bp, Zea Mays
gatggttcttcttcgttcaggccgagatccactgctcactgcaccgagccgagcgcaggttaggcgggcgcgcgatcaccgaagccgacgcggcgcccgcacgcgccaacggccgaacgcactctctctctctctctctctctctctctctctcccctctccgttgtgctccccgacccaaccctacgcgctcctgccgcccccccgcaggccgcagctacatctctcctcccacctcgccagtcgccaccgcgcggtgggagctcgctgaagtgcttccccccgctttgcggcagcgtcagctcagaccccttgcccgcgctctcgttgtctggcgggctcagctggtttggtcagcgtggcgaggttgtcctggccagatcctgctcccgcccgcgcacgactgggtgtgggcggtggattggctgcgcgggtcatcagatctatgccggagatctagggcgccaggtgccgaggtggaggccgtgagccggtggcgatcggagggccgaggacagggatggcgtggtggtccgggaaggtgtcgctcggcggcctgcaggacatcgctggagccgtcaacaagatcagcgagagcgtgaagaacatcgaaaagaacttcgacagcgcgctcggcctagaggagaagcgtgacgatgaagatgcatcaggatcacagacatccaactctgatagaataggattcttcaatcctgtcatggctttcatgggacacaatggtgaggaggatggcactgaagtatcagaaaagccacaatctctgaagaatctgtcagcagaggaaggaattaatagcacaccaactaagaaacatatatctgaggtagatccttcggaagtatcaggaacaacatctccaaaactgccttcaaaatcggaagaagttcatagtatttccaatgggtcacctgtttctaaggcagatgtttctgagcaatccataacaccacaaactccaacacatccttcagtagcagaagaaaagcttgatagctctactgaggcacctgcatctaaggtgggtgatgctgaagcatcagaaacatcacaatctgcaggacatccttcaacagtggaagaaaaccagcaccatcaagttagcaaacattctgatcctagtgatgaagcagagccgaatcagcttagagagtctgttcgagacttacctgatggtagtgcatcttcttcgcctactaaaatacatcaatcaggtgacaccgaaacaggggaatctattcacacaggaaaggaagatacgtctgataggaacatcttgcagtcacaaccagcagagtctgcgctagctagttcagatgatataacggaagctgaggacaatattgctcaagaatatgatgccccaaaagaacttagtggcccacaggagagtagtgatatggtagacaaaggtactcatcttgaagttaaattacatgatagcaatattaatactgaaaaaagtgaggaagaaagcaataagatggagtcaggggaatcatctgttgttgtacaggaggataatgcaatggagcaacctcaagacttaacgttgaagtccttaactgcagagcatgactcaaattcgcagaacgagtcagtgatcaattcgactgatatacctgttggactaggtgaaggtcctccaaatgattttacaaaagaagaaaagattctagaatctgttagaggcacagattctcagactctggactctgttgtttctgtcgatgagctagagaaattaagacgtgaattgaagatgatggaagctgcattgcaaggtgctgcaagacagtcacagtccaaagctgatgaaattgcaaggttgataaatgagaatgagcaactaaaatcaacaatcgatgatctcaagagtaagtcatctgaagcagaaatggattcactgaaggatgaatatcaccaaagagtagcaactcttgaaaggaaggtatatgcactaaccaaagagcgtgatacactaaggagagaacagaataaaaaaagtgatgcagctgcccttttgaaagaaaaggatgagatcatcaatcaggtcatggctgaaggtgaagaactatccaaaaaacaagctgctcaagaagctacaatacgaaaactgagagcacagattcgtgagtttgaagaagaaaaacaacgcctgaactcaaagatccaggttgaggaggctaaggttgagagcatcaagagagacaaagcagcaactgagaagttgcttcaagaaacaatagaaagaaatcagactgaacttgcagctcaaaaggagttctacaccaatgctcttaatgcggctaaagaggctgaggcattggctgaagcaagagtcaacagtgaagccaaaattgaactggagaatcttttaggagaagctggtgaaaaagaaaatatgctgattaagacaatcgaggagttgaggcattttctcacccggcaagaacaggaggctgctttcagggaaaaaagactaaaaggggactatgatgatcttcaaaagcggtatcaagccagtgaacttcgttataatgaactggtaacgcaagttcctgagtctaccagaccgcttctaagacaaattgaagccatgcaggagacaactgctcgaagggaagatgcttgggctggtgtggagagaaccttaaactctcgccttcaggaagcagaagctaaagctgcttcttcagaagaaaaggagcgatctgtaaatgagagattgtcacaaagtttatcccggataactgtccttgagacccagattacaattcttagaacagagcagacacagctgagccgatctcttgaaaaggagaggcagagagcatctgaaagtagacaggagtacctagcaatcaaagaggaggcagcaatacaagaagggcgagctaaacagtttgaagaagagatgaaggagcttagagctaggcacaaggaggagctgcaagaagcagcagaacacagggacctgcttgagaaggaccttgaaagggaaaaggctgccagggcagaaattgagaaaacatcttcccgtgaagcgcctaaagctccacttcccgatcaaacaagaaatgcccctctcagaaagctgtctagttctggcagtataaatagtctagaagaaagccattttcttcaagcatcgttggatttatctgacaatgcttcattagagaggcgaatgtcttcagaaagtaatatgtcgtattatctgaagaccatgactccaagtgcttttgaatcagcacttcgtcaaaaagatggagagctggcttcttacatgtcacgcttggcctcattggaatctattcggaattcactagcagaggagttggtaaaactgacagaacaatgtgaaaagttacggactgaagccactgctgtgcctggcttaagggctgaattggaagctctgaaacaaaggcactttcaagctctagaactcatgggggaacgtgatgaagagttggaggagctaagaaatgatattgttgacttaaaagagatgtacagagagcaggtggatcttcttgttagccagctccagtcattgggtgctcgtgtatagcgctgcctgcgctggtatgaatttgtcataccatctaattctcgtccagtgcatcgcggccaggccaagataccaggtccgtgacttgagcatgttttgtttcaaattttgtaacaccatacaacggcactgaatgttttcgtttgtatacatcggaacacagttgttgggtttaggaggatacgttgttgtatactagtaggttgagtagtttcacagctttacgtgtattctttgtgatttgtttccgttgaaatgtatcaaatttgaatccatttgcaagtgtacctcagaggaatgcaatcaataatatcgagagctccttttgtccctttttgtatgttttattctcagtttcattcatagagatcatgtgggagctgtggaaggcaaatagccaaacaatgttccataataacgatcgttcagttctttttatcgccgatttgttcaggccattcgagttcccgcccttttctcttgtttccttccctatcttaagtttgtaaccaaagatataaaagaagttacagaagttctgtttggaattagaatgaaagatttgccatgctcatgcactcatgctacagcagttcagtgcgcagctctgcagaagaacaaagcgaagccacgctgtagaac

SEQ ID NO: 76134 - DNA, 3120 bp, Zea Mays
cactgctcactgcaccgagccgagcgcaggttaggcgggcgcgcgatcaccgaagccgacgcggcgcccgcacgcgccaacggccgaacgcactctctctctctctctctctctctctctctctcccctctccgttgtgctccccgacccaaccctacgcgctcctgccgcccccccgcaggccgcagctacatctctcctcccacctcgccagtcgccaccgcgcggtgggagctcgctgaagtgcttccccccgctttgcggcagcgtcagctcagaccccttgcccgcgctctcgttgtctggcgggctcagctggtttggtcagcgtggcgaggttgtcctggccagatcctgctcccgcccgcgcacgactgggtgtgggcggtggattggctgcgcgggtcatcagatctatgccggagatctagggcgccaggtgccgaggtggaggccgtgagccggtggcgatcggagggccgaggacagggatggcgtggtggtccgggaaggtgtcgctcggcggcctgcaggacatcgctggagccgtcaacaagatcagcgagagcgtgaagaacatcgaaaagaacttcgacagcgcgctcggcctagaggagaagcgtgacgatgaagatgcatcaggatcacagacatccaactctgatagaataggattcttcaatcctgtcatggctttcatgggacacaatggtgaggaggatggcactgaagtatcagaaaagccacaatctctgaagaatctgtcagcagaggaaggaattaatagcacaccaactaagaaacatatatctgaggtagatccttcggaagtatcaggaacaacatctccaaaactgccttcaaaatcggaagaagttcatagtatttccaatgggtcacctgtttctaaggcagatgtttctgagcaatccataacaccacaaactccaacacatccttcagtagcagaagaaaagcttgatagctctactgaggcacctgcatctaaggtgggtgatgctgaagcatcagaaacatcacaatctgcaggacatccttcaacagtggaagaaaaccagcaccatcaagttagcaaacattctgatcctagtgatgaagcagagccgaatcagcttagagagtctgttcgagacttacctgatggtagtgcatcttcttcgcctactaaaatacatcaatcaggtgacaccgaaacaggggaatctattcacacaggaaaggaagatacgtctgataggaacatcttgcagtcacaaccagcagagtctgcgctagctagttcagatgatataacggaagctgaggacaatattgctcaagaatatgatgccccaaaagaacttagtggcccacaggagagtagtgatatggtagacaaaggtactcatcttgaagttaaattacatgatagcaatattaatactgaaaaaagtgaggaagaaagcaataagatggagtcaggggaatcatctgttgttgtacaggaggataatgcaatggagcaacctcaagacttaacgttgaagtccttaactgcagagcatgactcaaattcgcagaacgagtcagtgatcaattcgactgatatacctgttggactaggtgaaggtcctccaaatgattttacaaaagaagaaaagattctagaatctgttagaggcacagattctcagactctggactctgttgtttctgtcgatgagctagagaaattaagacgtgaattgaagatgatggaagctgcattgcaaggtgctgcaagacagtcacagtccaaagctgatgaaattgcaaggttgataaatgagaatgagcaactaaaatcaacaatcgatgatctcaagagtaagtcatctgaagcagaaatggattcactgaaggatgaatatcaccaaagagtagcaactcttgaaaggaaggtatatgcactaaccaaagagcgtgatacactaaggagagaacagaataaaaaaagtgatgcagctgcccttttgaaagaaaaggatgagatcatcaatcaggtcatggctgaaggtgaagaactatccaaaaaacaagctgctcaagaagctacaatacgaaaactgagagcacagttagattcgtgagtttgaagaagaaaaacaacgcctgaactcaaagatccaggttgaggaggctaaggttgagagcatcaagagagacaaagcagcaactgagaagttgcttcaagaaacaatagaaagaaatcagactgaacttgcagctcaaaaggagttctacaccaatgctcttaatgcggctaaagaggctgaggcattggctgaagcaagagtcaacagtgaagccaaaattgaactggagaatcttttaggagaagctggtgaaaaagaaaatatgctgattaagacaatcgaggagttgaggcattttctcacccggcaagaacaggaggctgctttcagggaaaaaagactaaaaggggactatgatgatcttcaaaagcggtatcaagccagtgaacttcgttataatgaactggtaacgcaagttcctgagtctaccagaccgcttctaagacaaattgaagccatgcaggagacaactgctcgaagggaagatgcttgggctggtgtggagagaaccttaaactctcgccttcaggaagcagaagctaaagctgcttcttcagaagaaaaggagcgatctgtaaatgagagattgtcacaaagtttatcccggataactgtccttgagacccagattacaattcttagaacagagcagacacagctgagccgatctcttgaaaaggagaggcagagagcatctgaaagtagacaggagtacctagcaatcaaagaggaggcagcaatacaagaagggcgagctaaacagtttgaagaagagatgaaggagcttagagctaggcacaaggaggagctgcaagaagcagcagaacacagggacctgcttgagaagggttctaggccttgtgttcaaaatgtggtgttagcaagtggtcgaggaagggcgcacttggtgcttggctgggtcttcagccctccaagacctgctgtgtcagctcccctcggggtctccaccgtaattcggtgaagc

SEQ ID NO: 76135 - DNA, 3041 bp, Zea Mays
cactgctcactgcaccgagccgagcgcaggttaggcgggcgcgcgatcaccgaagccgacgcggcgcccgcacgcgccaacggccgaacgcactctctctctctctctctctctctctctctctcccctctccgttgtgctccccgacccaaccctacgcgctcctgccgcccccccgcaggccgcagctacatctctcctcccacctcgccagtcgccaccgcgcggtgggagctcgctgaagtgcttccccccgctttgcggcagcgtcagctcagaccccttgcccgcgctctcgttgtctggcgggctcagctggtttggtcagcgtggcgaggttgtcctggccagatcctgctcccgcccgcgcacgactgggtgtgggcggtggattggctgcgcgggtcatcagatctatgccggagatctagggcgccaggtgccgaggtggaggccgtgagccggtggcgatcggagggccgaggacagggatggcgtggtggtccgggaaggtgtcgctcggcggcctgcaggacatcgctggagccgtcaacaagatcagcgagagcgtgaagaacatcgaaaagaacttcgacagcgcgctcggcctagaggagaagcgtgacgatgaagatgcatcaggatcacagacatccaactctgatagaataggattcttcaatcctgtcatggctttcatgggacacaatggtgaggaggatggcactgaagtatcagaaaagccacaatctctgaagaatctgtcagcagaggaaggaattaatagcacaccaactaagaaacatatatctgaggtagatccttcggaagtatcaggaacaacatctccaaaactgccttcaaaatcggaagaagttcatagtatttccaatgggtcacctgtttctaaggcagatgtttctgagcaatccataacaccacaaactccaacacatccttcagtagcagaagaaaagcttgatagctctactgaggcacctgcatctaaggtgggtgatgctgaagcatcagaaacatcacaatctgcaggacatccttcaacagtggaagaaaaccagcaccatcaagttagcaaacattctgatcctagtgatgaagcagagccgaatcagcttagagagtctgttcgagacttacctgatggtagtgcatcttcttcgcctactaaaatacatcaatcaggtgacaccgaaacaggggaatctattcacacaggaaaggaagatacgtctgataggaacatcttgcagtcacaaccagcagagtctgcgctagctagttcagatgatataacggaagctgaggacaatattgctcaagaatatgatgccccaaaagaacttagtggcccacaggagagtagtgatatggtagacaaaggtactcatcttgaagttaaattacatgatagcaatattaatactgaaaaaagtgaggaagaaagcaataagatggagtcaggggaatcatctgttgttgtacaggaggataatgcaatggagcaacctcaagacttaacgttgaagtccttaactgcagagcatgactcaaattcgcagaacgagtcagtgatcaattcgactgatatacctgttggactaggtgaaggtcctccaaatgattttacaaaagaagaaaagattctagaatctgttagaggcacagattctcagactctggactctgttgtttctgtcgatgagctagagaaattaagacgtgaattgaagatgatggaagctgcattgcaaggtgctgcaagacagtcacagtccaaagctgatgaaattgcaaggttgataaatgagaatgagcaactaaaatcaacaatcgatgatctcaagagtaagtcatctgaagcagaaatggattcactgaaggatgaatatcaccaaagagtagcaactcttgaaaggaaggtatatgcactaaccaaagagcgtgatacactaaggagagaacagaataaaaaaagtgatgcagctgcccttttgaaagaaaaggatgagatcatcaatcagattcgtgagtttgaagaagaaaaacaacgcctgaactcaaagatccaggttgaggaggctaaggttgagagcatcaagagagacaaagcagcaactgagaagttgcttcaagaaacaatagaaagaaatcagactgaacttgcagctcaaaaggagttctacaccaatgctcttaatgcggctaaagaggctgaggcattggctgaagcaagagtcaacagtgaagccaaaattgaactggagaatcttttaggagaagctggtgaaaaagaaaatatgctgattaagacaatcgaggagttgaggcattttctcacccggcaagaacaggaggctgctttcagggaaaaaagactaaaaggggactatgatgatcttcaaaagcggtatcaagccagtgaacttcgttataatgaactggtaacgcaagttcctgagtctaccagaccgcttctaagacaaattgaagccatgcaggagacaactgctcgaagggaagatgcttgggctggtgtggagagaaccttaaactctcgccttcaggaagcagaagctaaagctgcttcttcagaagaaaaggagcgatctgtaaatgagagattgtcacaaagtttatcccggataactgtccttgagacccagattacaattcttagaacagagcagacacagctgagccgatctcttgaaaaggagaggcagagagcatctgaaagtagacaggagtacctagcaatcaaagaggaggcagcaatacaagaagggcgagctaaacagtttgaagaagagatgaaggagcttagagctaggcacaaggaggagctgcaagaagcagcagaacacagggacctgcttgagaagggttctaggccttgtgttcaaaatgtggtgttagcaagtggtcgaggaagggcgcacttggtgcttggctgggtcttcagccctccaagacctgctgtgtcagctcccctcggggtctccaccgtaattcggtgaagc

SEQ ID NO: 76136 - DNA, 3190 bp, Zea Mays
cactgctcactgcaccgagccgagcgcaggttaggcgggcgcgcgatcaccgaagccgacgcggcgcccgcacgcgccaacggccgaacgcactctctctctctctctctctctctctctctctcccctctccgttgtgctccccgacccaaccctacgcgctcctgccgcccccccgcaggccgcagctacatctctcctcccacctcgccagtcgccaccgcgcggtgggagctcgctgaagtgcttccccccgctttgcggcagcgtcagctcagaccccttgcccgcgctctcgttgtctggcgggctcagctggtttggtcagcgtggcgaggttgtcctggccagatcctgctcccgcccgcgcacgactgggtgtgggcggtggattggctgcgcgggtcatcagatctatgccggagatctagggcgccaggtgccgaggtggaggccgtgagccggtggcgatcggagggccgaggacagggatggcgtggtggtccgggaaggtgtcgctcggcggcctgcaggacatcgctggagccgtcaacaagatcagcgagagcgtgaagaacatcgaaaagaacttcgacagcgcgctcggcctagaggagaagcgtgacgatgaagatgcatcaggatcacagacatccaactctgatagaataggattcttcaatcctgtcatggctttcatgggacacaatggtgaggaggatggcactgaagtatcagaaaagccacaatctctgaagaatctgtcagcagaggaaggaattaatagcacaccaactaagaaacatatatctgaggtagatccttcggaagtatcaggaacaacatctccaaaactgccttcaaaatcggaagaagttcatagtatttccaatgggtcacctgtttctaaggcagatgtttctgagcaatccataacaccacaaactccaacacatccttcagtagcagaagaaaagcttgatagctctactgaggcacctgcatctaaggtgggtgatgctgaagcatcagaaacatcacaatctgcaggacatccttcaacagtggaagaaaaccagcaccatcaagttagcaaacattctgatcctagtgatgaagcagagccgaatcagcttagagagtctgttcgagacttacctgatggtagtgcatcttcttcgcctactaaaatacatcaatcaggtgacaccgaaacaggggaatctattcacacaggaaaggaagatacgtctgataggaacatcttgcagtcacaaccagcagagtctgcgctagctagttcagatgatataacggaagctgaggacaatattgctcaagaatatgatgccccaaaagaacttagtggcccacaggagagtagtgatatggtagacaaaggtactcatcttgaagttaaattacatgatagcaatattaatactgaaaaaagtgaggaagaaagcaataagatggagtcaggggaatcatctgttgttgtacaggaggataatgcaatggagcaacctcaagacttaacgttgaagtccttaactgcagagcatgactcaaattcgcagaacgagtcagtgatcaattcgactgatatacctgttggactaggtgaaggtcctccaaatgattttacaaaagaagaaaagattctagaatctgttagaggcacagattctcagactctggactctgttgtttctgtcgatgagctagagaaattaagacgtgaattgaagatgatggaagctgcattgcaaggtgctgcaagacagtcacagtccaaagctgatgaaattgcaaggttgataaatgagaatgagcaactaaaatcaacaatcgatgatctcaagagtaagtcatctgaagcagaaatggattcactgaaggatgaatatcaccaaagagtagcaactcttgaaaggaagacaatgtttaatgctaaaaggagaaacaatagtaagatgcatgtttgagatcattaacatgttttcaaaagcaaaaaaagaggtcattgaaatgccacagccagaaaaaaagaagaggtcattgaaatgccacagccagaacagcatgagtatatgcactaaccaaagagcgtgatacactaaggagagaacagaataaaaaaagtgatgcagctgcccttttgaaagaaaaggatgagatcatcaatcagattcgtgagtttgaagaagaaaaacaacgcctgaactcaaagatccaggttgaggaggctaaggttgagagcatcaagagagacaaagcagcaactgagaagttgcttcaagaaacaatagaaagaaatcagactgaacttgcagctcaaaaggagttctacaccaatgctcttaatgcggctaaagaggctgaggcattggctgaagcaagagtcaacagtgaagccaaaattgaactggagaatcttttaggagaagctggtgaaaaagaaaatatgctgattaagacaatcgaggagttgaggcattttctcacccggcaagaacaggaggctgctttcagggaaaaaagactaaaaggggactatgatgatcttcaaaagcggtatcaagccagtgaacttcgttataatgaactggtaacgcaagttcctgagtctaccagaccgcttctaagacaaattgaagccatgcaggagacaactgctcgaagggaagatgcttgggctggtgtggagagaaccttaaactctcgccttcaggaagcagaagctaaagctgcttcttcagaagaaaaggagcgatctgtaaatgagagattgtcacaaagtttatcccggataactgtccttgagacccagattacaattcttagaacagagcagacacagctgagccgatctcttgaaaaggagaggcagagagcatctgaaagtagacaggagtacctagcaatcaaagaggaggcagcaatacaagaagggcgagctaaacagtttgaagaagagatgaaggagcttagagctaggcacaaggaggagctgcaagaagcagcagaacacagggacctgcttgagaagggttctaggccttgtgttcaaaatgtggtgttagcaagtggtcgaggaagggcgcacttggtgcttggctgggtcttcagccctccaagacctgctgtgtcagctcccctcggggtctccaccgtaattcggtgaagc

SEQ ID NO: 76137 - DNA, 2963 bp, Zea Mays
cactgctcactgcaccgagccgagcgcaggttaggcgggcgcgcgatcaccgaagccgacgcggcgcccgcacgcgccaacggccgaacgcactctctctctctctctctctctctctctctctcccctctccgttgtgctccccgacccaaccctacgcgctcctgccgcccccccgcaggccgcagctacatctctcctcccacctcgccagtcgccaccgcgcggtgggagctcgctgaagtgcttccccccgctttgcggcagcgtcagctcagaccccttgcccgcgctctcgttgtctggcgggctcagctggtttggtcagcgtggcgaggttgtcctggccagatcctgctcccgcccgcgcacgactgggtgtgggcggtggattggctgcgcgggtcatcagatctatgccggagatctagggcgccaggtgccgaggtggaggccgtgagccggtggcgatcggagggccgaggacagggatggcgtggtggtccgggaaggtgtcgctcggcggcctgcaggacatcgctggagccgtcaacaagatcagcgagagcgtgaagaacatcgaaaagaacttcgacagcgcgctcggcctagaggagaagcgtgacgatgaagatgcatcaggatcacagacatccaactctgatagaataggattcttcaatcctgtcatggctttcatgggacacaatggtgaggaggatggcactgaagtatcagaaaagccacaatctctgaagaatctgtcagcagaggaaggaattaatagcacaccaactaagaaacatatatctgaggtagatccttcggaagtatcaggaacaacatctccaaaactgccttcaaaatcggaagaagttcatagtatttccaatgggtcacctgtttctaaggcagatgtttctgagcaatccataacaccacaaactccaacacatccttcagtagcagaagaaaagcttgatagctctactgaggcacctgcatctaaggtgggtgatgctgaagcatcagaaacatcacaatctgcaggacatccttcaacagtggaagaaaaccagcaccatcaagttagcaaacattctgatcctagtgatgaagcagagccgaatcagcttagagagtctgttcgagacttacctgatggtagtgcatcttcttcgcctactaaaatacatcaatcaggtgacaccgaaacaggggaatctattcacacaggaaaggaagatacgtctgataggaacatcttgcagtcacaaccagcagagtctgcgctagctagttcagatgatataacggaagctgaggacaatattgctcaagaatatgatgccccaaaagaacttagtggcccacaggagagtagtgatatggtagacaaaggtactcatcttgaagttaaattacatgatagcaatattaatactgaaaaaagtgaggaagaaagcaataagatggagtcaggggaatcatctgttgttgtacaggaggataatgcaatggagcaacctcaagacttaacgttgaagtccttaactgcagagcatgactcaaattcgcagaacgagtcagtgatcaattcgactgatatacctgttggactaggtgaaggtcctccaaatgattttacaaaagaagaaaagattctagaatctgttagaggcacagattctcagactctggactctgttgtttctgtcgatgagctagagaaattaagacgtgaattgaagatgatggaagctgcattgcaaggtgctgcaagacagtcacaggtatatgcactaaccaaagagcgtgatacactaaggagagaacagaataaaaaaagtgatgcagctgcccttttgaaagaaaaggatgagatcatcaatcagattcgtgagtttgaagaagaaaaacaacgcctgaactcaaagatccagatagatggaattaagttagtttggcgccctgaacaagatgttatgtctgttttttttcttctctcaaaggttgaggaggctaaggttgagagcatcaagagagacaaagcagcaactgagaagttgcttcaagaaacaatagaaagaaatcagactgaacttgcagctcaaaaggagttctacaccaatgctcttaatgcggctaaagaggctgaggcattggctgaagcaagagtcaacagtgaagccaaaattgaactggagaatcttttaggagaagctggtgaaaaagaaaatatgctgattaagacaatcgaggagttgaggcattttctcacccggcaagaacaggaggctgctttcagggaaaaaagactaaaaggggactatgatgatcttcaaaagcggtatcaagccagtgaacttcgttataatgaactggtaacgcaagttcctgagtctaccagaccgcttctaagacaaattgaagccatgcaggagacaactgctcgaagggaagatgcttgggctggtgtggagagaaccttaaactctcgccttcaggaagcagaagctaaagctgcttcttcagaagaaaaggagcgatctgtaaatgagagattgtcacaaagtttatcccggataactgtccttgagacccagattacaattcttagaacagagcagacacagctgagccgatctcttgaaaaggagaggcagagagcatctgaaagtagacaggagtacctagcaatcaaagaggaggcagcaatacaagaagggcgagctaaacagtttgaagaagagatgaaggagcttagagctaggcacaaggaggagctgcaagaagcagcagaacacagggacctgcttgagaagggttctaggccttgtgttcaaaatgtggtgttagcaagtggtcgaggaagggcgcacttggtgcttggctgggtcttcagccctccaagacctgctgtgtcagctcccctcggggtctccaccgtaattcggtgaagc

SEQ ID NO: 76138 - DNA, 3170 bp, Zea Mays
ttcgttcaggccgagatccactgctcactgcaccgagccgagcgcaggttaggcgggcgcgcgatcaccgaagccgacgcggcgcccgcacgcgccaacggccgaacgcactctctctctctctctctctctctctctctctcccctctccgttgtgctccccgacccaaccctacgcgctcctgccgcccccccgcaggccgcagctacatctctcctcccacctcgccagtcgccaccgcgcggtgggagctcgctgaagtgcttccccccgctttgcggcagcgtcagctcagaccccttgcccgcgctctcgttgtctggcgggctcagctggtttggtcagcgtggcgaggttgtcctggccagatcctgctcccgcccgcgcacgactgggtgtgggcggtggattggctgcgcgggtcatcagatctatgccggagatctagggcgccaggtgccgaggtggaggccgtgagccggtggcgatcggagggccgaggacagggatggcgtggtggtccgggaaggtgtcgctcggcggcctgcaggacatcgctggagccgtcaacaagatcagcgagagcgtgaagaacatcgaaaagaacttcgacagcgcgctcggcctagaggagaagcgtgacgatgaagatgcatcaggatcacagacatccaactctgatagaataggattcttcaatcctgtcatggctttcatgggacacaatggtgaggaggatggcactgaagtatcagaaaagccacaatctctgaagaatctgtcagcagaggaaggaattaatagcacaccaactaagaaacatatatctgaggtagatccttcggaagtatcaggaacaacatctccaaaactgccttcaaaatcggaagaagttcatagtatttccaatgggtcacctgtttctaaggcagatgtttctgagcaatccataacaccacaaactccaacacatccttcagtagcagaagaaaagcttgatagctctactgaggcacctgcatctaaggtgggtgatgctgaagcatcagaaacatcacaatctgcaggacatccttcaacagtggaagaaaaccagcaccatcaagttagcaaacattctgatcctagtgatgaagcagagccgaatcagcttagagagtctgttcgagacttacctgatggtagtgcatcttcttcgcctactaaaatacatcaatcaggtgacaccgaaacaggggaatctattcacacaggaaaggaagatacgtctgataggaacatcttgcagtcacaaccagcagagtctgcgctagctagttcagatgatataacggaagctgaggacaatattgctcaagaatatgatgccccaaaagaacttagtggcccacaggagagtagtgatatggtagacaaaggtactcatcttgaagttaaattacatgatagcaatattaatactgaaaaaagtgaggaagaaagcaataagatggagtcaggggaatcatctgttgttgtacaggaggataatgcaatggagcaacctcaagacttaacgttgaagtccttaactgcagagcatgactcaaattcgcagaacgagtcagtgatcaattcgactgatatacctgttggactaggtgaaggtcctccaaatgattttacaaaagaagaaaagattctagaatctgttagaggcacagattctcagactctggactctgttgtttctgtcgatgagctagagaaattaagacgtgaattgaagatgatggaagctgcattgcaaggtgctgcaagacagtcacagtccaaagctgatgaaattgcaaggttgataaatgagaatgagcaactaaaatcaacaatcgatgatctcaagagtaagtcatctgaagcagaaatggattcactgaaggatgaatatcaccaaagagtagcaactcttgaaaggaagttcagtattttttactctgtgaaaggcaggcctggtgtagtggtatatgcactaaccaaagagcgtgatacactaaggagagaacagaataaaaaaagtgatgcagctgcccttttgaaagaaaaggatgagatcatcaatcagattcgtgagtttgaagaagaaaaacaacgcctgaactcaaagatccagatagatggaattaagttagtttggcgccctgaacaagatgttatgtctgttttttttcttctctcaaaggttgaggaggctaaggttgagagcatcaagagagacaaagcagcaactgagaagttgcttcaagaaacaatagaaagaaatcagactgaacttgcagctcaaaaggagttctacaccaatgctcttaatgcggctaaagaggctgaggcattggctgaagcaagagtcaacagtgaagccaaaattgaactggagaatcttttaggagaagctggtgaaaaagaaaatatgctgattaagacaatcgaggagttgaggcattttctcacccggcaagaacaggaggctgctttcagggaaaaaagactaaaaggggactatgatgatcttcaaaagcggtatcaagccagtgaacttcgttataatgaactggtaacgcaagttcctgagtctaccagaccgcttctaagacaaattgaagccatgcaggagacaactgctcgaagggaagatgcttgggctggtgtggagagaaccttaaactctcgccttcaggaagcagaagctaaagctgcttcttcagaagaaaaggagcgatctgtaaatgagagattgtcacaaagtttatcccggataactgtccttgagacccagattacaattcttagaacagagcagacacagctgagccgatctcttgaaaaggagaggcagagagcatctgaaagtagacaggagtacctagcaatcaaagaggaggcagcaatacaagaagggcgagctaaacagtttgaagaagagatgaaggagcttagagctaggcacaaggaggagctgcaagaagcagcagaacacagggacctgcttgagaagggttctaggccttgtgttcaaaatgtggtgttagcaagtggtcgaggaagggcgcacttggtgcttggctgggtcttcagccctccaagacctgctgtgtcagctcccctcggggtctccaccgtaattcggtgaagc

SEQ ID NO: 76139 - DNA, 3256 bp, Zea Mays
cgcacctccccgcggatagatggttcttcttcgttcaggccgagatccactgctcactgcaccgagccgagcgcaggttaggcgggcgcgcgatcaccgaagccgacgcggcgcccgcacgcgccaacggccgaacgcactctctctctctctctctctctctctctctctcccctctccgttgtgctccccgacccaaccctacgcgctcctgccgcccccccgcaggccgcagctacatctctcctcccacctcgccagtcgccaccgcgcggtgggagctcgctgaagtgcttccccccgctttgcggcagcgtcagctcagaccccttgcccgcgctctcgttgtctggcgggctcagctggtttggtcagcgtggcgaggttgtcctggccagatcctgctcccgcccgcgcacgactgggtgtgggcggtggattggctgcgcgggtcatcagatctatgccggagatctagggcgccaggtgccgaggtggaggccgtgagccggtggcgatcggagggccgaggacagggatggcgtggtggtccgggaaggtgtcgctcggcggcctgcaggacatcgctggagccgtcaacaagatcagcgagagcgtgaagaacatcgaaaagaacttcgacagcgcgctcggcctagaggagaagcgtgacgatgaagatgcatcaggatcacagacatccaactctgatagaataggattcttcaatcctgtcatggctttcatgggacacaatggtgaggaggatggcactgaagtatcagaaaagccacaatctctgaagaatctgtcagcagaggaaggaattaatagcacaccaactaagaaacatatatctgaggtagatccttcggaagtatcaggaacaacatctccaaaactgccttcaaaatcggaagaagttcatagtatttccaatgggtcacctgtttctaaggcagatgtttctgagcaatccataacaccacaaactccaacacatccttcagtagcagaagaaaagcttgatagctctactgaggcacctgcatctaaggtgggtgatgctgaagcatcagaaacatcacaatctgcaggacatccttcaacagtggaagaaaaccagcaccatcaagttagcaaacattctgatcctagtgatgaagcagagccgaatcagcttagagagtctgttcgagacttacctgatggtagtgcatcttcttcgcctactaaaatacatcaatcaggtgacaccgaaacaggggaatctattcacacaggaaaggaagatacgtctgataggaacatcttgcagtcacaaccagcagagtctgcgctagctagttcagatgatataacggaagctgaggacaatattgctcaagaatatgatgccccaaaagaacttagtggcccacaggagagtagtgatatggtagacaaaggtactcatcttgaagttaaattacatgatagcaatattaatactgaaaaaagtgaggaagaaagcaataagatggagtcaggggaatcatctgttgttgtacaggaggataatgcaatggagcaacctcaagacttaacgttgaagtccttaactgcagagcatgactcaaattcgcagaacgagtcagtgatcaattcgactgatatacctgttggactaggtgaaggtcctccaaatgattttacaaaagaagaaaagattctagaatctgttagaggcacagattctcagactctggactctgttgtttctgtcgatgagctagagaaattaagacgtgaattgaagatgatggaagctgcattgcaaggtgctgcaagacagtcacagtccaaagctgatgaaattgcaaggttgataaatgagaatgagcaactaaaatcaacaatcgatgatctcaagagtaagtcatctgaagcagaaatggattcactgaaggatgaatatcaccaaagagtagcaactcttgaaaggaaggtatatgcactaaccaaagagcgtgatacactaaggagagaacagaataaaaaaagtgatgcagctgcccttttgaaagaaaaggatgagatcatcaatcaggtcatggctgaaggtgaagaactatccaaaaaacaagctgctcaagaagctacaatacgaaaactgagagcacagattcgtgagtttgaagaagaaaaacaacgcctgaactcaaagatccaggttgaggaggctaaggttgagagcatcaagagagacaaagcagcaactgagaagttgcttcaagaaacaatagaaagaaatcagactgaacttgcagctcaaaaggagttctacaccaatgctcttaatgcggctaaagaggctgaggcattggctgaagcaagagtcaacagtgaagccaaaattgaactggagaatcttttaggagaagctggtgaaaaagaaaatatgctgattaagacaatcgaggagttgaggcattttctcacccggcaagaacaggaggatagagtccaggttgttgttgtggtgtctggtgtgcatgacgccgatcttcatggtgaaagttttgttatccggatgagcatgtggctcatggctgctttcagggaaaaaagactaaaaggggactatgatgatcttcaaaagcggtatcaagccagtgaacttcgttataatgaactggtaacgcaagttcctgagtctaccagaccgcttctaagacaaattgaagccatgcaggagacaactgctcgaagggaagatgcttgggctggtgtggagagaaccttaaactctcgccttcaggaagcagaagctaaagctgcttcttcagaagaaaaggagcgatctgtaaatgagagattgtcacaaagtttatcccggataactgtccttgagacccagattacaattcttagaacagagcagacacagctgagccgatctcttgaaaaggagaggcagagagcatctgaaagtagacaggagtacctagcaatcaaagaggaggcagcaatacaagaagggcgagctaaacagtttgaagaagagatgaaggagcttagagctaggcacaaggaggagctgcaagaagcagcagaacacagggacctgcttgagaagggttctaggccttgtgttcaaaatgtggtgttagcaagtggtcgaggaagggcgcacttggtgcttggctgggtcttcagccctccaagacctgctgtgtcagctcccctcggggtctccaccgtaattcggtgaagc

SEQ ID NO: 76140 - DNA, 3182 bp, Zea Mays
gggacctccgcaggcccagcgcacctccccgcggatagatggttcttcttcgttcaggccgagatccactgctcactgcaccgagccgagcgcaggttaggcgggcgcgcgatcaccgaagccgacgcggcgcccgcacgcgccaacggccgaacgcactctctctctctctctctctctctctctctctcccctctccgttgtgctccccgacccaaccctacgcgctcctgccgcccccccgcaggccgcagctacatctctcctcccacctcgccagtcgccaccgcgcggtgggagctcgctgaagtgcttccccccgctttgcggcagcgtcagctcagaccccttgcccgcgctctcgttgtctggcgggctcagctggtttggtcagcgtggcgaggttgtcctggccagatcctgctcccgcccgcgcacgactgggtgtgggcggtggattggctgcgcgggtcatcagatctatgccggagatctagggcgccaggtgccgaggtggaggccgtgagccggtggcgatcggagggccgaggacagggatggcgtggtggtccgggaaggtgtcgctcggcggcctgcaggacatcgctggagccgtcaacaagatcagcgagagcgtgaagaacatcgaaaagaacttcgacagcgcgctcggcctagaggagaagcgtgacgatgaagatgcatcaggatcacagacatccaactctgatagaataggattcttcaatcctgtcatggctttcatgggacacaatggtgaggaggatggcactgaagtatcagaaaagccacaatctctgaagaatctgtcagcagaggaaggaattaatagcacaccaactaagaaacatatatctgaggtagatccttcggaagtatcaggaacaacatctccaaaactgccttcaaaatcggaagaagttcatagtatttccaatgggtcacctgtttctaaggcagatgtttctgagcaatccataacaccacaaactccaacacatccttcagtagcagaagaaaagcttgatagctctactgaggcacctgcatctaaggtgggtgatgctgaagcatcagaaacatcacaatctgcaggacatccttcaacagtggaagaaaaccagcaccatcaagttagcaaacattctgatcctagtgatgaagcagagccgaatcagcttagagagtctgttcgagacttacctgatggtagtgcatcttcttcgcctactaaaatacatcaatcaggtgacaccgaaacaggggaatctattcacacaggaaaggaagatacgtctgataggaacatcttgcagtcacaaccagcagagtctgcgctagctagttcagatgatataacggaagctgaggacaatattgctcaagaatatgatgccccaaaagaacttagtggcccacaggagagtagtgatatggtagacaaaggtactcatcttgaagttaaattacatgatagcaatattaatactgaaaaaagtgaggaagaaagcaataagatggagtcaggggaatcatctgttgttgtacaggaggataatgcaatggagcaacctcaagacttaacgttgaagtccttaactgcagagcatgactcaaattcgcagaacgagtcagtgatcaattcgactgatatacctgttggactaggtgaaggtcctccaaatgattttacaaaagaagaaaagattctagaatctgttagaggcacagattctcagactctggactctgttgtttctgtcgatgagctagagaaattaagacgtgaattgaagatgatggaagctgcattgcaaggtgctgcaagacagtcacagtccaaagctgatgaaattgcaaggttgataaatgagaatgagcaactaaaatcaacaatcgatgatctcaagagtaagtcatctgaagcagaaatggattcactgaaggatgaatatcaccaaagagtagcaactcttgaaaggaaggtatatgcactaaccaaagagcgtgatacactaaggagagaacagaataaaaaaagtgatgcagctgcccttttgaaagaaaaggatgagatcatcaatcaggtcatggctgaaggtgaagaactatccaaaaaacaagctgctcaagaagctacaatacgaaaactgagagcacagattcgtgagtttgaagaagaaaaacaacgcctgaactcaaagatccaggttgaggaggctaaggttgagagcatcaagagagacaaagcagcaactgagaagttgcttcaagaaacaatagaaagaaatcagactgaacttgcagctcaaaaggagttctacaccaatgctcttaatgcggctaaagaggctgaggcattggctgaagcaagagtcaacagtgaagccaaaattgaactggagaatcttttaggagaagctggtgaaaaagaaaatatgctgattaagacaatcgaggagttgaggcattttctcacccggcaagaacaggaggctgctttcagggaaaaaagactaaaaggggactatgatgatcttcaaaagcggtatcaagccagtgaacttcgttataatgaactggtaacgcaagttcctgagtctaccagaccgcttctaagacaaattgaagccatgcaggagacaactgctcgaagggaagatgcttgggctggtgtggagagaaccttaaactctcgccttcaggaagcagaagctaaagctgcttcttcagaagaaaaggagcgatctgtaaatgagagattgtcacaaagtttatcccggataactgtccttgagacccagattacaattcttagaacagagcagacacagctgagccgatctcttgaaaaggagaggcagagagcatctgaaagtagacaggagtacctagcaatcaaagaggaggcagcaatacaagaagggcgagctaaacagtttgaagaagagatgaaggagcttagagctaggcacaaggaggagctgcaagaagcagcagaacacagggacctgcttgagaagggttctaggccttgtgttcaaaatgtggtgttagcaagtggtcgaggaagggcgcacttggtgcttggctgggtcttcagccctccaagacctgctgtgtcagctcccctcggggtctccaccgtaattcggtgaagc

SEQ ID NO: 76141 - DNA, 443 bp, Zea Mays
atatagcattatcaactcgtcttcattatattatcatgagaaaataaaaacaatattgaattacacttggcaccttcgacttgatagacagcaaaggtacgaacgtgatgcaaaagcaaatgtcaagttagcgtgaacagtacgggagcactgttcatctatttataggcacgggacgcaacccatgtaaaattacactcatgccctttacatttgctaatgactctatagtgatccatcgaggtctaaatagccttttcccttttaagtcggttcccttttttgctatcataccgaagctcccctgtgcatagcttcggctctgcgccaaccttcgtattctttgtggttcttcacactgtggttctgatccgagtccaaaggtacctgttcatgtattatactctagaaacattgttaaatcatgtttttgaggaccttcg

SEQ ID NO: 76142 - DNA, 1017 bp, Zea Mays
ctcagatctgccctcattatagaagcaacatcgacttgcgtgcccacgacacaagctcgtgtcggtgctactaccaccatccctccacagcacagccacgctgccagcctcgtgcggcactgctgcgtcctattctgccacaccggatataacttctacaagatggatagatcttggatcaaagatagactatttagcgatgcacatttggatggggtcaaagagttcatgaatttggtttcacaaagatttgataagaatgaggagctactatgtccatgtcgaaggtgtctgaatcgagttcatcaacataagggggaggtgtatgatcatttacttattcatgggatgactagcacatacactagatgtgtacatcatggagaaccatttgaggctgaaattaatgaaaattatgatcatgtagatgaatatattggtatcaatgaggatgacagtatgaatgagaatgaagaagatgagcctgataatagaattcatgatatgattcgggagttgtacccaactaatgaccaaagtagagggaaatctatgtttgcagctttattagaagaaatgaagcatgaactttaccctggagcaccttacacacgtttttcttttttggtgaagttacttcatatcaagtcattttatcgattcagcaacgttgcattcactgcaatgctaaaactattatcagcagcattcccagattgctctcttcctgcatcttaccatgaagcaaagaatgttattaatgcgttaggacttggatatgactcaatccatgtgtgcccaaacaattgtgttctatttcgaaaggaatatgcaaaacatgatgaatgtctggtttgtggtgcatcaagatggaaagatactacagatggaaaaaaacatattcctcagaaagtactacgacattttccaattattccaaggttgaaaaggttctttgcttccaaaaaaatatcagaggagacacaatggcatttattgaagaggaaggcagtggag

SEQ ID NO: 76143 - DNA, 3353 bp, Zea Mays
aaacacgagcagcaaccgtagcctgccagaagatcgcacgcccgtcgccaagcttcgtttctcccccttcccctcacctccgccgttccctctcctggacccccaaacacagcgtcccgaaatctagcctgactcctctctccctgcctgccaagaaagaaaaggcgccacgttgacatcgcggatgccgtagcgggtgggcgggcgcgcgcgcgtgccagccatgcgctcgtgatggcccggccgttccagaagatcggccacggcctcgaaaggttctcgttcaggcgccggaggtcggcgtcgtcgccgccgttgccaccactggcctcggacggcacggacgcctcctcgatggaggcgcaggcgcaggcgcaggtgcaggcgccgcctttcagcaagagggcgctgtcgaggagctgcgggtccaaggggagccgcctgtccgtggacctcccgccgccgctcgccggcggcccttcggacaggggtgcggccgggacctcgtcctcgtcctcgctcgcggtgccgcccaagcctgtccggcacgagggcccgccctcagatgcggacatcgtgagggagaagttctccaagctgctgctcggggaggacatgtccggcaccgggaaaggggtcacatccgcccttgccctgtccaacgccatcactaatcttgcagcttctgtgtttggtgagcagcgccggctgcagcccatggccgccgagcagaaatcgcgttggaagaaggagatctactggcttttgtccgtcgctgaccacattgtcgaattcgttccttcgcagcaggtcgccgagaacgggacctgcatggagataatggtaacccagcagcgccaagatctgaaaatgaacatccccgcgctgcgcaagctcgacgcgatgctcctcgaatacctcgacagcttcgagggcgagcaggagttctggtacgcgtcgaaagatgcggacgaaccggggaagggcaacgtgccgaggcaggacgacagatggtggctcccgaccgtcagagtccctcccagtggcctgtcatacgcgtacaggaaatggcttcagaaccacaaggacctcgttgcgcaggtgctcaaggcagcgatggcgatcaacgccaacattcttatggagatggaggtccctgaatcgtacatggagtccctcccaaagaatggcaagtcaacgcttggagattcagcgtacaagcttataaccgacgactgtttcgacgccgaagaacttctgcgctccgtggacttgtcggacgagcacagcatcgtcgatctgaagaaccgggtcgaagcctcggtggtcatctggcagaagaagatgacccacaaggacagcaagctgtcgtgggggcacaacgccaggcacgagaagaggggcatgttcgaagggcgggcggaaaacgtgcttctcctcatcaagcacaggttccccggcatcgcccagtcggctctggacatcagcaagatccaatgcaacaagacacgccacattgcctcactgacgaatgccctgcatcatgcgtacctcccttctaccatgcatcttcttctttttcgtcaggatgttggccttgccattctggagagctactccagggctctggagagcttggccttcacggtcatgtctcggatcgaagatgttctcggcgcggacctggccactcgagacgaccccaagaacgcagcagggttgatgaggatcgccagtttaccttgttcggacgacaccgacaaggtcgtctcggacgccaaggccgaggtggagaggatgaggaggatggagccggtcccgccggcgccgatgctgtacgacttcgtcggcccacgggaccaggacctcggtccaagggtgacgaagatctcgtcggttgcgaccaagaggttctcgtaccttgagaatttgggtgggacgagaagcccgatagctagacactagctcctatagctatatgggtgtgagtgaggctagatggatcttggattggatcatgccgccacagagactttgtaaatagcacagatgtccacaggatcatgcatggcattcgggattgagggtgccgatgtgaggtcttggcatgtttccatgaactgatcgtgagaccatagctcatgaactggttggtgttcaacgatgggcctgtgggatttgtacttgtgtaatatatttcaaaagatgagaggaaaagattgtatattttttctctagtagcgccttgttacaaattttagtcctgcaccaaaataataatagtaataatagcagatcgtttctggccagatgacacgggatgaacattaatcacatcagcatcagcaactaatttacaaaaaacacagcgaacgtttgcctaaggatgatgtaacaactgacagactaataaaagcaaaagttcaaaatattcttgacgtcgaccagctgttgctttctttgcgtatatataaagaccctagacgtcgtcagattgcgttacacaagttgctgtcttgctgacatacgcgaagaaaaaggcacaaagattccaaaccagcattctgcaagattcaaacacaagttacatcatcaggaagaggaagaccgaaacacgaactcctgtaatgtaccaacgctattccatctcacagctcctgcatacgattggagtgtgcctacaaagaggatcttggagttcaaacagagtacaggctcataatcacatatctagagcacaatctggcaatatgatcctcatatacggtagaggctactctttgccctacagattactctaatgacagctcggatccaatgcacactaggctacatgaactatgaaatcaccctgcatactagtaccatattagtgcagctgtcttgccaatgcactgcgccgtgatagaacgccgttggcatcccttaaactccgtgtcctcctgtactcgatctctgcatccgagcaagaatggccaggaagcgatttctttcttacttctatgggttttagggatatttcatctgctgtctttctgaaaagatgaccatctttcctgatacactcgtcctcagactgatgacctccttttgttcctgccaggtgaaaaaagaaacacagtaagaaattgcggaaacacaaaagacaacaatagtaggggcatatcaaatttgttcctattataatctgtctacaaatcagcctacagtatgtatttcaagccagcagattattgtttcctgtagtagcaagaaaattctaatgttacctttgaacacgtccaaacgcagaactttgtttggagaatcagtggagagctggtttgctgatttctttgggcttgtgtcatctt

SEQ ID NO: 76144 - DNA, 1906 bp, Zea Mays
atgattggagctttttgttttttaccccattgcaacatttcacaaatttgcgcacaccaagcaagaggggtgttcaatcgaccccaaactatggaagtgttgttacatctggaacaacacttggctgtcatgccccacttgtgtacaggcgagtccactccttcgctgtctcaacagcttcagcttcgttggatttccagtgtttcgcaatgttgtctgagagaggatcatctgggtttggggcgctcagaagtgcctgaatgctcagtagaactgtacgtatctgaagagctggactccatttgtccttgtcaatattaggatggtaaatttttgtgagaaatctaacctgtaacagcagcagttaaggtaaaagtaccatcagcaaatattacagcaaagtgacagatagatcaaataaacagaacagttgtaaatgaagtcagcactgatccccaaactggtaaataaaaacattcccgatttattaaccatgtccgtgtgataactgctaccagttaaataagaattcagaagtactatcggaccactcaaggacagaggacagacccagcgctcgcggctcccacatgactacatgagtggggtggtccctgcatttttgtagaggttgtgttgaacccaggacctttagcccagtgaaaaggcttctcacgactgcgtcaggcctgtacttctatctaaccactaaaggaaggtgtttaaattatgtgaaaataatacaacctttgttccaaattataaatcgttctagcttttctatatacatagttttttctatgcacctagatatacattatatctagttacataattaaagtaatataaagataatgtatctagaaaagtcaggacaacatacaatttggaatggagcacaaaagatctaacaggagaacaaatatgtcttgatatatgtaaggaatacaaaagaattcagaagtactaaaaaccactctaggaatgctagggcttctttttcaaggaaaagcaagttcctagtacttctgttcattaggattacaatgcaaattagtgagtacaacttcataatgactctacaagaaaaaagaatggataaaactgtagacatgcattagaagaaacaccactgacataaaattgaagcaagcaaattttcattactaaacaactgcgcacgaggtggatcttgatcaaacttccagaagcacctaagcttatagaggcatgctttaatctagtgtttttgtttagaagtgtggatggttagctttcgatttgacaaattgtcaaaccaggaggggcaatgactacctttggccttcaatcagacctgcctctgaatatacagtgaaattactcaatatatgaagacaggaagagacagctagcctacagcaaaatggaagagaggggggggggggtggtggccctgggctttattaagtaacataacataaatatgttcttgataggactttgaagttaatcaagcagaattagatatgtcaaatggttgtagttcggaaatagaagggcagggtgcagtggtgagagctatctcactgaggtggtaccaggtcagagttcgaagtagtgtgtccgcatttgcgggaaaaaggctttgtctcggtttatcccttcactagaccctactcatatgggagcctaagacattggttctgcccagttgtagttaggaaataaaccacaattcgtatcaattgagataaatgaatgctaaagcacatataacatggaaacataaatgtcaattaatgatttaattaacaaattcatgattgatcaaaaaattacttttggggcagccattggatattcctcaggcaagaatagttcaagcttgaaaactccacctgttcaacatataaacagactaaac

SEQ ID NO: 76145 - DNA, 1427 bp, Zea Mays
ggcgcgactcctcaactgaaactgtgtcattgtctgtcagtgctcgccgcgcggatctagggggaggggggccgtgcccggcgcggacgccgggatgccgatctgcgcgccgtcgtccgactcctcggcctcggcctcgtcgggcttgggcgcccgcgtctgggtgctccacgggctagcgctcggcgcggcggccgcggccgctgccgttgcgtacctgtaccggcggccgaccgggttccgcagccgcgcggtggggatcatacccgcgcgcttcgcctccacgcgcttcgagggcaagccgctcgttcccatcctcggcaagcccatgatccagagaacatgggaaagagttatgctagcttcttcgttggaccatgttgttgtggcaacggatgatgagagaattgcagaatgctgtcgaggatttggagctgatgttataatgacatcagcatcttgcaaaaacggatctgaacgctgctgtgaggcactaaagaagcttgataagcactatgatattgttgtcaatattcaaggagatgagcctctcattgaaccagagataatagatggtgtagttatgtcactgcagcgagctcctgatgcagtcttcagcacagctgttacttcactgaaaccagaagatgcattcgatacaaacagggtgaagtgtgttgtggataatctgggctacgcaatatacttttcaagagggctgattccattcaataaggaacgccaatccaaaatatccatatcttcttcatcttggaatcgcgggctttgattcaaaatttttgaagatatatccagaacttccaccaacaccattacaaatggaagaggacctagagcaactaaaagttcttgaaaatggctataggatgaaggtgatcaaagtggaccatgatgcccatggtgtggatgcacccgaggacgttgagaaaatcgaagcactgatgcgaacgagaaacattcagtagaaaacgaagagaaagcaagtgctttgcattgctatcggcgttggcttggtgggatacttttggttgtgctttcccgtcttctgaatagcatgataccaagtgaagttggtgcatcacttcttgaagttttgtgcttgctaaaacgttcagtgattggatatgtcacttgcattagtcctcaatcagcagttcagcgcgcaggtggattgtatctgtacttcagtagttagtagcattactttcagtcttctttacattgaaaaacaaatcgtttctggagatgaagcaattggacagtgtaaaacaaaaggctaaagacccatccatgccgcgaggcgtgattgatataaggccagactcatcggaactttcattagacttccatttacatgtaataagttttcatatatacaatgttgatgatgtatacaattttaatga

SEQ ID NO: 76146 - DNA, 3392 bp, Zea Mays
atgttccagatgctgggcctccgcggggggagccccagcgctggcgaggcgacccccgtcatgagcggggacggcggcgcggtcgcgggtcccgcgcggccgctgcgcctggcgtactgcgacgagaagggcaggttcgtgatggaccccgaggcggcggcggcgctgcagctcgtgaagggccccgtcggggtcgtctccgtctgcggccgcgcgcgccagggcaagagcttcatcctcaaccagcttcttgggcgaagcagcggttttcaagtggcttcaacacatcgtccttgcacaaagggactttggatgtggagtacgcctttgaagagaactggtttggatggaactgaatacagtcttgtgttgttggatactgaaggaattgatgcttatgaccaaacggggacctatagcatccaaatattttccttggctgttctgctgtcgagcatgttcatctacaaccagatgggaggtatagatgaagctgcattggatcgtctctcactggtcacggagatgacaaaacacatacgtgtcagggcctcaggtggaaggtccactgcatctgaacttgggcaattctctcctgtctttgtttggttgttgcgagacttctacctggatttgacagaagacaacagaaaaattactccaagggattacctagaactagcactaaggccagttcaaggtggaggaagggacatatctgcaaagaatgcgatagggaatgctttactcttgtgcgacctgtgaacaatgagaaagatctccaacgcctggatcaactttctctgagtaatttccgaccagagttcagatcgggtctggatactttcacgaaatttgttcttgaccgaacaagaccaaaacaacttggagctagtacaatgacaggacccatcctcgctggactgacacaatcatttcttgatgccattaatagcggtgctgtccctacgatatcttcatcatggcagagtgtggaggaggcagaatgtcggagggcatttgattctgctgtgggcacttacaattcttcttttgaccataaaacatatatagaagaggactctttgagagaagcacatgaagatgccatgaggaaggctatcagtgtttttaatgcttctgctgttggtgctgggtcagctcgtttaaaattcgaaaagcttcttcacagttctctcaaaaaggccttcgaggactacaaaaggaatgcttttctggaggctgacttgcaatgttcaaatagagtacagaacatggaatcaaaggtgcgagcagcatgtaaccgtccggatgcaaagttagatgacataatcaggctccttgatggcctgctcacagagtatgagtcaaaggcctatggtcctggaaaatggaaaatgcttgtcacattcttacagcaatgtatcgctggccctgtcctggactttttcaaaagacagttggagcatatagatgctgaaaggaatgccctgagattgaaatgcaattcaagcgatgataagttggcattgctcaggaagcaacttgaagcaagcgagggtcacagagctgagtatgtgaggcgctatgaggaagttctgaatgataaacagaaaatttcgaaggattactctactcgtataactgaacttcagatcaagagtagcaagttggaagaacggtctttgagcttgtcttcttctcttgaaaccgccaaacgggaatccaatgattggaagagcaaatatgatcatggtattttgcagcaaaaggcagatgagagcaaattaaaatcccaaattgcttctctggaatctagggtgaatatcagcgagggcaggttgtcggcaacacgtgaacaagctgattctgctcaagaggaagcatcagagtggaaacgtaaatatgaagttgctgttagtgaggccaaaacagctctgcagagagcggctgtagcacaggaacgcacaaataagaaagtgcaagagagggaagatgctttgaggtcagagcttgctaaccagctatctgagaaggaagaggaaatcgccagattacatgcaaaacttagtcaaacggaaattcatgctaccagtttgatctcgaggcttgaggccaccgaagcaaagttgaagagccacgagtcggattcgttggctttgaaggaggagatcagattattgactgataacctggagtctgttagaagtgaagcgatgtcgcgtgagaaggaagtcaggatcctggaacaggaaaagaaccatcttgaggagaagtatctgtcacagtgcaaaaagtttgatgagatagatattagatgcaaggaagctgaaagggaagcgagacgagcaacagaattggctgatgtagctcgtacagaagcttcttctgctcaaaaggataagggggaagctcaacggctcgcaatggagaggcttgcactgatagaaagaattgagcgacaggttgaagctctagaaagagacaaggctaagatggtggaagagatcgagagacttcatcagtcagagaaggatgctgtgtccaaggtcgcattgctcgaaagaagcgtcgatgagcgggaaaaagagattgatgagatgttgaagcggaataaccagcaaagatccagcacggttcaagtgcttgagagtctgctggcaacagaacgtgaagcatgcgctgaagccaataagagggcagaggacttgtcattgatgttgcaagcaactcaaggcaaactggacatgctccaacaagaaaccacacttgatagcaagctcaagacctctgcaaggcgcttaaggggtgaaggtacagagtctgtacatgatatggatatcgacgaagacaatggtaggcgccggaaacgatcaaaaagcacaacaagccctttgaagagcaatcacacagaggatggtggatctgtatttattggcgaagatacttgcaacgggagtcagcaagggacagaaacagaagactacaccaaatttacagtgctgaaactgaagcaggagctgaccaagcgcgggtttggtgcccaactcctccagttgaaaaatcccaacaagaaggatattgttgccctgtatgaaaagcatgtcgtcggcaagtagtacttgtatgctttctagacttccatgtagtgttcaaacatgaatttacacgatcgtgattgaagcgaaacaatgcatgtaacttaatttaaatctcctgtatctgtatttctccaatggcgcagttcattttaacacatcggcgaatacctgtatcattttagcacatcggcgaatgacataactactgtagagtacagatggctggtcagactgaacctcttctttttcgtatatgtgggtggtttgagtgtcgagtaacaaaaaaaaaaa

SEQ ID NO: 76147 - DNA, 3549 bp, Zea Mays
gtcgtttcgttgcttttgctgaaccttggagggagggacgagggcattcgcgatccctgctgaacccgcctttccctctccccattttttgaaagcagaaaaaacacaggctcacggacctctccttgccgtcggcggcgacttcgcgatgttccagatgctgggcctccgcggggggagccccagcgctggcgaggcgacccccgtcatgagcggggacggcggcgcggtcgcgggtcccgcgcggccgctgcgcctggcgtactgcgacgagaagggcaggttcgtgatggaccccgaggcggcggcggcgctgcagctcgtgaagggccccgtcggggtcgtctccgtctgcggccgcgcgcgccagggcaagagcttcatcctcaaccagcttcttgggcgaagcagcggttttcaagtggcttcaacacatcgtccttgcacaaagggactttggatgtggagtacgcctttgaagagaactggtttggatggaactgaatacagtcttgtgttgttggatactgaaggaattgatgcttatgaccaaacggggacctatagcatccaaatattttccttggctgttctgctgtcgagcatgttcatctacaaccagatgggaggtatagatgaagctgcattggatcgtctctcactggtcacggagatgacaaaacacatacgtgtcagggcctcaggtggaaggtccactgcatctgaacttgggcaattctctcctgtctttgtttggttgttgcgagacttctacctggatttgacagaagacaacagaaaaattactccaagggattacctagaactagcactaaggccagttcaaggtggaggaagggacatatctgcaaagaatgcgataagggagtccatccgtgcccttttcccagatagggaatgctttactcttgtgcgacctgtgaacaatgagaaagatctccaacgcctggatcaactttctctgagtaatttccgaccagagttcagatcgggtctggatactttcacgaaatttgttcttgaccgaacaagaccaaaacaacttggagctagtacaatgacaggacccatcctcgctggactgacacaatcatttcttgatgccattaatagcggtgctgtccctacgatatcttcatcatggcagagtgtggaggaggcagaatgtcggagggcatttgattctgctgtgggcacttacaattcttcttttgaccataaaacatatatagaagaggactctttgagagaagcacatgaagatgccatgaggaaggctatcagtgtttttaatgcttctgctgttggtgctgggtcagctcgtttaaaattcgaaaagcttcttcacagttctctcaaaaaggccttcgaggactacaaaaggaatgcttttctggaggctgacttgcaatgttcaaatagagtacagaacatggaatcaaaggtgcgagcagcatgtaaccgtccggatgcaaagttagatgacataatcaggagtatgagtcaaaggcctatggtcctggaaaatggaaaatgcttgtcacattcttacagcaatgtatcgctggccctgtcctggactttttcaaaagacagttggagcatatagatgctgaaaggaatgccctgagattgaaatgcaattcaagcgatgataagttggcattgctcaggaagcaacttgaagcaagcgagggtcacagagctgagtatgtgaggcgctatgaggaagttctgaatgataaacagaaaatttcgaaggattactctactcgtataactgaacttcagatcaagagtagcaagttggaagaacggtctttgagcttgtcttcttctcttgaaaccgccaaacgggaatccaatgattggaagagcaaatatgatcatggtattttgcagcaaaaggcagatgagagcaaattaaaatcccaaattgcttctctggaatctagggtgaatatcagcgagggcaggttgtcggcaacacgtgaacaagctgattctgctcaagaggaagcatcagagtggaaacgtaaatatgaagttgctgttagtgaggccaaaacagctctgcagagagcggctgtagcacaggaacgcacaaataagaaagtgcaagagagggaagatgctttgaggtcagagcttgctaaccagctatctgagaaggaagaggaaatcgccagattacatgcaaaacttagtcaaacggaaattcatgctaccagtttgatctcgaggcttgaggccaccgaagcaaagttgaagagccacgagtcggattcgttggctttgaaggaggagatcagattattgactgataacctggagtctgttagaagtgaagcgatgtcgcgtgagaaggaagtcaggatcctggaacaggaaaagaaccatcttgaggagaagtatctgtcacagtgcaaaaagtttgatgagatagatattagatgcaaggaagctgaaagggaagcgagacgagcaacagaattggctgatgtagctcgtacagaagcttcttctgctcaaaaggataagggggaagctcaacggctcgcaatggagaggcttgcactgatagaaagaattgagcgacaggttgaagctctagaaagagacaaggctaagatggtggaagagatcgagagacttcatcagtcagagaaggatgctgtgtccaaggtcgcattgctcgaaagaagcgtcgatgagcgggaaaaagagattgatgagatgttgaagcggaataaccagcaaagatccagcacggttcaagtgcttgagagtctgctggcaacagaacgtgaagcatgcgctgaagccaataagagggcagaggacttgtcattgatgttgcaagcaactcaaggcaaactggacatgctccaacaagaaaccacacttgatagcaagctcaagacctctgcaaggcgcttaaggggtgaaggtacagagtctgtacatgatatggatatcgacgaagacaatggtaggcgccggaaacgatcaaaaagcacaacaagccctttgaagagcaatcacacagaggatggtggatctgtatttattggcgaagatacttgcaacgggagtcagcaagggacagaaacagaagactacaccaaatttacagtgctgaaactgaagcaggagctgaccaagcgcgggtttggtgcccaactcctccagttgaaaaatcccaacaagaaggatattgttgccctgtatgaaaagcatgtcgtcggcaagtagtacttgtatgctttctagacttccatgtagtgttcaaacatgaatttacacgatcgtgattgaagcgaaacaatgcatgtaacttaatttaaatctcctgtatctgtatttctccaatggcgcagttcattttaacacatcggcgaatacctgtatcattttagcacatcggcgaatgacataactactgtagagtacagatggctggtcagactgaacctcttctttttcgtatatgtgggtggtttgagtgtcgagtaacaaaaaaaaaaa

SEQ ID NO: 76148 - DNA, 652 bp, Zea Mays
atgaacagggcaccaaaaacttgcacaggaagaatccttatctctcgggcgctcaagacacagaacacgggtacgatatacctctcacatgaaaaggttgggcctggaagccttgaaagtggtccggagcttcctggtaggcggcctgaccttgcggtacacaagcgggaacttgatctcggagttgtggaactgcttggtgttgtccctcttgcacagcttgaagtggaccgtcgctgtcttgatgatctgtatgcagggggacctcacgcggtggcgggaggccatctcgttgtacatctgctccactgcgccgttcagggtggtgtcgcggtactccttgtacatgttgtggtaaccagtcctgctctggtagcgcagccagatgccatagttcttgatggtggtcgggttgcgctcaaagatctcgttgatggcaagcatctggccattgctcttcttcaccttcttgagctttctcaggaagtacctcgttggtggcccagagcttcatgcggtagatcttggggtgctcatcggttggggtcggcagcgcgcgacccaccacctggtactgatggaacctgtgggcgaccatttcggcgagctcgcgtggccggagggacgccgaaggtctcctggtagaacctaa

SEQ ID NO: 76149 - DNA, 2282 bp, Zea Mays
ccgcccactcttctccccctccttgcctgcggattggggcgacaggggttggcgatgccggaggtcaatgccggcgcgctggcgcaggcggagcagaggaagaaggcggggaggtcggttccagagcgtggaaagcgcgatagagattaagagatacgagttgttagtcctccccagagtccgaagcaagctactaggttttcagtttcagatccccgaaaaatacggttgttgttttgacgccaaccgatatacgcggcaggagtaccacgcgacgctggtattggattcgcgtgacttggaacccaccagacatggagtccttcagcgacgccgacagatacataccccaagagatcatcggcagaggcagctacggggtcgtttgctcagctattgaccggcgcaccggcgagaaggtcgcgatcaagaaaataggaggcgtcttcgatgacctgtccgacgccgccaggaccctccgggagatcaagctgctccggctgttacgacaccctgacattgtcgagatcaagcatgtcatgttgcctccggctaggagggactacaaagacatttatgtcgtgtttgaattgatggaggccgaccttcaccaggttatcaaggctaaccctgacctgacgacagagcaccaccagtactttctctatcagatgctgcgtgcgttgaagtatatgcatgctgctaatgtttatcattgggatttaaagccaaaaaatatattattaaatgctgactgcaaactcaaaatatgtgactttgggctagcaagggtcgcgtttgatgactctccaaccacagttttctgcacggactacattgctactagatggtacagggctcctgagctatgtggatctttcttcagcaagtattcaccggctattgatatgtggagcattggctgcatttttgcagagattttgactggggagcccttattccctggtaaaaatgtgtttcaccagttcactttgatgactaatctcctgggcacaccatcaacagatactatttcacagattcaaaatgagaaagcaaggaagtttctgagctgcatgaggaaacaaccaatacccttttcagagaagttccctggtgcagatccttcggctctcaagctcttacaaaggcttctagcatttgatcctaaggaccgaccaacggctgaagaggcattggggaagtggagagggaaccatcctgtcagccaattccgaaaatggaatttgagtttgaagaaaagtttaccgaagaggacgtcaaggaacttatattcctggagatactgcagtaccatcctcaacttctgaaggattacaagaatagctctgaaaaaacgagctttctatatcccagtgctgttgacaagtttcataggcaattcactagcctagaggaaaatagagggagtaatgtcatgcttgtcaggaagaatgcttctcttccaaggacaacaaccgttcactccactccaattcctgcaaaggaaggtccaacagcaacctcccaggctgctcaaaggattccagcagccagaccaggaagagtggtaggcccagtactaccattcgagagcgcaagcgtcactgatcaacacatcgcgcgacaggtggcaaggaacccagccgttcctccagcaaccaacacctcgtcagcctactgctaccacctgaaaccggacagcgccgacaggcaggagcaacagctagagcttgaggaagaccatatgcagtataggacagggcagcatcccatggatgccaaggggcttgcccaaagcgacctaacagacagggccaacctccataggagcccgctgcacggcgttgctcccttcaaaggcgtcgcagcggtcgctggtgttcttcaccgaaagagcgaaggatgcccgatgactggtatgttggatgagctgcagcagatctgcaacgggatggtgaaactggttcagttaacgctaggcctcgagctcatgtttctgaactcgaaggaatttttggaagcttaacaagaatgcatctcttgctatcgttctatatatagcaaagtgatttcttctccggaatttggaggattagttaggagaaagctaggtgataacagacacatgatcgttaaggtgttcgctttggattaaagtcagccaatttctacgctgttttgtctttatagattacagttgtagcagcctaaacagtctgcatacctgtgtatactgtacacccatttaattgagggtttccaaacttttgtttgatggc

SEQ ID NO: 76150 - DNA, 2261 bp, Zea Mays
ccgcccactcttctccccctccttgcctgcggattggggcgacaggggttggcgatgccggaggtcaatgccggcgcgctggcgcaggcggagcagaggaagaaggcggggaggtcggttccagagcgtggaaagcgcgatagagattaagagatacgagttgttagtcctccccagagtccgaagcaagctactaggttttcagtttcagatccccgaaaaatacggttgttgttttgacgccaaccgatatacgcggcaggagtaccacgcgacgctggtattggattcgcgtgacttggaacccaccagacatggagtccttcagcgacgccgacagatacataccccaagagatcatcggcagaggcagctacggggtcgtttgctcagctattgaccggcgcaccggcgagaaggtcgcgatcaagaaaataggaggcgtcttcgatgacctgtccgacgccgccaggaccctccgggagatcaagctgctccggctgttacgacaccctgacattgtcgagatcaagcatgtcatgttgcctccggctaggagggactacaaagacatttatgtcgtgtttgaattgatggaggccgaccttcaccaggttatcaaggctaaccctgacctgacgacagagcaccaccagtactttctctatcagatgctgcgtgcgttgaagtatatgcatgctgctaatgtttatcattgggatttaaagccaaaaaatatattattaaatgctgactgcaaactcaaaatatgtgactttgggctagcaagggtcgcgtttgatgactctccaaccacagttttctgcacggactacattgctactagatggtacagggctcctgagctatgtggatctttcttcagcaagagattttgactggggagcccttattccctggtaaaaatgtgtttcaccagttcactttgatgactaatctcctgggcacaccatcaacagatactatttcacagattcaaaatgagaaagcaaggaagtttctgagctgcatgaggaaacaaccaatacccttttcagagaagttccctggtgcagatccttcggctctcaagctcttacaaaggcttctagcatttgatcctaaggaccgaccaacggctgaagaggcgttggccgatccctattttgaaggcattggggaagtggagagggaaccatcctgtcagccaattccgaaaatggaatttgagtttgaagaaaagtttaccgaagaggacgtcaaggaacttatattcctggagatactgcagtaccatcctcaacttctgaaggattacaagaatagctctgaaaaaacgagctttctatatcccagtgctgttgacaagtttcataggcaattcactagcctagaggaaaatagagggagtaatgtcatgcttgtcaggaagaatgcttctcttccaaggacaacaaccgttcactccactccaattcctgcaaaggaaggtccaacagcaacctcccaggctgctcaaaggattccagcagccagaccaggaagagtggtaggcccagtactaccattcgagagcgcaagcgtcactgatcaacacatcgcgcgacaggtggcaaggaacccagccgttcctccagcaaccaacacctcgtcagcctactgctaccacctgaaaccggacagcgccgacaggcaggagcaacagctagagcttgaggaagaccatatgcagtataggacagggcagcatcccatggatgccaaggggcttgcccaaagcgacctaacagacagggccaacctccataggagcccgctgcacggcgttgctcccttcaaaggcgtcgcagcggtcgctggtgttcttcaccgaaagagcgaaggatgcccgatgactggtatgttggatgagctgcagcagatctgcaacgggatggtgaaactggttcagttaacgctaggcctcgagctcatgtttctgaactcgaaggaatttttggaagcttaacaagaatgcatctcttgctatcgttctatatatagcaaagtgatttcttctccggaatttggaggattagttaggagaaagctaggtgataacagacacatgatcgttaaggtgttcgctttggattaaagtcagccaatttctacgctgttttgtctttatagattacagttgtagcagcctaaacagtctgcatacctgtgtatactgtacacccatttaattgagggtttccaaacttttgtttgatggc

SEQ ID NO: 76151 - DNA, 2456 bp, Zea Mays
ccgcccactcttctccccctccttgcctgcggattggggcgacaggggttggcgatgccggaggtcaatgccggcgcgctggcgcaggcggagcagaggaagaaggcggggaggtcggttccagagcgtggaaaggttgcttcttatctcttctctgccgcccggtgttggtgccatcgacaacgctcgtatgggacgactggctggataaggatgcggcctctccggattttggcatcggcaggaaaggatggatttgggttttgatcctgagttgcttgcttgcagcgcgatagagattaagagatacgagttgttagtcctccccagagtccgaagcaagctactaggttttcagtttcagatccccgaaaaatacggttgttgttttgacgccaaccgatatacgcggcaggagtaccacgcgacgctggtattggattcgcgtgacttggaacccaccagacatggagtccttcagcgacgccgacagatacataccccaagagatcatcggcagaggcagctacggggtcgtttgctcagctattgaccggcgcaccggcgagaaggtcgcgatcaagaaaataggaggcgtcttcgatgacctgtccgacgccgccaggaccctccgggagatcaagctgctccggctgttacgacaccctgacattgtcgagatcaagcatgtcatgttgcctccggctaggagggactacaaagacatttatgtcgtgtttgaattgatggaggccgaccttcaccaggttatcaaggctaaccctgacctgacgacagagcaccaccagtactttctctatcagatgctgcgtgcgttgaagtatatgcatgctgctaatgtttatcattgggatttaaagccaaaaaatatattattaaatgctgactgcaaactcaaaatatgtgactttgggctagcaagggtcgcgtttgatgactctccaaccacagttttctgcacggactacattgctactagatggtacagggctcctgagctatgtggatctttcttcagcaagtattcaccggctattgatatgtggagcattggctgcatttttgcagagattttgactggggagcccttattccctggtaaaaatgtgtttcaccagttcactttgatgactaatctcctgggcacaccatcaacagatactatttcacagattcaaaatgagaaagcaaggaagtttctgagctgcatgaggaaacaaccaatacccttttcagagaagttccctggtgcagatccttcggctctcaagctcttacaaaggcttctagcatttgatcctaaggaccgaccaacggctgaagaggcgttggccgatccctattttgaaggcattggggaagtggagagggaaccatcctgtcagccaattccgaaaatggaatttgagtttgaagaaaagtttaccgaagaggacgtcaaggaacttatattcctggagatactgcagtaccatcctcaacttctgaaggattacaagaatagctctgaaaaaacgagctttctatatcccagtgctgttgacaagtttcataggcaattcactagcctagaggaaaatagagggagtaatgtcatgcttgtcaggaagaatgcttctcttccaaggacaacaaccgttcactccactccaattcctgcaaaggaaggtccaacagcaacctcccaggctgctcaaaggattccagcagaccaggaagagtggtaggcccagtactaccattcgagagcgcaagcgtcactgatcaacacatcgcgcgacaggtggcaaggaacccagccgttcctccagcaaccaacacctcgtcagcctactgctaccacctgaaaccggacagcgccgacaggcaggagcaacagctagagcttgaggaagaccatatgcagtataggacagggcagcatcccatggatgccaaggggcttgcccaaagcgacctaacagacagggccaacctccataggagcccgctgcacggcgttgctcccttcaaaggcgtcgcagcggtcgctggtgttcttcaccgaaagagcgaaggatgcccgatgactggtatgttggatgagctgcagcagatctgcaacgggatggtgaaactggttcagttaacgctaggcctcgagctcatgtttctgaactcgaaggaatttttggaagcttaacaagaatgcatctcttgctatcgttctatatatagcaaagtgatttcttctccggaatttggaggattagttaggagaaagctaggtgataacagacacatgatcgttaaggtgttcgctttggattaaagtcagccaatttctacgctgttttgtctttatagattacagttgtagcagcctaaacagtctgcatacctgtgtatactgtacacccatttaattgagggtttccaaacttttgtttgatggc

SEQ ID NO: 76152 - DNA, 2460 bp, Zea Mays
cttcccccacacgtaatcgtaatgatactcagattctctccacagtcagattctccctacagccagattttcaaaaaatctggtcagaaaaaagctgaaacaaacagccccaagccccaagtaacccaaggggacgccgcctctgctcctccgccgcccactcttctccccctccttgcctgcggattggggcgacaggggttggcgatgccggaggtcaatgccggcgcgctggcgcaggcggagcagaggaagaaggcggggaggtcggttccagagcgtggaaagcgcgatagagattaagagatacgagttgttagtcctccccagagtccgaagcaagctactaggttttcagtttcagatccccgaaaaatacggttgttgttttgacgccaaccgatatacgcggcaggagtaccacgcgacgctggtattggattcgcgtgacttggaacccaccagacatggagtccttcagcgacgccgacagatacataccccaagagatcatcggcagaggcagctacggggtcgtttgctcagctattgaccggcgcaccggcgagaaggtcgcgatcaagaaaataggaggcgtcttcgatgacctgtccgacgccgccaggaccctccgggagatcaagctgctccggctgttacgacaccctgacattgtcgagatcaagcatgtcatgttgcctccggctaggagggactacaaagacatttatgtcgtgtttgaattgatggaggccgaccttcaccaggttatcaaggctaaccctgacctgacgacagagcaccaccagtactttctctatcagatgctgcgtgcgttgaagtatatgcatgctgctaatgtttatcattgggatttaaagccaaaaaatatattattaaatgctgactgcaaactcaaaatatgtgactttgggctagcaagggtcgcgtttgatgactctccaaccacagttttctgcacggactacattgctactagatggtacagggctcctgagctatgtggatctttcttcagcaagtattcaccggctattgatatgtggagcattggctgcatttttgcagagattttgactggggagcccttattccctggtaaaaatgtgtttcaccagttcactttgatgactaatctcctgggcacaccatcaacagatactatttcacagattcaaaatgagaaagcaaggaagtttctgagctgcatgaggaaacaaccaatacccttttcagagaagttccctggtgcagatccttcggctctcaagctcttacaaaggcttctagcatttgatcctaaggaccgaccaacggctgaagaggcgttggccgatccctattttgaaggcattggggaagtggagagggaaccatcctgtcagccaattccgaaaatggaatttgagtttgaagaaaagtttaccgaagaggacgtcaaggaacttatattcctggagatactgcagtaccatcctcaacttctgaaggattacaagaatagctctgaaaaaacgagctttctatatcccagtgctgttgacaagtttcataggcaattcactagcctagaggaaaatagagggagtaatgtcatgcttgtcaggaagaatgcttctcttccaaggacaacaaccgttcactccactccaattcctgcaaaggaaggtccaacagcaacctcccaggctgctcaaaggattccagcagccagaccaggaagagtggtaggcccagtactaccattcgagagcgcaagcgtcactgatcaacacatcgcgcgacaggtggcaaggaacccagccgttcctccagcaaccaacacctcgtcagcctactgctaccacctgaaaccggacagcgccgacaggcaggagcaacagctagagcttgaggaagaccatatgcagtataggacagggcagcatcccatggatgccaaggggcttgcccaaagcgacctaacagacagggccaacctccataggagcccgctgcacggcgttgctcccttcaaaggcgtcgcagcggtcgctggtgttcttcaccgaaagagcgaaggatgcccgatgactggtatgttggatgagctgcagcagatctgcaacgggatggtgaaactggttcagttaacgctaggcctcgagctcatgtttctgaactcgaaggaatttttggaagcttaacaagaatgcatctcttgctatcgttctatatatagcaaagtgatttcttctccggaatttggaggattagttaggagaaagctaggtgataacagacacatgatcgttaaggtgttcgctttggattaaagtcagccaatttctacgctgttttgtctttatagattacagttgtagcagcctaaacagtctgcatacctgtgtatactgtacacccatttaattgagggtttccaaacttttgtttgatggc

SEQ ID NO: 76153 - DNA, 1957 bp, Zea Mays
cttcttatccccaatggcggacgcacgtcgacacatcactgctcactctgcactctcgcgggatggagcttggcctagcgctccggctcgtcgcgccgccaccgctgctgccgtgtctctcccgtagagctctttccctaccaccggattttgtttcctcgcgtgtgcttcgaggaagacgcatccatgcctcgagactgaagcatggagctggggttgtgtgcaatgcgattatgacctattcaggagtggaagaggaggagatggtggaagaagaaatggaagaggaggctgaaccggcggtgagcacaaggccgcgcctggagctcatcgagaagccggaccggagcctggcgctgctggatgagtacgagtcggaggaactgggcacctctctttgcgccaatcatcgtagcgattatactttatgacactcctggtgttattaaaaaggagatgcataagctggacagtatgatgatgaagaatgttaggagcgctatcggcagtgcggactgtgtgcttgttgttgctgatgcttgcaaaactcctgaaaagattgatgaaatgcttgaagaaggtgttggaaacaaagatattggacttcctgtactgctggtattgaacaagaaagatctcataaaacccggagaaatcgcaaagaaacttgaggtgcgaaccttataaaattgtcgaaaggtggttccctgtttcttttgtgctttcctctgcataaagacggtattgatttctagacgactcttttaacagtggtaccaaaaatttactaatgttgatgatgttataccaataagtgctaaatttggtcatggagtggatgatatcaaggagtggatattgtcaaagctccctctgggtcctgcttactaccccaaggatatagctagcgaacaccctgagagattttttgttggtgaaatagtgagggaaaagatttttgttcagtacaggcaggaaattccttattcatgccaggttaatgttgtcagttacaaaagtcggcctgctgccaaggacttcattcaagttgagatacttgtggagaaagaatcacaaagaggcattatactagggaaggatggcaaaagcataaagatgctggcaaccgcatcgaggcttgacatcgaggactttctacagaagaaagtctaccttgaggtggaggtcaaagtgaaggaaaactggcggcaggacgagcgactcctgaagcggtatggctacggcggcgagatccaagcgctgtgactgtgactgtgactatgaccggtgcgctctagctcactgtcagctgccgcgagcgtggaatgacctggttttttttcaattcctctcgtgtgttgttgttgtcgatgcgaatgagtagcagttatttaacctggtgtcgaactcaactagcagctcagttgtgttaattagtcagcaagttatgtgctctgatcctgctgttgttgtcagcggaactggttttgccgcagacaagtcagcatggttgcgctctctgtagcagtctgtgtgaatagaatcacgggggagttcagacatcagagggactgaacagccgagccaagccacaagtgcatgtacaagtcgtgtccttcgggcggcggcgggtccaggtggaggcgcgccgtgtgccggtgccctgcgccggccgtcgtggatacggtgtggcatagcgagcacgaccggttggggctgactgaccgtgggaggcggtggagtatgctgatacacgtcgggtctgccgcagcattgacttggctaccttgagcagctcctctgttgtccaaacaaaaaaactcaacttctccacagaccacatgacagctgggatggttaaccgagtgactgacgtatttataagccggaccggccctaccgaatagccgccatatgtgtgcactgcagattttttttatttacgtacattttgtct

SEQ ID NO: 76154 - DNA, 2038 bp, Zea Mays
cttcttatccccaatggcggacgcacgtcgacacatcactgctcactctgcactctcgcgggatggagcttggcctagcgctccggctcgtcgcgccgccaccgctgctgccgtgtctctcccgtagagctctttccctaccaccggattttgtttcctcgcgtgtgcttcgaggaagacgcatccatgcctcgagactgaagcatggagctggggttgtgtgcaatgcgattatgacctattcaggagtggaagaggaggagatggtggaagaagaaatggaagaggaggctgaaccggcggtgagcacaaggccgcgcctggagctcatcgagaagccggaccggagcctggcgctgctggatgagtacgagtcggaggaactgggcacctctctttgcgccaatcatcgtagcggttatgttgctgtattggggaagccaaatgttggcaagagcacacttattaaccaaatggttggtcagaaactttcaattgtaacagataaaccgcaaacgacaagacatcgcattcttggtatatgttctgaaccagagtaccagtttgcagattatactttatgacactcctggtgttattaaaaaggagatgcataagctggacagtatgatgatgaagaatgttaggagcgctatcggcagtgcggactgtgtgcttgttgttgctgatgcttgcaaaactcctgaaaagattgatgaaatgcttgaagaaggtgttggaaacaaagatattggacttcctgtactgctggtattgaacaagaaagatctcataaaacccggagaaatcgcaaagaaacttgaggtgcgaaccttataaaattgtcgaaagtggtaccaaaaatttactaatgttgatgatgttataccaataagtgctaaatttggtcatggagtggatgatatcaaggagtggatattgtcaaagctccctctgggtcctgcttactaccccaaggatatagctagcgaacaccctgagagattttttgttggtgaaatagtgagggaaaagatttttgttcagtacaggcaggaaattccttattcatgccaggttaatgttgtcagttacaaaagtcggcctgctgccaaggacttcattcaagttgagatacttgtggagaaagaatcacaaagaggcattatactagggaaggatggcaaaagcataaagatgctggcaaccgcatcgaggcttgacatcgaggactttctacagaagaaagtctaccttgaggtggaggtcaaagtgaaggaaaactggcggcaggacgagcgactcctgaagcggtatggctacggcggcgagatccaagcgctgtgactgtgactgtgactatgaccggtgcgctctagctcactgtcagctgccgcgagcgtggaatgacctggttttttttcaattcctctcgtgtgttgttgttgtcgatgcgaatgagtagcagttatttaacctggtgtcgaactcaactagcagctcagttgtgttaattagtcagcaagttatgtgctctgatcctgctgttgttgtcagcggaactggttttgccgcagacaagtcagcatggttgcgctctctgtagcagtctgtgtgaatagaatcacgggggagttcagacatcagagggactgaacagccgagccaagccacaagtgcatgtacaagtcgtgtccttcgggcggcggcgggtccaggtggaggcgcgccgtgtgccggtgccctgcgccggccgtcgtggatacggtgtggcatagcgagcacgaccggttggggctgactgaccgtgggaggcggtggagtatgctgatacacgtcgggtctgccgcagcattgacttggctaccttgagcagctcctctgttgtccaaacaaaaaaactcaacttctccacagaccacatgacagctgggatggttaaccgagtgactgacgtatttataagccggaccggccctaccgaatagccgccatatgtgtgcactgcagattttttttatttacgtacattttgtct

SEQ ID NO: 76155 - DNA, 1881 bp, Zea Mays
cttcttatccccaatggcggacgcacgtcgacacatcactgctcactctgcactctcgcgggatggagcttggcctagcgctccggctcgtcgcgccgccaccgctgctgccgtgtctctcccgagtggaagaggaggagatggtggaagaagaaatggaagaggaggctgaaccggcggtgagcacaaggccgcgcctggagctcatcgagaagccggaccggagcctggcgctgctggatgagtacgagtcggaggaactgggcacctctctttgcgccaatcatcgtagcggttatgttgctgtattggggaagccaaatgttggcaagagcacacttattaaccaaatggttggtcagaaactttcaattgtaacagataaaccgcaaacgacaagacatcgcattcttggtatatgttctgaaccagagtaccagattatactttatgacactcctggtgttattaaaaaggagatgcataagctggacagtatgatgatgaagaatgttaggagcgctatcggcagtgcggactgtgtgcttgttgttgctgatgcttgcaaaactcctgaaaagattgatgaaatgcttgaagaaggtgttggaaacaaagatattggacttcctgtactgctggtattgaacaagaaagatctcataaaacccggagaaatcgcaaagaaacttgagtggtaccaaaaatttactaatgttgatgatgttataccaataagtgctaaatttggtcatggagtggatgatatcaaggagtggatattgtcaaagctccctctgggtcctgcttactaccccaaggatatagctagcgaacaccctgagagattttttgttggtgaaatagtgagggaaaagatttttgttcagtacaggcaggaaattccttattcatgccaggttaatgttgtcagttacaaaagtcggcctgctgccaaggacttcattcaagttgagatacttgtggagaaagaatcacaaagaggcattatactagggaaggatggcaaaagcataaagatgctggcaaccgcatcgaggcttgacatcgaggactttctacagaagaaagtctaccttgaggtggaggtcaaagtgaaggaaaactggcggcaggacgagcgactcctgaagcggtatggctacggcggcgagatccaagcgctgtgactgtgactgtgactatgaccggtgcgctctagctcactgtcagctgccgcgagcgtggaatgacctggttttttttcaattcctctcgtgtgttgttgttgtcgatgcgaatgagtagcagttatttaacctggtgtcgaactcaactagcagctcagttgtgttaattagtcagcaagttatgtgctctgatcctgctgttgttgtcagcggaactggttttgccgcagacaagtcagcatggttgcgctctctgtagcagtctgtgtgaatagaatcacgggggagttcagacatcagagggactgaacagccgagccaagccacaagtgcatgtacaagtcgtgtccttcgggcggcggcgggtccaggtggaggcgcgccgtgtgccggtgccctgcgccggccgtcgtggatacggtgtggcatagcgagcacgaccggttggggctgactgaccgtgggaggcggtggagtatgctgatacacgtcgggtctgccgcagcattgacttggctaccttgagcagctcctctgttgtccaaacaaaaaaactcaacttctccacagaccacatgacagctgggatggttaaccgagtgactgacgtatttataagccggaccggccctaccgaatagccgccatatgtgtgcactgcagattttttttatttacgtacattttgtct

SEQ ID NO: 76156 - DNA, 1822 bp, Zea Mays
cttcttatccccaatggcggacgcacgtcgacacatcactgctcactctgcactctcgcgggatggagcttggcctagcgctccggctcgtcgcgccgccaccgctgctgccgtgtctctcccgtagagctctttccctaccaccggattttgtttcctcgcgtgtgcttcgaggaagacgcatccatgcctcgagactgaagcatggagctggggttgtgtgcaatgcgattatgacctattcaggagtggaagaggaggagatggtggaagaagaaatggaagaggaggctgaaccggcggtgagcacaaggccgcgcctggagctcatcgagaagccggaccggagcctggcgctgctggatgagtacgagtcggaggaactgggcacctctctttgcgccaatcatcgtagcggttatgttgctgtattggggaagccaaatgttggcaagagcacacttattaaccaaatggttggtcagaaactttcaattgtaacagataaaccgcaaacgacaagacatcgcattcttggtatatgttctgaaccagagtaccagtttgcagattatactttatgacactcctggtgttattaaaaaggagatgcataagctggacagtatgatgatgaagaatgttaggagcgctatcggcagtgcggactgtgtgcttgttgttgctgatgcttgcaaaactcctgaaaagattgatgaaatgcttgaagaaggtgttggaaacaaagatattggacttcctgtactgctggtattgaacaagaaagatctcataaaacccggagaaatcgcaaagaaacttgagtggtaccaaaaatttactaatgttgatgatgttataccaataagtgctaaatttggtcatggagtggatgatatcaaggagtggatattgtcaaagctccctctgggtcctgcttactaccccaaggatatagctagcgaacaccctgagagattttttgttggtgaaatagtgagggaaaagatttttgttcagtacaggcaggaaattccttattcatgccaggttaatgttgtcagttacaaaagtcggcctgctgccaaggacttcattcaagttgagatacttgtggagaaagaatcacaaagaggcattatactagggaaggatggcaaaagcataaagatgctggcaaccgcatcgaggcttgacatcgaggactttctacagaagaaagtctaccttgaggtggaggtcaaagtgaaggaaaactggcggcaggacgagcgactcctgaagcggtatggctacggcggcgagatccaagcgctgtgactgtgactgtgactatgaccgcggaactggttttgccgcagacaagtcagcatggttgcgctctctgtagcagtctgtgtgaatagaatcacgggggagttcagacatcagagggactgaacagccgagccaagccacaagtgcatgtacaagtcgtgtccttcgggcggcggcgggtccaggtggaggcgcgccgtgtgccggtgccctgcgccggccgtcgtggatacggtgtggcatagcgagcacgaccggttggggctgactgaccgtgggaggcggtggagtatgctgatacacgtcgggtctgccgcagcattgacttggctaccttgagcagctcctctgttgtccaaacaaaaaaactcaacttctccacagaccacatgacagctgggatggttaaccgagtgactgacgtatttataagccggaccggccctaccgaatagccgccatatgtgtgcactgcagattttttttatttacgtacattttgtct

SEQ ID NO: 76157 - DNA, 1678 bp, Zea Mays
ggaggaggctatgcatgtgttggcaggtggcactgcaaaaaggagtaatgtgaatggcgatgtgaagaatgctgattccaactggttatgttgctgtattggggaagccaaatgttggcaagagcacacttattaaccaaatggttggtcagaaactttcaattgtaacagataaaccgcaaacgacaagacatcgcattcttggtatatgttctgaaccagagtaccagtttgcagattatactttatgacactcctggtgttattaaaaaggagatgcataagctggacagtatgatgatgaagaatgttaggagcgctatcggcagtgcggactgtgtgcttgttgttgctgatgcttgcaaaactcctgaaaagattgatgaaatgcttgaagaaggtgttggaaacaaagatattggacttcctgtactgctggtattgaacaagaaagatctcataaaacccggagaaatcgcaaagaaacttgagtggtaccaaaaatttactaatgttgatgatgttataccaataagtgctaaatttggtcatggagtggatgatatcaaggagtggatattgtcaaagctccctctgggtcctgcttactaccccaaggatatagctagcgaacaccctgagagattttttgttggtgaaatagtgagggaaaagatttttgttcagtacaggcaggaaattccttattcatgccaggttaatgttgtcagttacaaaagtcggcctgctgccaaggacttcattcaagttgagatacttgtggagaaagaatcacaaagaggcattatactagggaaggatggcaaaagcataaagatgctggcaaccgcatcgaggcttgacatcgaggactttctacagaagaaagtctaccttgaggtggaggtcaaagtgaaggaaaactggcggcaggacgagcgactcctgaagcggtatggctacggcggcgagatccaagcgctgtgactgtgactgtgactatgaccggtgcgctctagctcactgtcagctgccgcgagcgtggaatgacctggttttttttcaattcctctcgtgtgttgttgttgtcgatgcgaatgagtagcagttatttaacctggtgtcgaactcaactagcagctcagttgtgttaattagtcagcaagttatgtgctctgatcctgctgttgttgtcagcggaactggttttgccgcagacaagtcagcatggttgcgctctctgtagcagtctgtgtgaatagaatcacgggggagttcagacatcagagggactgaacagccgagccaagccacaagtgcatgtacaagtcgtgtccttcgggcggcggcgggtccaggtggaggcgcgccgtgtgccggtgccctgcgccggccgtcgtggatacggtgtggcatagcgagcacgaccggttggggctgactgaccgtgggaggcggtggagtatgctgatacacgtcgggtctgccgcagcattgacttggctaccttgagcagctcctctgttgtccaaacaaaaaaactcaacttctccacagaccacatgacagctgggatggttaaccgagtgactgacgtatttataagccggaccggccctaccgaatagccgccatatgtgtgcactgcagattttttttatttacgtacattttgtct

SEQ ID NO: 76158 - DNA, 1113 bp, Zea Mays
cttcttatccccaatggcggacgcacgtcgacacatcactgctcactctgcactctcgcgggatggagcttggcctagcgctccggctcgtcgcgccgccaccgctgctgccgtgtctctcccgtagagctctttccctaccaccggattttgtttcctcgcgtgtgcttcgaggaagacgcatccatgcctcgagactgaagcatggagctggggttgtgtgcaatgcgattatgacctattcaggagtggaagaggaggagatggtggaagaagaaatggaagaggaggctgaaccggcggtgagcacaaggccgcgcctggagctcatcgagaagccggaccggagcctggcgctgctggatgagtacgagtcggaggaactgggcacctctctttgcgccaatcatcgtagcggttatgttgctgtattggggaagccaaatgttggcaagagcacacttattaaccaaatggttggtcagaaactttcaattgtaacagataaaccgcaaacgacaagacatcgcattcttggtatatgttctgaaccagagtaccagtttgcagattatactttatgacactcctggtgttattaaaaaggagatgcataagctggacagtatgatgatgaagaatgttaggagcgctatcggcagtgcggactgtgtgcttgttgttgctgatgcttgcaaaactcctgaaaagattgatgaaatgcttgaagaaggtgttggaaacaaagatattggacttcctgtactgctggtattgaacaagaaagatctcataaaacccggagaaatcgcaaagaaacttgagtggtaccaaaaatttactaatgttgatgatgttataccaataagtgctaaatttggtcatggagtggatgatatcaaggagtggatattgtcaaagctccctctgggtcctgcttactaccccaaggatatagctagcgaacaccctgagagatttttagtacagtgttatcaccctctttgttgctctgtggttgagcgtatgctctgtaatatgattcctcagttgaacggacccgtctatttcttgttagatgttgtactacgtgggattatttgagattaatag

SEQ ID NO: 76159 - DNA, 92 bp, Zea Mays
ctccctttcatcttcagtgtcactctgctcagtaatgccagttgctgcttctgtgaacacgtcctgactataccatttgctttacaatctgc

SEQ ID NO: 76160 - DNA, 1630 bp, Zea Mays
acaaggctatcgagttcgccaactggaactcatcatcccaaggatctcccacataataggtatattatagtaattacatttgatacaaacacattagagatagagcggaagacttttacaaagtacactttacattcgagaactcaagttttacatggtagaaagaaatgtatttattacaagtcctgatagtactcgaagtgcataacttaactacaatatttggtaaggtaaagcctttccataagagatacacataagtaatctaagcttcaagacctccacatgaagtaactaattaagccaaagacattataatctttcctgcaacaacatagggaataaaatcttgagtaggcaattactcagcaagacttacccaactaagaaaaagactctcaagggcatgctagctttgggactcaaggaaaagctcatcaattatcaaggactcctttttgcagaaaagcaggcttattaataatggatccttaagccaagttttacttcactagttaggttattacctgaatcttctagcctaaatttagcatttgcctaatctagatcattcacttgacctacactaggttgcttttaatcaaaactttgctatacctgttaactacgctgcaggtcgaagatctagtcttcataatcaagaagtaacggcgatccgaatcgattaatacccagctggggatctccaaccacaagacatatgcttcccttaactcttttgcacatgtctaccattcccacggatcctccaccatatgaataggtccgtgccacccgagagcacagtactccccatccagcctcttgctagggggtacacgctactctcaccatctctccagtcagctcccagtgcgtgattgtctttttacatagggaataattgagttcaggcttgcccatgacgaggtatgtggccagataaaaggtcttagatcagcaggccaacaatcggtacagtccttaatcaacagagacgggcgacttttcatgctcaccgtctggtctcgtctaaaactatttcataactttggtgcctggcagaggggccatgcctagataatgaactcatcaatgtcttgatgccttcattatcccatactcatttttcttttctaaaaacatgagtcatagatcaaaaacatttttcttaatctatcggcgtgactaagcatcactaggttttattaaacaggtaacatggtatggtaatcaagctttcaaggatggtaatgcatcaagagtttaatcaatcaactcctatcacctaatgcaacatataagtgataaaattttgtaaacacaaggaaggtgacaaatgcatcggagcttgcctttgttgctgagaagagccaatgactaagaaaataaattgccacaagtcttcaaggtgataactagcctccaagaaattacttcacaatgcgatacacgtaaaataaagattcatgctatgatcatgatgtgatgatgaataaaccacattccaaattgaaccaaacttttaaaacgagctaatttaggcctatgcaaaattaaaggcgagtcgagattcgcgaaaactacgacgaatctgactgagactattactgagcatctgatgtgcgac

SEQ ID NO: 76161 - DNA, 540 bp, Zea Mays
aaggattgttctccaacagtcactttacaagtttgttatagtaactctttaccaaaagtccatagataaaaagttataagggtccaaaaacagctatatgaaactgttttcagcccaattcaaactgaacccaatctgaaattttgcaaattactccaaatttctccacacaacttggaattctccagatatgaaatttgttcacttttccaagttctacaaccttggtatatgaacttttagctaaatccttctagattttaaatttcacatttggggttagtttagggtttcaaatgagtttcatttgtttttcagcttcttccagggattcatacctttgatccatccatcaaaaacaaagttcagtgcagcggtggttttgttgtaatgggtcagaggtggcagtaggaccattggcaccttcatcaatttaagttcagtgcagcggtgagggaaaaatccatcaccagcatgggataagttggtatttaacaagataaaagctagaccctgtggacgagtgagacttatgagttc

SEQ ID NO: 76162 - DNA, 359 bp, Zea Mays
ccgaggaggaaggaaggattaccgccgcggtaaggaaacttggcccgtcgtgcgccgttcgtcgctcaccggtgacttgttctccattgtgtgtccgggttcatccctggggtcccttgaagccagcgcaaagatcacccgggctcgttctcattccgggagcatcgagaattgctcgctggagctcacgatctgccgccgttccgtctagctccatgggcagcctcaacgccgtactcaccactacgcgaggttacaagtcatatgaagagcaagttggtacctggaatctcaagtcccagacaagttgtgcccttgatcacttttatttacccaataatgttctctattaatcactg

SEQ ID NO: 76163 - DNA, 1819 bp, Zea Mays
ctccgttctgttccgccccgccccgccccgaagcagcgcgaaacgacacacgcgagctatcccgacagtaggaagcgagacggggccagtaggaagcgccaagcagcaacgcagcgcatccactcgtcatcggcaaaccaacacccccggcccggccgcgggcggctgcgctcacactccactcccctgacggcctgaccccgcgcgcacaagcaacagcagcccgatggccgcaccgtcctccgccgccacagcctgcttcgtctccccgctcccgccgcctcgccgcccgcgtcatttcctcaggcacctcgcgcgcgccgccgccgccgagcccacgcccgcctccgcctcctcgttcgccctcccgtcgccatggccgtgggcgcggcggctccgcgacctggtccccgccgaggccgcgggccggctgctgtcgtcggccgcgggctccctcatcgtcgcgctcgcctccgcgtcgctcgtcctcggcgacgccggcgcggcctccgcgttcgtcgtatccacgccgcggaagctgcaggcggacgagctcgccaccgtgcgcctcttccaggagaacacaccctccgtcgtctacatcaccaacctcgccgtcaggcaggacgcgttcacgctcgacgtgctcgaggtgccgcaggggtccgggtccggctttgtctgggataagagcggccacatcgtcaccaatttccatgtcatccgtggcgcgtcagaccttagggtcacacttgctgatcagtcagtgtatgaagcacaagttgttggatttgaccaggacaaggatgttgctgttttgcgtatcgaagcaccaaaggataaactaagacctatacctgttggtgtgtcagcagacctactggttggtcagaaagtatatgccattggaaacccatttggccttgaccacactcttacaacaggtgttatcagtggattgcgccgagaaatcagttcagctgccacaggacgtcctatacaagatgtgatacagactgatgctgctatcaaccctggttgggggcattgtggaccaacttataaggtttggcaaggtgacaaggcctattttgggagtaaaatttgcccccgatcaatctgtggagcagcttggattaagtggagtgcttgtcctggatgctcctccaaacggaccagccggcaaagcgggtctgcagccaaccaaacgagatccctatggtcggcttatcctgggtgacataattacctctgtgaatggcacaaaggtgacaaacggaagcgacctgtaccggatactggatcagtgtaaagtcggggaaacggtgaccgtggaagtcctgcgtggcgatcataaggagaagatccccgtggtcctcgagccgaaggccgacgaatcatagcgaacccagacgcgcaaatacacaagggcgcgtgtcctagcattttcgccttcgttcgctgtacataattcctgctggtctgctggagaagaaggggggtactatccaggtcgccgcccgtaatgccgtctcagcattttctgtgtgtgtgcgtgtgtgctgtagcatgtcggcatcctacagtgctttagagtttatagatagatggcctacccttattaatacgagatgttgatcagatgaccatccatccagggaagggaaactgcgggtagaggaccaatgagcttactgatatcacggatcacctaaacctttttgaccaaaaaaaatacgtgctgactttctgctggagctggcagttggcatcgctgcaatcctaggtgggatcccagaacacaacagggatcaatgcg

SEQ ID NO: 76164 - DNA, 1812 bp, Zea Mays
ctccgttctgttccgccccgccccgccccgaagcagcgcgaaacgacacacgcgagctatcccgacagtaggaagcgagacggggccagtaggaagcgccaagcagcaacgcagcgcatccactcgtcatcggcaaaccaacacccccggcccggccgcgggcggctgcgctcacactccactcccctgacggcctgaccccgcgcgcacaagcaacagcagcccgatggccgcaccgtcctccgccgccacagcctgcttcgtctccccgctcccgccgcctcgccgcccgcgtcatttcctcaggcacctcgcgcgcgccgccgccgccgagcccacgcccgcctccgcctcctcgttcgccctcccgtcgccatggccgtgggcgcggcggctccgcgacctggtccccgccgaggccgcgggccggctgctgtcgtcggccgcgggctccctcatcgtcgcgctcgcctccgcgtcgctcgtcctcggcgacgccggcgcggcctccgcgttcgtcgtatccacgccgcggaagctgcaggcggacgagctcgccaccgtgcgcctcttccaggagaacacaccctccgtcgtctacatcaccaacctcgccgtcagggtcacacttgctgatcagtcagtgtatgaagcacaagttgttggatttgaccaggacaaggatgttgctgttttgcgtatcgaagcaccaaaggataaactaagacctatacctgttggtgtgtcagcagacctactggttggtcagaaagtatatgccattggaaacccatttggccttgaccacactcttacaacaggtgttatcagtggattgcgccgagaaatcagttcagctgccacaggacgtcctatacaagatgtgatacagactgatgctgctatcaaccctggtaacagtggtggtccactccttgatagttctggaaacttgataggtgtaaacacagctatatactcgccctcgggagcatcatctggtgttgggttttccattccggtcgatacagttgggggcattgtggaccaacttataaggtttggcaaggtgacaaggcctattttgggagtaaaatttgcccccgatcaatctgtggagcagcttggattaagtggagtgcttgtcctggatgctcctccaaacggaccagccggcaaagcgggtctgcagccaaccaaacgagatccctatggtcggcttatcctgggtgacataattacctctgtgaatggcacaaaggtgacaaacggaagcgacctgtaccggatactggatcagtgtaaagtcggggaaacggtgaccgtggaagtcctgcgtggcgatcataaggagaagatccccgtggtcctcgagccgaaggccgacgaatcatagcgaacccagacgcgcaaatacacaagggcgcgtgtcctagcattttcgccttcgttcgctgtacataattcctgctggtctgctggagaagaaggggggtactatccaggtcgccgcccgtaatgccgtctcagcattttctgtgtgtgtgcgtgtgtgctgtagcatgtcggcatcctacagtgctttagagtttatagatagatggcctacccttattaatacgagatgttgatcagatgaccatccatccagggaagggaaactgcgggtagaggaccaatgagcttactgatatcacggatcacctaaacctttttgaccaaaaaaaatacgtgctgactttctgctggagctggcagttggcatcgctgcaatcctaggtgggatcccagaacacaacagggatcaatgcg

SEQ ID NO: 76165 - DNA, 2575 bp, Zea Mays
ctccgttctgttccgccccgccccgccccgaagcagcgcgaaacgacacacgcgagctatcccgacagtaggaagcgagacggggccagtaggaagcgccaagcagcaacgcagcgcatccactcgtcatcggcaaaccaacacccccggcccggccgcgggcggctgcgctcacactccactcccctgacggcctgaccccgcgcgcacaagcaacagcagcccgatggccgcaccgtcctccgccgccacagcctgcttcgtctccccgctcccgccgcctcgccgcccgcgtcatttcctcaggcacctcgcgcgcgccgccgccgccgagcccacgcccgcctccgcctcctcgttcgccctcccgtcgccatggccgtgggcgcggcggctccgcgacctggtccccgccgaggccgcgggccggctgctgtcgtcggccgcgggctccctcatcgtcgcgctcgcctccgcgtcgctcgtcctcggcgacgccggcgcggcctccgcgttcgtcgtatccacgccgcggaagctgcaggcggacgagctcgccaccgtgcgcctcttccaggagaacacaccctccgtcgtctacatcaccaacctcgccgtcaggacgcgttcacgctcgacgtgctcgaggtgccgcaggggtccgggtccggctttgtctgggataagagcggccacatcgtcaccaatttccatgtcatccgtggcgcgtcagaccttaggttggtcgggactccggagggcttcatgctttccttctacgttttcttagccgtttggttgtgctcaaatcgaagcttgtcgattcttgtattaatggttagggtcgctggtgtttcattaaaatatggtctagccttccaataatttcaagtggacagagcggggagaaaggagttgtggtgcttcaatgtgttgttggtaagctggggcaaagcagttactgatcggccccagcaaactacaaacagggcccattagtaatgcttcattgtcaatttggctctccctacaagacctagtcggagcaaaattagtatgtccaaaagggcttatattttagtgcagcagaagcaacatgacacttgttctacagcttcactatctggctgttagaagttatgggatgcatctgcattaccgaaaggtttagaaaagatactgcttgctctacaagttccttgcatcccaatttcgagtagtaaatacctaatgctacacttggatatttcaatgcaaaagatctaattattcaagttaacaacgcagaatgttcttatttatgctaaccaaatctttgtgtggtaatgctctgcggttgtgcccgtctcactgctaatgtctaatgatctcgactgggatcagacacaattgtaaaacatccatacatgtttctttctttttttcaatggcttttgtatgttgatgatgcctagatatgtatagtggcaaagcgaagatacaactgatagttttatgcagggtcacacttgctgatcagtcagtgtatgaagcacaagttgttggatttgaccaggacaaggatgttgctgttttgcgtatcgaagcaccaaaggataaactaagacctatacctgttggtgtgtcagcagacctactggttggtcagaaagtatatgccattggaaacccatttggccttgaccacactcttacaacaggtgttatcagtggattgcgccgagaaatcagttcagctgccacaggacgtcctatacaagatgtgatacagactgatgctgctatcaaccctggttgggggcattgtggaccaacttataaggtttggcaaggtgacaaggcctattttgggagtaaaatttgcccccgatcaatctgtggagcagcttggattaagtggagtgcttgtcctggatgctcctccaaacggaccagccggcaaagcgggtctgcagccaaccaaacgagatccctatggtcggcttatcctgggtgacataattacctctgtgaatggcacaaaggtgacaaacggaagcgacctgtaccggatactggatcagtgtaaagtcggggaaacggtgaccgtggaagtcctgcgtggcgatcataaggagaagatccccgtggtcctcgagccgaaggccgacgaatcatagcgaacccagacgcgcaaatacacaagggcgcgtgtcctagcattttcgccttcgttcgctgtacataattcctgctggtctgctggagaagaaggggggtactatccaggtcgccgcccgtaatgccgtctcagcattttctgtgtgtgtgcgtgtgtgctgtagcatgtcggcatcctacagtgctttagagtttatagatagatggcctacccttattaatacgagatgttgatcagatgaccatccatccagggaagggaaactgcgggtagaggaccaatgagcttactgatatcacggatcacctaaacctttttgaccaaaaaaaatacgtgctgactttctgctggagctggcagttggcatcgctgcaatcctaggtgggatcccagaacacaacagggatcaatgcg

SEQ ID NO: 76166 - DNA, 2888 bp, Zea Mays
ctccgttctgttccgccccgccccgccccgaagcagcgcgaaacgacacacgcgagctatcccgacagtaggaagcgagacggggccagtaggaagcgccaagcagcaacgcagcgcatccactcgtcatcggcaaaccaacacccccggcccggccgcgggcggctgcgctcacactccactcccctgacggcctgaccccgcgcgcacaagcaacagcagcccgatggccgcaccgtcctccgccgccacagcctgcttcgtctccccgctcccgccgcctcgccgcccgcgtcatttcctcaggcacctcgcgcgcgccgccgccgccgagcccacgcccgcctccgcctcctcgttcgccctcccgtcgccatggccgtgggcgcggcggctccgcgacctggtccccgccgaggccgcgggccggctgctgtcgtcggccgcgggctccctcatcgtcgcgctcgcctccgcgtcgctcgtcctcggcgacgccggcgcggcctccgcgttcgtcgtatccacgccgcggaagctgcaggcggacgagctcgccaccgtgcgcctcttccaggagaacacaccctccgtcgtctacatcaccaacctcgccgtcaggcaggacgcgttcacgctcgacgtgctcgaggtgccgcaggggtccgggtccggctttgtctgggataagagcggccacatcgtcaccaatttccatgtcatccgtggcgcgtcagaccttaggttggtcgggactccggagggcttcatgctttccttctacgttttcttagccgtttggttgtgctcaaatcgaagcttgtcgattcttgtattaatggttagggtcgctggtgtttcattaaaatatggtctagccttccaataatttcaagtggacagagcggggagaaaggagttgtggtgcttcaatgtgttgttggtaagctggggcaaagcagttactgatcggccccagcaaactacaaacagggcccattagtaatgcttcattgtcaatttggctctccctacaagacctagtcggagcaaaattagtatgtccaaaagggcttatattttagtgcagcagaagcaacatgacacttgttctacagcttcactatctggctgttagaagttatgggatgcatctgcattaccgaaaggtttagaaaagatactgcttgctctacaagttccttgcatcccaatttcgagtagtaaatacctaatgctacacttggatatttcaatgcaaaagatctaattattcaagttaacaacgcagaatgttcttatttatgctaaccaaatctttgtgtggtaatgctctgcggttgtgcccgtctcactgctaatgtctaatgatctcgactgggatcagacacaattgtaaaacatccatacatgtttctttctttttttcaatggcttttgtatgttgatgatgcctagatatgtatagtggcaaagcgaagatacaactgatagttttatgcagggtcacacttgctgatcagtcagtgtatgaagcacaagttgttggatttgaccaggacaaggatgttgctgttttgcgtatcgaagcaccaaaggataaactaagacctatacctgttggtgtgtcagcagacctactggttggtcagaaagtatatgccattggaaacccatttggccttgaccacactcttacaacaggtgttatcagtggattgcgccgagaaatcagttcagctgccacaggacgtcctatacaagatgtgatacagactgatgctgctatcaaccctggtaacagtggtggtccactccttgatagttctggaaacttgataggtgtaaacacagctatatactcgccctcgggagcatcatctggtgttgggttttccattccggtcgatacagtatgcacatttttagactctgttttctaaaaaaatctgttgacagtagcagttcactaaggccagttcctatattcagtttattagttcgtttccacccttccttgcggttaactcgcaacacatgccttgacgacagcacgaataataactgttttcaggttgggggcattgtggaccaacttataaggtttggcaaggtgacaaggcctattttgggagtaaaatttgcccccgatcaatctgtggagcagcttggattaagtggagtgcttgtcctggatgctcctccaaacggaccagccggcaaagcgggtctgcagccaaccaaacgagatccctatggtcggcttatcctgggtgacataattacctctgtgaatggcacaaaggtgacaaacggaagcgacctgtaccggatactggatcagtgtaaagtcggggaaacgttgctaagactctggactgcgtggtgtgtaaggtgaccgtggaagtcctgcgtggcgatcataaggagaagatccccgtggtcctcgagccgaaggccgacgaatcatagcgaacccagacgcgcaaatacacaagggcgcgtgtcctagcattttcgccttcgttcgctgtacataattcctgctggtctgctggagaagaaggggggtactatccaggtcgccgcccgtaatgccgtctcagcattttctgtgtgtgtgcgtgtgtgctgtagcatgtcggcatcctacagtgctttagagtttatagatagatggcctacccttattaatacgagatgttgatcagatgaccatccatccagggaagggaaactgcgggtagaggaccaatgagcttactgatatcacggatcacctaaacctttttgaccaaaaaaaatacgtgctgactttctgctggagctggcagttggcatcgctgcaatcctaggtgggatcccagaacacaacagggatcaatgcg

SEQ ID NO: 76167 - DNA, 1357 bp, Zea Mays
ctccgttctgttccgccccgccccgccccgaagcagcgcgaaacgacacacgcgagctatcccgacagtaggaagcgagacggggccagtaggaagcgccaagcagcaacgcagcgcatccactcgtcatcggcaaaccaacacccccggcccggccgcgggcggctgcgctcacactccactcccctgacggcctgaccccgcgcgcacaagcaacagcagcccgatggccgcaccgtcctccgccgccacagcctgcttcgtctccccgctcccgccgcctcgccgcccgcgtcatttcctcaggcacctcgcgcgcgccgccgccgccgagcccacgcccgcctccgcctcctcgttcgccctcccgtcgccatggccgtgggcgcggcggctccgcgacctggtccccgccgaggccgcgggccggctgctgtcgtcggccgcgggctccctcatcgtcgcgctcgcctccgcgtcgctcgtcctcggcgacgccggcgcggcctccgcgttcgtcgtatccacgccgcggaagctgcaggcggacgagctcgccaccgtgcgcctcttccaggagaacacaccctccgtcgtctacatcaccaacctcgccgtcaggcaggacgcgttcacgctcgacgtgctcgaggtgccgcaggggtccgggtccggctttgtctgggataagagcggccacatcgtcaccaatttccatgtcatccgtggcgcgtcagaccttagggtcacacttgctgatcagtcagtgtatgaagcacaagttgttggatttgaccaggacaaggatgttgctgttttgcgtatcgaagcaccaaaggataaactaagacctatacctgttggtgtgtcagcagacctactggttggtcagaaagtatatgccattggaaacccatttggccttgaccacactcttacaacaggtgttatcagtggattgcgccgagaaatcagttcagctgccacaggacgtcctatacaagatgtgatacagactgatgctgctatcaaccctggttgggggcattgtggaccaacttataaggtttggcaaggtgacaaggcctattttgggagtaaaatttgcccccgatcaatctgtggagcagcttggattaagtggagtgcttgtcctggatgctcctccaaacggaccagccggcaaagcgggtctgcagccaaccaaacgagatccctatggtcggcttatcctgggtgacataattacctctgtgaatggcacaaaggtgacaaacggaagcgacctgtaccggatactggatcagtgtaaagtcggggaaacgttgctaagactctggactgcgtggtgtgtaag

SEQ ID NO: 76168 - DNA, 2438 bp, Zea Mays
ataagtaaaggccaatcttcttcgctttggtgaattttgtatgttacaagagattcttggatgtgacttgataaatgagggtcgggatttgtccttgttagataagtcaccagtttccatcagtgaagatgacactgaatctagtttgctacttaacttcctttctcaattgaaagaagaaaaggagatgcaggctgccaagttatcggcagagcttggaagcttacaaacagatatcacagagattgacagaagacactcagcaggaatgagattgagtttagaggatatggatgtactgccaagttctagtttgccaggagcttctgtgagtgccctacagggtgcattgctgtcaggtttgctaccggcatcgtgcaagtcgagcatatatgaggagagggtaatgaggaatttggtgcagcttgaaaatgcttactactccatgaggtcctctgtggacacctgtgaaactaatgtaatcaaacgtccagataacgaggctttgagggtccgtgaaaatttccatcagcgtcacagtgattctgatgcaaagggagagaaaacagaccgtcttggatgcttttttgatggtttatgcaaatatgcccggcacaataggtttgaagtacgaggaattttgaagaatgcagatgtacttagctctccaaatgtcatctgttcattgagttttgatagggatgaagaatattttgctgctgctggagtttcaaagaaaataaaaatatttgaatttgatgcactcttaaatgatcgtgttgatattcattacccactggtagaaatgcctagcaagtccaagctgagctgtgtctgttggaacagctatataaagaactacctggcatcaacagactatgatggtactgttcagctatgggatgctggctctggtcaaggattcacacagtttacagagcaccgcaaaagggcttggtctgtgagtttttcacaagtcgaccctactaagttggcaagtggcagtgatgattgttgcgtgaaagtatggagtattaatcagaaaaactctattgatacaatccgaaacgtggccaatgtatgctgtgtacaattctctccatactcctcccgcatgctagcttttggttcagctgattacaaaatatactgttatgatctgaggaacacaaggataccttggtgtactatttcgggacatggaaaggctgtcagttatgtaaggttcttggatccagaaacacttatctctgcatcaaccgacaacacattgaagatatgggatcttaaccagactaattgcagtggattatctgctgattcttgcagcctgactctgaatggtcatagcaacgagaagaattttgtagggctatctgttcatgatggatacataacttgtggctctgaaaccaatgaagtgttttcttactacaaagatttccccatgccaataacttctcataggtttggttccattgacccgataactggacaagtgacaaatgaagacaaccagcagtttgtgtcgagtgtttgctggagagggaagtcaaacatggtagtggctgccaactccagtggcagcatcaaagtgcttgagcttgtgtgaatgatccaacgagagtgtcatattggagagaagaaggttctagggttgccatgcgggcctgtgatgctctcgtgccctcggtgatgctccaatggccctgcttatccggtgtctgcatcctcaatggaagcactaagcgaactgggtacctcttctaggtctgcatttcactgttttgccagggcactaaaagatgcgactgctctgtgcaagcaacctacagcaccgatcattggtcattattggaagctttgcttgaaactcccaagcgaaccaaagaaaaataaaataaaatcaagagtatgttgtgtttggaaatctctggcattttggcacggtaccttattcatcatcgtaaggagggccccaggtctgtacagaattagggggccatggggctgatgaaatagaacatgtgatgcatgcaaacttcttttgggctagagaggctgacggacgccgtggcgccttactgaatcagttgggaatttaactcagttttgatgtgcgccggacttgccatgactgttaagagcgaacgatggagagaaagaaatgatcctgtagctcgaagaagttaatcgtgccgtgtgaatgtttcaaggagaatgtgtgtagtaattttctttctacctcccttcattattgtacatatgtttagggctgcctaatggaaggccttgtaactagagtagagatgctcaaaagactcggtcatgagttcagtataatgaatgatcttctcaaaagattaattactggcagatttatacatgtgtatggttactattattctgttgttgctggaacaaatggactggttact

SEQ ID NO: 76169 - DNA, 4143 bp, Zea Mays
gcgggcgccgcgcggtttgcgcagggtaggtttggtgcgatggaaggggcggcggcggcggaggtgggcggcggcggcgaggatgtgcagatcaagggcgccaaggagagtgggcagcccgcggcggcggcgcagcagccgccgccgctgccgtccggcagcgaggcgctggagatgccggccacgccgcttccgcgggacatggactggtccgagcacttctccttcttcacctcgccgggcgggttcgcgggcagctcggacggcgcgaggggcctcgccagcgtcggcctgtccaactccgagtccaggccggacagcgtgacgcagcgcggcgtggaccacggcgcggaagagagggtggaggagctcacattgaagaactgcattagcgctgatgctgcccagcccgaagcctctgctggtgggagcacgagcggtggggataggcctgctgttattaagggcctgtggggtaacttcacacggatggcccggagaaccagctatttggccagcagggaaaacgccgcactgagctatggcgacattgcaagctcgagggctggtgatgcttctagcagggaaaatctggcgacgagccttgccaacaatatcatctcaaggaacaacgatgtgtctggcaatgaggcacctacgagtcgtgtcggatatgtgaataatgagttcaagacgccatttcacagccagcagattctcttgtccccttggtctaatcaggacaacgctcttaaagtaagcagcttctcgaataggattcttgatcagatgagaagtaagactgtggcacccccatctggggttctagggtcaccgcttaaaagcaaatcaaaaggtaaaggggttgcataccaacgtgcacgggaggagatccgagtgcaagctaatgcaagacccagagaccctctggacaagatcccgacaattcctacctcaattcatgattctgtggccagagtggacatgcttttcagtactagtggagatgtttcaaaatcccactctgagggaactagcctgagggaactgattaagcctgggcggcaaacgatgtccaagtttgagaaattgcatttgtttaagcagatccttgatcttgtggataactgtcatgcacagggttttactttacaacatttgcgaccatcatattttacgatcctatcttcaaatcaagttaaatatatcggttcttataccacacaagatttgccaacatcaatcaaacaagagtttgctagagaagatcttgtgagtagaaaaagagcttttggccatagaattgattaccaagactctaatggccatggaaatttgatgctgaagcatcaaaaggttggtgagcaaggcttagttgctgtcaggcggctggcaaatacatttttgactgacaaaatacgcgacaatcaaattgaagataacgatccaggtatttcaaggcaagaaaattttagttacactaccagagaacattttaagttcgtcgaatcatatggcagcaatatgtccagtgctcagcatgtatctagttctggaacccaacaaccagcatttgaattgaggaatattgaggaaagctggtacaaaagcccagaggagctcagtcaatttaaaggcacacccccatcaaacatctatagccttggggttcttctatttgagaaagtcccaaggaggctggcttctgcctttggttactgcatccagatccttgttcaagaccaaaagcaaaagagattcttggatgtgacttgataaatgagggtcgggatttgtccttgttagataagtcaccagtttccatcagtgaagatgacactgaatctagtttgctacttaacttcctttctcaattgaaagaagaaaaggagatgcaggctgccaagttatcggcagagcttggaagcttacaaacagatatcacagagattgacagaagacactcagcaggaatgagattgagtttagaggatatggatgtactgccaagttctagtttgccaggagcttctgtgagtgccctacagggtgcattgctgtcaggtttgctaccggcatcgtgcaagtcgagcatatatgaggagagggtaatgaggaatttggtgcagcttgaaaatgcttactactccatgaggtcctctgtggacacctgtgaaactaatgtaatcaaacgtccagataacgaggctttgagggtccgtgaaaatttccatcagcgtcacagtgattctgatgcaaagggagagaaaacagaccgtcttggatgcttttttgatggtttatgcaaatatgcccggcacaataggtttgaagtacgaggaattttgaagaatgcagatgtacttagctctccaaatgtcatctgttcattgagttttgatagggatgaagaatattttgctgctgctggagtttcaaagaaaataaaaatatttgaatttgatgcactcttaaatgatcgtgttgatattcattacccactggtagaaatgcctagcaagtccaagctgagctgtgtctgttggaacagctatataaagaactacctggcatcaacagactatgatggtactgttcagctatgggatgctggctctggtcaaggattcacacagtttacagagcaccgcaaaagggcttggtctgtgagtttttcacaagtcgaccctactaagttggcaagtggcagtgatgattgttgcgtgaaagtatggagtattaatcagaaaaactctattgatacaatccgaaacgtggccaatgtatgctgtgtacaattctctccatactcctcccgcatgctagcttttggttcagctgattacaaaatatactgttatgatctgaggaacacaaggataccttggtgtactatttcgggacatggaaaggctgtcagttatgtaaggttcttggatccagaaacacttatctctgcatcaaccgacaacacattgaagatatgggatcttaaccagactaattgcagtggattatctgctgattcttgcagcctgactctgaatggtcatagcaacgagaagaattttgtagggctatctgttcatgatggatacataacttgtggctctgaaaccaatgaagtgttttcttactacaaagatttccccatgccaataacttctcataggtttggttccattgacccgataactggacaagtgacaaatgaagacaaccagcagtttgtgtcgagtgtttgctggagagggaagtcaaacatggtagtggctgccaactccagtggcagcatcaaagtgcttgagcttgtgtgaatgatccaacgagagtgtcatattggagagaagaaggttctagggttgccatgcgggcctgtgatgctctcgtgccctcggtgatgctccaatggccctgcttatccggtgtctgcatcctcaatggaagcactaagcgaactgggtacctcttctaggtctgcatttcactgttttgccagggcactaaaagatgcgactgctctgtgcaagcaacctacagcaccgatcattggtcattattggaagctttgcttgaaactcccaagcgaaccaaagaaaaataaaataaaatcaagagtatgttgtgtttggaaatctctggcattttggcacggtaccttattcatcatcgtaaggagggccccaggtctgtacagaattagggggccatggggctgatgaaatagaacatgtgatgcatgcaaacttcttttgggctagagaggctgacggacgccgtggcgccttactgaatcagttgggaatttaactcagttttgatgtgcgccggacttgccatgactgttaagagcgaacgatggagagaaagaaatgatcctgtagctcgaagaagttaatcgtgccgtgtgaatgtttcaaggagaatgtgtgtagtaattttctttctacctcccttcattattgtacatatgtttagggctgcctaatggaaggccttgtaactagagtagagatgctcaaaagactcggtcatgagttcagtataatgaatgatcttctcaaaagattaattactggcagatttatacatgtgtatggttactattattctgttgttgctggaacaaatggactggttact

SEQ ID NO: 76170 - DNA, 4319 bp, Zea Mays
gaggtacgagcgcatgactccccgccgctgaactgaatcggtcctgggctggttttcggcttttgcgcgactgggcccgtgcgccgtgaccttattgcgcgggcgccgcgcggtttgcgcagggtaggtttggtgcgatggaaggggcggcggcggcggaggtgggcggcggcggcgaggatgtgcagatcaagggcgccaaggagagtgggcagcccgcggcggcggcgcagcagccgccgccgctgccgtccggcagcgaggcgctggagatgccggccacgccgcttccgcgggacatggactggtccgagcacttctccttcttcacctcgccgggcgggttcgcgggcagctcggacggcgcgaggggcctcgccagcgtcggcctgtccaactccgagtccaggccggacagcgtgacgcagcgcggcgtggaccacggcgcggaagagagggtggaggagctcacattgaagaactgcattagcgctgatgctgcccagcccgaagcctctgctggtgggagcacgagcggtggggataggcctgctgttattaagggcctgtggggtaacttcacacggatggcccggagaaccagctatttggccagcagggaaaacgccgcactgagctatggcgacattgcaagctcgagggctggtgatgcttctagcagggaaaatctggcgacgagccttgccaacaatatcatctcaaggaacaacgatgtgtctggcaatgaggcacctacgagtcgtgtcggatatgtgaataatgagttcaagacgccatttcacagccagcagattctcttgtccccttggtctaatcaggacaacgctcttaaagtaagcagcttctcgaataggattcttgatcagatgagaagtaagactgtggcacccccatctggggttctagggtcaccgcttaaaagcaaatcaaaaggtaaaggggttgcataccaacgtgcacgggaggagatccgagtgcaagctaatgcaagacccagagaccctctggacaagatcccgacaattcctacctcaattcatgattctgtggccagagtggacatgcttttcagtactagtggagatgtttcaaaatcccactctgagggaactagcctgagggaactgattaagcctgggcggcaaacgatgtccaagtttgagaaattgcatttgtttaagcagatccttgatcttgtggataactgtcatgcacagggttttactttacaacatttgcgaccatcatattttacgatcctatcttcaaatcaagttaaatatatcggttcttataccacacaagatttgccaacatcaatcaaacaagagtttgctagagaagatcttgtgagtagaaaaagagcttttggccatagaattgattaccaagactctaatggccatggaaatttgatgctgaagcatcaaaaggttggtgagcaaggcttagttgctgtcaggcggctggcaaatacatttttgactgacaaaatacgcgacaatcaaattgaagataacgatccaggtatttcaaggcaagaaaattttagttacactaccagagaacattttaagttcgtcgaatcatatggcagcaatatgtccagtgctcagcatgtatctagttctggaacccaacaaccagcatttgaattgaggaatattgaggaaagctggtacaaaagcccagaggagctcagtcaatttaaaggcacacccccatcaaacatctatagccttggggttcttctatttgagctcttttgctgttctgagacatgggagatgcactgtgctgcaatgtcaaatcttcgccaacgcatccttcctccaaattttctttcagaaagtcccaaggaggctggcttctgcctttggttactgcatccagatccttgttcaagaccaaaagcaaaagagattcttggatgtgacttgataaatgagggtcgggatttgtccttgttagataagtcaccagtttccatcagtgaagatgacactgaatctagtttgctacttaacttcctttctcaattgaaagaagaaaaggagatgcaggctgccaagttatcggcagagcttggaagcttacaaacagatatcacagagattgacagaagacactcagcaggaatgagattgagtttagaggatatggatgtactgccaagttctagtttgccaggagcttctgtgagtgccctacagggtgcattgctgtcaggtttgctaccggcatcgtgcaagtcgagcatatatgaggagagggtaatgaggaatttggtgcagcttgaaaatgcttactactccatgaggtcctctgtggacacctgtgaaactaatgtaatcaaacgtccagataacgaggctttgagggtccgtgaaaatttccatcagcgtcacagtgattctgatgcaaagggagagaaaacagaccgtcttggatgcttttttgatggtttatgcaaatatgcccggcacaataggtttgaagtacgaggaattttgaagaatgcagatgtacttagctctccaaatgtcatctgttcattgagttttgatagggatgaagaatattttgctgctgctggagtttcaaagaaaataaaaatatttgaatttgatgcactcttaaatgatcgtgttgatattcattacccactggtagaaatgcctagcaagtccaagctgagctgtgtctgttggaacagctatataaagaactacctggcatcaacagactatgatggtactgttcagctatgggatgctggctctggtcaaggattcacacagtttacagagcaccgcaaaagggcttggtctgtgagtttttcacaagtcgaccctactaagttggcaagtggcagtgatgattgttgcgtgaaagtatggagtattaatcagaaaaactctattgatacaatccgaaacgtggccaatgtatgctgtgtacaattctctccatactcctcccgcatgctagcttttggttcagctgattacaaaatatactgttatgatctgaggaacacaaggataccttggtgtactatttcgggacatggaaaggctgtcagttatgtaaggttcttggatccagaaacacttatctctgcatcaaccgacaacacattgaagatatgggatcttaaccagactaattgcagtggattatctgctgattcttgcagcctgactctgaatggtcatagcaacgagaagggctatctgttcatgatggatacataacttgtggctctgaaaccaatgaagtgttttcttactacaaagatttccccatgccaataacttctcataggtttggttccattgacccgataactggacaagtgacaaatgaagacaaccagcagtttgtgtcgagtgtttgctggagagggaagtcaaacatggtagtggctgccaactccagtggcagcatcaaagtgcttgagcttgtgtgaatgatccaacgagagtgtcatattggagagaagaaggttctagggttgccatgcgggcctgtgatgctctcgtgccctcggtgatgctccaatggccctgcttatccggtgtctgcatcctcaatggaagcactaagcgaactgggtacctcttctaggtctgcatttcactgttttgccagggcactaaaagatgcgactgctctgtgcaagcaacctacagcaccgatcattggtcattattggaagctttgcttgaaactcccaagcgaaccaaagaaaaataaaataaaatcaagagtatgttgtgtttggaaatctctggcattttggcacggtaccttattcatcatcgtaaggagggccccaggtctgtacagaattagggggccatggggctgatgaaatagaacatgtgatgcatgcaaacttcttttgggctagagaggctgacggacgccgtggcgccttactgaatcagttgggaatttaactcagttttgatgtgcgccggacttgccatgactgttaagagcgaacgatggagagaaagaaatgatcctgtagctcgaagaagttaatcgtgccgtgtgaatgtttcaaggagaatgtgtgtagtaattttctttctacctcccttcattattgtacatatgtttagggctgcctaatggaaggccttgtaactagagtagagatgctcaaaagactcggtcatgagttcagtataatgaatgatcttctcaaaagattaattactggcagatttatacatgtgtatggttactattattctgttgttgctggaacaaatggactggttact

SEQ ID NO: 76171 - DNA, 1331 bp, Zea Mays
ctcgtggccttccgccttcgccgcccgtctccgctccgcttccccccgcggggcgggagccgggagtgcgcgctcgcgtccccccaccccctcacctcttcagatctccccggccgctgcctcggttggacctggttgtcgcgcccaggccaagcttggttgtgtccccggcgacggcgatgcggcgaggcgctgcgctgctcctggtggccgtcttcgccgtggtcgccgtagcgaagccaggccttgggaaattggagcagcatgagcaggcaaatcctaataaggagcatgtgacccaccaggaaggaggagtcagcaatgatattggtgacaacaacaagaaggataactcaacagaagtaaccaacatcagaagagatggctccatacagcagccaaagcacaaagatagcatcatgacaaagtcttcacaaccactagatttcttggaagattctcttatcaaggagtgtgatccatcacatagatgtatcattgaaaacaagaaattcatcgcctgcttaaaagtttctggagaagactcattggctctgtcacttctgatggacaacagaggcataaacccactagatgttagcatcatggctccagattatgtcactttagctgaagattccatccatgttgaagcaaatggtcacaatgagacacaagtgagagtttctgtcaatgatgatgcaaatagcacgacaatagtcatcaaagttgcagaaaaatcctgcaacatcagcattcacagtgcaatcacaagggagacggctggcagtggcagagtcataaggatgccacttacgccaacatacacgctactgccagtcttccttctcctcgttgcggtggcagtgtgcatcgtggtccggaggtggcgcaaccaggacggcgaccctgcgtatcagaagctagacatgtcagacttgccggtttcggttggaggcaagaaagaacatgacgatcggtctgacaagtgggacgacaactggggagatgactgggacgacgaggaagctccggtgacgccatccaagcctctgcccaacccttcgtccaaaggtctcgccccgaggcgatcggcgaaagatggttggaaagattagttagccacatgacgccacttaaaaggagcattgcggaaatagttccagtgcatgcagtatatttttaccttcatctttgttgttaaatatttctggaggatgctaatgtcagagagtgcaatacattgataccaagcagaaaattttgtgatcttcctctgccaaactgagtaactggcagctattgaatatagttattggacttccgacccg

SEQ ID NO: 76172 - DNA, 1299 bp, Zea Mays
cactcctgacctgacccctcccaaatcccaacacctcgtggccttccgccttcgccgcccgtctccgctccgcttccccccgcggggcgggagccgggagtgcgcgctcgcgtccccccaccccctcacctcttcagatctccccggccgctgcctcggttggacctggttgtcgcgcccaggccaagcttggttgtgtccccggcgacggcgatgcggcgaggcgctgcgctgctcctggtggccgtcttcgccgtggtcgccgtagcgaaggaaggaggagtcagcaatgatattggtgacaacaacaagaaggataactcaacagaagtaaccaacatcagaagagatggctccatacagcagccaaagcacaaagatagcatcatgacaaagtcttcacaaccactagatttcttggaagattctcttatcaaggagtgtgatccatcacatagatgtatcattgaaaacaagaaattcatcgcctgcttaaaagtttctggagaagactcattggctctgtcacttctgatggacaacagaggcataaacccactagatgttagcatcatggctccagattatgtcactttagctgaagattccatccatgttgaagcaaatggtcacaatgagacacaagtgagagtttctgtcaatgatgatgcaaatagcacgacaatagtcatcaaagttgcagaaaaatcctgcaacatcagcattcacagtgcaatcacaagggagacggctggcagtggcagagtcataaggatgccacttacgccaacatacacgctactgccagtcttccttctcctcgttgcggtggcagtgtgcatcgtggtccggaggtggcgcaaccaggacggcgaccctgcgtatcagaagctagacatgtcagacttgccggtttcggttggaggcaagaaagaacatgacgatcggtctgacaagtgggacgacaactggggagatgactgggacgacgaggaagctccggtgacgccatccaagcctctgcccaacccttcgtccaaaggtctcgccccgaggcgatcggcgaaagatggttggaaagattagttagccacatgacgccacttaaaaggagcattgcggaaatagttccagtgcatgcagtatatttttaccttcatctttgttgttaaatatttctggaggatgctaatgtcagagagtgcaatacattgataccaagcagaaaattttgtgatcttcctctgccaaactgagtaactggcagctattgaatatagttattggacttccgacccg

SEQ ID NO: 76173 - DNA, 1386 bp, Zea Mays
ccactcctgacctgacccctcccaaatcccaacacctcgtggccttccgccttcgccgcccgtctccgctccgcttccccccgcggggcgggagccgggagtgcgcgctcgcgtccccccaccccctcacctcttcagatctccccggccgctgcctcggttggacctggttgtcgcgcccaggccaagcttggttgtgtccccggcgacggcgatgcggcgaggcgctgcgctgctcctggtggccgtcttcgccgtggtcgccgtagcgaagggtcgtgctgataccccaccagctgaaacaaatagtgatagctctactgcacagccaggccttgggaaattggagcagcatgagcaggcaaatcctaataaggagcatgtgacccaccaggaaggaggagtcagcaatgatattggtgacaacaacaagaaggataactcaacagaagtaaccaacatcagaagagatggctccatacagcagccaaagcacaaagatagcatcatgacaaagtcttcacaaccactagatttcttggaagattctcttatcaaggagtgtgatccatcacatagatgtatcattgaaaacaagaaattcatcgcctgcttaaaagtttctggagaagaggcataaacccactagatgttagcatcatggctccagattatgtcactttagctgaagattccatccatgttgaagcaaatggtcacaatgagacacaagtgagagtttctgtcaatgatgatgcaaatagcacgacaatagtcatcaaagttgcagaaaaatcctgcaacatcagcattcacagtgcaatcacaagggagacggctggcagtggcagagtcataaggatgccacttacgccaacatacacgctactgccagtcttccttctcctcgttgcggtggcagtgtgcatcgtggtccggaggtggcgcaaccaggacggcgaccctgcgtatcagaagctagacatgtcagacttgccggtttcggttggaggcaagaaagaacatgacgatcggtctgacaagtgggacgacaactggggagatgactgggacgacgaggaagctccggtgacgccatccaagcctctgcccaacccttcgtccaaaggtctcgccccgaggcgatcggcgaaagatggttggaaagattagttagccacatgacgccacttaaaaggagcattgcggaaatagttccagtgcatgcagtatatttttaccttcatctttgttgttaaatatttctggaggatgctaatgtcagagagtgcaatacattgataccaagcagaaaattttgtgatcttcctctgccaaactgagtaactggcagctattgaatatagttattggacttccgacccg

SEQ ID NO: 76174 - DNA, 1292 bp, Zea Mays
ccactcctgacctgacccctcccaaatcccaacacctcgtggccttccgccttcgccgcccgtctccgctccgcttccccccgcggggcgggagccgggagtgcgcgctcgcgtccccccaccccctcacctcttcagatctccccggccgctgcctcggttggacctggttgtcgcgcccaggccaagcttggttgtgtccccggcgacggcgatgcggcgaggcgctgcgctgctcctggtggccgtcttcgccgtggtcgccgtagcgaagggtcgtgctgataccccaccagctgaaacaaatagtgatagctctactgcacagccaggccttgggaaattggagcagcatgagcaggcaaatcctaataaggagcatgtgacccaccaggaaggaggagtcagcaatgatattggtgacaacaacaagaaggataactcaacagaagtaaccaacatcagaagagatggctccatacagcagccaaagcacaaagatagcatcatgacaaagtcttcacaaccactagatttcttggaagattctcttatcaaggagtgtgatccatcacatagatgtatcattgaaaacaagaaattcatcgcctgcttaaaagtttctggagaagacacaagtgagagtttctgtcaatgatgatgcaaatagcacgacaatagtcatcaaagttgcagaaaaatcctgcaacatcagcattcacagtgcaatcacaagggagacggctggcagtggcagagtcataaggatgccacttacgccaacatacacgctactgccagtcttccttctcctcgttgcggtggcagtgtgcatcgtggtccggaggtggcgcaaccaggacggcgaccctgcgtatcagaagctagacatgtcagacttgccggtttcggttggaggcaagaaagaacatgacgatcggtctgacaagtgggacgacaactggggagatgactgggacgacgaggaagctccggtgacgccatccaagcctctgcccaacccttcgtccaaaggtctcgccccgaggcgatcggcgaaagatggttggaaagattagttagccacatgacgccacttaaaaggagcattgcggaaatagttccagtgcatgcagtatatttttaccttcatctttgttgttaaatatttctggaggatgctaatgtcagagagtgcaatacattgataccaagcagaaaattttgtgatcttcctctgccaaactgagtaactggcagctattgaatatagttattggacttccgacccg

SEQ ID NO: 76175 - DNA, 2071 bp, Zea Mays
aaaagttgtggcttatgcctcaccttgacattttacgagctaggaatattcgggggtttttcttttgcaccaagtctgttattgacaaggaacgtagaggagattacctaggaaaaactgttcaggtcgtgccacacatcacagatgaaatacaagattggattcaacgtgtggcaatgaatccagttgatgacaccgaagagccagctgatgtttgtgtcatagaacttggtgggactataggggacattgaatcaatgcctttcatagaagcactaggccaattttcataccgtgtagggcctggaaacttttgcttggtgcatgttagtcttgtaccagttctaaatgtagttggtgagcagaaaacaaagcccacccaacatagtgttcgcggacttcgaggacttggactcatgcctgatattttggcatgtcgcagtacacagccacttgaagaacacgtgaaagtgaagctcgcacaattttgtcatgtcccgataccaaatatcattaatctccatgatgtcaccaacatttggcacattcctttgttgctcagagatcagaaggcccatgaagctattttgaaggtgttagaccttcagtgcgcgagtaaagttgctcgagaaccccaattgtctgaatggactgaaagagtcagcagatgtgacagattgaaatctccggttaggattgcaatggttggaaagtatactggcctgtcagactcctacctatctgttataaaggctcttttgcatgcgtcggttgctttggacaggaaacttgtggtggactgggttccttcctgtgatcttgaagattctacagcaaaagagactcctgacgcctatgaaaaggcatgggagtcgttgaagggtgcagatggtgtgttggtgccaggaggttttggagacagaggagtccaagggaaaattctggctgcaaaatacgcgcgagaaaacaacgttccatatcttggcatttgcttgggcatgcaaattgcagtgattgagtttgcacgctctgtcatgaagttgcacggtgctaacagcacagagtttgatccaaccacaaaaacaccatgtgttgttttcatgccagaggggtccaaaactcatatgggagcaacaatgcgccttggttcaaggaggacctttttccaggccactaactgcaaatctgctaaactgtacggcaatgcttgctacgttgacgaaagacaccgccacagatacgaggtgaatcctgacatggtcccagaatttgagaaggcagggctttctttcgttggcagggatgagagtggcgaacgcatggagattatcgaactaccaactcataggtttttcgtcggagcacagtttcaccctgaattcaagtcaaggcccggcaagccatctccgcttttcttaggattggtagcagcgtcatcaggccagcttgaccacttgctccaacgtggccttaccagttcagcaggcagagacatctgcggcaaagggggagcgcagaaaccaaaagcttgccagaacgggcatgtcatgaagccactgaatggcctggtgcacgggcactattcagcgactcgctgcaatggcgtcattcccatctagcaggctgttttcgcttgttctttttctttccgttctacctacctgcagggcaaccaggaagagaagggctgtttgctctagcgacacggcagccgtttccgatgttttaacgaggaagcaattggcatgcaaagctgtcgcgcgcattaagaggcaaatctagcagcttattagctagggttcgattagtagtagtagtaatccgatgttgctggtttatttgttagtttgtttgctaagaaagattacaagggttagtgatgtgcagctagctccagtgtagcctgccgtctcgccccatttgtacattgtaaaaccactgctactctccatgattgactgaatggatgagtataaacgtattggaccaacatgctcggtgttataaaaatctaagttgcaatccaactgtagttgtctcggggatgttcggtaaagttgcgtgagctggt

SEQ ID NO: 76176 - DNA, 2372 bp, Zea Mays
ctcatttctcgccgtctgtctctcactctctctcaatttattacacaaaaacgttttctaccctgtctcgtcccctccagtcctgtcccggcagaatcgtcacatgatttactgcaggtttctccgctatacatacgtgtcttatttaggcgactgaagtcctcatactactaatgatcttctttgacactcgttttgctagacacatatccatacctcaacaccgatgccggaaccatgtccccattcgagcacggcgaagtgtttgttttggacgatggtggtgaggtggacttggaccttggaaactatgagagatttctggacatcaagttgactcgtgacaacaacataaccacggggaagatataccagtctgttattgacaaggaacgtagaggagattacctaggaaaaactgttcaggtcgtgccacacatcacagatgaaatacaagattggattcaacgtgtggcaatgaatccagttgatgacaccgaagagccagctgatgtttgtgtcatagaacttggtgggactataggggacattgaatcaatgcctttcatagaagcactaggccaattttcataccgtgtagggcctggaaacttttgcttggtgcatgttagtcttgtaccagttctaaatgtagttggtgagcagaaaacaaagcccacccaacatagtgttcgcggacttcgaggacttggactcatgcctgatattttggcatgtcgcagtacacagccacttgaagaacacgtgaaagtgaagctcgcacaattttgtcatgtcccgataccaaatatcattaatctccatgatgtcaccaacatttggcacattcctttgttgctcagagatcagaaggcccatgaagctattttgaaggtgttagaccttcagtgcgcgagtaaagttgctcgagaaccccaattgtctgaatggactgaaagagtcagcagatgtgacagattgaaatctccggttaggattgcaatggttggaaagtatactggcctgtcagactcctacctatctgttataaaggctcttttgcatgcgtcggttgctttggacaggaaacttgtggtggactgggttccttcctgtgatcttgaagattctacagcaaaagagactcctgacgcctatgaaaaggcatgggagtcgttgaagggtgcagatggtgtgttggtgccaggaggttttggagacagaggagtccaagggaaaattctggctgcaaaatacgcgcgagaaaacaacgttccatatcttggcatttgcttgggcatgcaaattgcagtgattgagtttgcacgctctgtcatgaagttgcacggtgctaacagcacagagtttgatccaaccacaaaaacaccatgtgttgttttcatgccagaggggtccaaaactcatatgggagcaacaatgcgccttggttcaaggaggacctttttccaggccactaactgcaaatctgctaaactgtacggcaatgcttgctacgttgacgaaagacaccgccacagatacgaggtgaatcctgacatggtcccagaatttgagaaggcagggctttctttcgttggcagggatgagagtggcgaacgcatggagattatcgaactaccaactcataggtttttcgtcggagcacagtttcaccctgaattcaagtcaaggcccggcaagccatctccgcttttcttaggattggtagcagcgtcatcaggccagcttgaccacttgctccaacgtggccttaccagttcagcaggcagagacatctgcggcaaagggggagcgcagaaaccaaaagcttgccagaacgggcatgtcatgaagccactgaatggcctggtgcacgggcactattcagcgactcgctgcaatggcgtcattcccatctagcaggctgttttcgcttgttctttttctttccgttctacctacctgcagggcaaccaggaagagaagggctgtttgctctagcgacacggcagccgtttccgatgttttaacgaggaagcaattggcatgcaaagctgtcgcgcgcattaagaggcaaatctagcagcttattagctagggttcgattagtagtagtagtaatccgatgttgctggtttatttgttagtttgtttgctaagaaagattacaagggttagtgatgtgcagctagctccagtgtagcctgccgtctcgccccatttgtacattgtaaaaccactgctactctccatgattgactgaatggatgagtataaacgtattggaccaacatgctcggtgttataaaaatctaagttgcaatccaactgtagttgtctcggggatgttcggtaaagttgcgtgagctggt

SEQ ID NO: 76177 - DNA, 2243 bp, Zea Mays
ctgtgtcaacgtcactgtctgggttccttggagcacatgaacttctcaggggcagaaatacagatccatacctcaacaccgatgccggaaccatgtccccattcgagcacggcgaagtgtttgttttggacgatggtggtgaggtggacttggaccttggaaactatgagagatttctggacatcaagttgactcgtgacaacaacataaccacggggaagatataccagtctgttattgacaaggaacgtagaggagattacctaggaaaaactgttcaggtcgtgccacacatcacagatgaaatacaagattggattcaacgtgtggcaatgaatccagttgatgacaccgaagagccagctgatgtttgtgtcatagaacttggtgggactataggggacattgaatcaatgcctttcatagaagcactaggccaattttcataccgtgtagggcctggaaacttttgcttggtgcatgttagtcttgtaccagttctaaatgtagttggtgagcagaaaacaaagcccacccaacatagtgttcgcggacttcgaggacttggactcatgcctgatattttggcatgtcgcagtacacagccacttgaagaacacgtgaaagtgaagctcgcacaattttgtcatgtcccggtaaatatgtttcctgataccaaatatcattaatctccatgatgtcaccaacatttggcacattcctttgttgctcagagatcagaaggcccatgaagctattttgaaggtgttagaccttcagtgcgcgagtaaagttgctcgagaaccccaattgtctgaatggactgaaagagtcagcagatgtgacagattgaaatctccggttaggattgcaatggttggaaagtatactggcctgtcagactcctacctatctgttataaaggctcttttgcatgcgtcggttgctttggacaggaaacttgtggtggactgggttccttcctgtgatcttgaagattctacagcaaaagagactcctgacgcctatgaaaaggcatgggagtcgttgaagggtgcagatggtgtgttggtgccaggaggttttggagacagaggagtccaagggaaaattctggctgcaaaatacgcgcgagaaaacaacgttccatatcttggcatttgcttgggcatgcaaattgcagtgattgagtttgcacgctctgtcatgaagttgcacggtgctaacagcacagagtttgatccaaccacaaaaacaccatgtgttgttttcatgccagaggggtccaaaactcatatgggagcaacaatgcgccttggttcaaggaggacctttttccaggccactaactgcaaatctgctaaactgtacggcaatgcttgctacgttgacgaaagacaccgccacagatacgaggtgaatcctgacatggtcccagaatttgagaaggcagggctttctttcgttggcagggatgagagtggcgaacgcatggagattatcgaactaccaactcataggtttttcgtcggagcacagtttcaccctgaattcaagtcaaggcccggcaagccatctccgcttttcttaggattggtagcagcgtcatcaggccagcttgaccacttgctccaacgtggccttaccagttcagcaggcagagacatctgcggcaaagggggagcgcagaaaccaaaagcttgccagaacgggcatgtcatgaagccactgaatggcctggtgcacgggcactattcagcgactcgctgcaatggcgtcattcccatctagcaggctgttttcgcttgttctttttctttccgttctacctacctgcagggcaaccaggaagagaagggctgtttgctctagcgacacggcagccgtttccgatgttttaacgaggaagcaattggcatgcaaagctgtcgcgcgcattaagaggcaaatctagcagcttattagctagggttcgattagtagtagtagtaatccgatgttgctggtttatttgttagtttgtttgctaagaaagattacaagggttagtgatgtgcagctagctccagtgtagcctgccgtctcgccccatttgtacattgtaaaaccactgctactctccatgattgactgaatggatgagtataaacgtattggaccaacatgctcggtgttataaaaatctaagttgcaatccaactgtagttgtctcggggatgttcggtaaagttgcgtgagctggt

SEQ ID NO: 76178 - DNA, 2319 bp, Zea Mays
atctcctgtcccatgtttcgttttttgccccctttgagccgccatcgcgtactccgtactcgtcgctgctttgttgaagtgggcatctgatcctgtgtcaacgtcactgtctgggttccttggagcacatgaacttctcaggggcagaaatacagatccatacctcaacaccgatgccggaaccatgtccccattcgagcacggcgaagtgtttgttttggacgatggtggtgaggtggacttggaccttggaaactatgagagatttctggacatcaagttgactcgtgacaacaacataaccacggggaagatataccagtctgttattgacaaggaacgtagaggagattacctaggaaaaactgttcaggtcgtgccacacatcacagatgaaatacaagattggattcaacgtgtggcaatgaatccagttgatgacaccgaagagccagctgatgtttgtgtcatagaacttggtgggactataggggacattgaatcaatgcctttcatagaagcactaggccaattttcataccgtgtagggcctggaaacttttgcttggtgcatgttagtcttgtaccagttctaaatgtagttggtgagcagaaaacaaagcccacccaacatagtgttcgcggacttcgaggacttggactcatgcctgatattttggcatgtcgcagtacacagccacttgaagaacacgtgaaagtgaagctcgcacaattttgtcatgtcccgataccaaatatcattaatctccatgatgtcaccaacatttggcacattcctttgttgctcagagatcagaaggcccatgaagctattttgaaggtgttagaccttcagtgcgcgagtaaagttgctcgagaaccccaattgtctgaatggactgaaagagtcagcagatgtgacagattgaaatctccggttaggattgcaatggttggaaagtatactggcctgtcagactcctacctatctgttataaaggctcttttgcatgcgtcggttgctttggacaggaaacttgtggtggactgggttccttcctgtgatcttgaagattctacagcaaaagagactcctgacgcctatgaaaaggcatgggagtcgttgaagggtgcagatggtgtgttggtgccaggaggttttggagacagaggagtccaagggaaaattctggctgcaaaatacgcgcgagaaaacaacgttccatatcttggcatttgcttgggcatgcaaattgcagtgattgagtttgcacgctctgtcatgaagttgcacggtgctaacagcacagagtttgatccaaccacaaaaacaccatgtgttgttttcatgccagaggggtccaaaactcatatgggagcaacaatgcgccttggttcaaggaggacctttttccaggccactaactgcaaatctgctaaactgtacggcaatgcttgctacgttgacgaaagacaccgccacagatacgaggtgaatcctgacatggtcccagaatttgagaaggcagggctttctttcgttggcagggatgagagtggcgaacgcatggagattatcgaactaccaactcataggtttttcgtcggagcacagtttcaccctgaattcaagtcaaggcccggcaagccatctccgcttttcttaggattggtagcagcgtcatcaggccagcttgaccacttgctccaacgtggccttaccagttcagcaggcagagacatctgcggcaaagggggagcgcagaaaccaaaagcttgccagaacgggcatgtcatgaagccactgaatggcctggtgcacgggcactattcagcgactcgctgcaatggcgtcattcccatctagcaggctgttttcgcttgttctttttctttccgttctacctacctgcagggcaaccaggaagagaagggctgtttgctctagcgacacggcagccgtttccgatgttttaacgaggaagcaattggcatgcaaagctgtcgcgcgcattaagaggcaaatctagcagcttattagctagggttcgattagtagtagtagtaatccgatgttgctggtttatttgttagtttgtttgctaagaaagattacaagggttagtgatgtgcagctagctccagtgtagcctgccgtctcgccccatttgtacattgtaaaaccactgctactctccatgattgactgaatggatgagtataaacgtattggaccaacatgctcggtgttataaaaatctaagttgcaatccaactgtagttgtctcggggatgttcggtaaagttgcgtgagctggt

SEQ ID NO: 76179 - DNA, 2290 bp, Zea Mays
ccccaacccaacaacagcagcaggaacaggaaaaagaaaaaactctctcccattcccatctcgcctcccacctcctccgcctcgccgccgcggcaggcaccgccaccaatcttctcttccgccccctcgttcgttcgctcgctcgctcgccaggagatcgactcgaggcgaggccatgaagtacgtgctggtgaccggcggcgtggtgagcgggctcgggaagggcgtgacggccagcagcatcggcgtcgtgctcaaggcctgcggcctccgcgtcacgtctatcaagatcgtctgttattgacaaggaacgtagaggagattacctaggaaaaactgttcaggtcgtgccacacatcacagatgaaatacaagattggattcaacgtgtggcaatgaatccagttgatgacaccgaagagccagctgatgtttgtgtcatagaacttggtgggactataggggacattgaatcaatgcctttcatagaagcactaggccaattttcataccgtgtagggcctggaaacttttgcttggtgcatgttagtcttgtaccagttctaaatgtagttggtgagcagaaaacaaagcccacccaacatagtgttcgcggacttcgaggacttggactcatgcctgatattttggcatgtcgcagtacacagccacttgaagaacacgtgaaagtgaagctcgcacaattttgtcatgtcccgataccaaatatcattaatctccatgatgtcaccaacatttggcacattcctttgttgctcagagatcagaaggcccatgaagctattttgaaggtgttagaccttcagtgcgcgagtaaagttgctcgagaaccccaattgtctgaatggactgaaagagtcagcagatgtgacagattgaaatctccggttaggattgcaatggttggaaagtatactggcctgtcagactcctacctatctgttataaaggctcttttgcatgcgtcggttgctttggacaggaaacttgtggtggactgggttccttcctgtgatcttgaagattctacagcaaaagagactcctgacgcctatgaaaaggcatgggagtcgttgaagggtgcagatggtgtgttggtgccaggaggttttggagacagaggagtccaagggaaaattctggctgcaaaatacgcgcgagaaaacaacgttccatatcttggcatttgcttgggcatgcaaattgcagtgattgagtttgcacgctctgtcatgaagttgcacggtgctaacagcacagagtttgatccaaccacaaaaacaccatgtgttgttttcatgccagaggggtccaaaactcatatgggagcaacaatgcgccttggttcaaggaggacctttttccaggccactaactgcaaatctgctaaactgtacggcaatgcttgctacgttgacgaaagacaccgccacagatacgaggtgaatcctgacatggtcccagaatttgagaaggcagggctttctttcgttggcagggatgagagtggcgaacgcatggagattatcgaactaccaactcataggtttttcgtcggagcacagtttcaccctgaattcaagtcaaggcccggcaagccatctccgcttttcttaggattggtagcagcgtcatcaggccagcttgaccacttgctccaacgtggccttaccagttcagcaggcagagacatctgcggcaaagggggagcgcagaaaccaaaagcttgccagaacgggcatgtcatgaagccactgaatggcctggtgcacgggcactattcagcgactcgctgcaatggcgtcattcccatctagcaggctgttttcgcttgttctttttctttccgttctacctacctgcagggcaaccaggaagagaagggctgtttgctctagcgacacggcagccgtttccgatgttttaacgaggaagcaattggcatgcaaagctgtcgcgcgcattaagaggcaaatctagcagcttattagctagggttcgattagtagtagtagtaatccgatgttgctggtttatttgttagtttgtttgctaagaaagattacaagggttagtgatgtgcagctagctccagtgtagcctgccgtctcgccccatttgtacattgtaaaaccactgctactctccatgattgactgaatggatgagtataaacgtattggaccaacatgctcggtgttataaaaatctaagttgcaatccaactgtagttgtctcggggatgttcggtaaagttgcgtgagctggt

SEQ ID NO: 76180 - DNA, 2413 bp, Zea Mays
ccccaacccaacaacagcagcaggaacaggaaaaagaaaaaactctctcccattcccatctcgcctcccacctcctccgcctcgccgccgcggcaggcaccgccaccaatcttctcttccgccccctcgttcgttcgctcgctcgctcgccaggagatcgactcgaggcgaggccatgaagtacgtgctggtgaccggcggcgtggtgagcgggctcgggaagggcgtgacggccagcagcatcggcgtcgtgctcaaggcctgcggcctccgcgtcacgtctatcaagatcgatccatacctcaacaccgatgccggaaccatgtccccattcgagcacggcgaagtgtttgttttggacgatggtggtggacttggaccttggaaactatgagagatttctggacatcaagttgactcgtgacaacaacataaccacggggaagatataccagtctgttattgacaaggaacgtagaggagattacctaggaaaaactgttcaggtcgtgccacacatcacagatgaaatacaagattggattcaacgtgtggcaatgaatccagttgatgacaccgaagagccagctgatgtttgtgtcatagaacttggtgggactataggggacattgaatcaatgcctttcatagaagcactaggccaattttcataccgtgtagggcctggaaacttttgcttggtgcatgttagtcttgtaccagttctaaatgtagttggtgagcagaaaacaaagcccacccaacatagtgttcgcggacttcgaggacttggactcatgcctgatattttggcatgtcgcagtacacagccacttgaagaacacgtgaaagtgaagctcgcacaattttgtcatgtcccgataccaaatatcattaatctccatgatgtcaccaacatttggcacattcctttgttgctcagagatcagaaggcccatgaagctattttgaaggtgttagaccttcagtgcgcgagtaaagttgctcgagaaccccaattgtctgaatggactgaaagagtcagcagatgtgacagattgaaatctccggttaggattgcaatggttggaaagtatactggcctgtcagactcctacctatctgttataaaggctcttttgcatgcgtcggttgctttggacaggaaacttgtggtggactgggttccttcctgtgatcttgaagattctacagcaaaagagggtgcagatggtgtgttggtgccaggaggttttggagacagaggagtccaagggaaaattctggctgcaaaatacgcgcgagaaaacaacgttccatatcttggcatttgcttgggcatgcaaattgcagtgattgagtttgcacgctctgtcatgaagttgcacggtgctaacagcacagagtttgatccaaccacaaaaacaccatgtgttgttttcatgccagaggggtccaaaactcatatgggagcaacaatgcgccttggttcaaggaggacctttttccaggccactaactgcaaatctgctaaactgtacggcaatgcttgctacgttgacgaaagacaccgccacagatacgaggtgaatcctgacatggtcccagaatttgagaaggcagggctttctttcgttggcagggatgagagtggcgaacgcatggagattatcgaactaccaactcataggtttttcgtcggagcacagtttcaccctgaattcaagtcaaggcccggcaagccatctccgcttttcttaggattggtagcagcgtcatcaggccagcttgaccacttgctccaacgtggccttaccagttcagcaggcagagacatctgcggcaaagggggagcgcagaaaccaaaagcttgccagaacgggcatgtcatgaagccactgaatggcctggtgcacgggcactattcagcgactcgctgcaatggcgtcattcccatctagcaggctgttttcgcttgttctttttctttccgttctacctacctgcagggcaaccaggaagagaagggctgtttgctctagcgacacggcagccgtttccgatgttttaacgaggaagcaattggcatgcaaagctgtcgcgcgcattaagaggcaaatctagcagcttattagctagggttcgattagtagtagtagtaatccgatgttgctggtttatttgttagtttgtttgctaagaaagattacaagggttagtgatgtgcagctagctccagtgtagcctgccgtctcgccccatttgtacattgtaaaaccactgctactctccatgattgactgaatggatgagtataaacgtattggaccaacatgctcggtgttataaaaatctaagttgcaatccaactgtagttgtctcggggatgttcggtaaagttgcgtgagctggt

SEQ ID NO: 76181 - DNA, 2373 bp, Zea Mays
ccccaacccaacaacagcagcaggaacaggaaaaagaaaaaactctctcccattcccatctcgcctcccacctcctccgcctcgccgccgcggcaggcaccgccaccaatcttctcttccgccccctcgttcgttcgctcgctcgctcgccaggagatcgactcgaggcgaggccatgaagtacgtgctggtgaccggcggcgtggtgagcgggctcgggaagggcgtgacggccagcagcatcggcgtcgtgctcaaggcctgcggcctccgcgtcacgtctatcaagatcggtggacttggaccttggaaactatgagagatttctggacatcaagttgactcgtgacaacaacataaccacggggaagatataccagtctgttattgacaaggaacgtagaggagattacctaggaaaaactgttcaggtcgtgccacacatcacagatgaaatacaagattggattcaacgtgtggcaatgaatccagttgatgacaccgaagagccagctgatgtttgtgtcatagaacttggtgggactataggggacattgaatcaatgcctttcatagaagcactaggccaattttcataccgtggcctggaaacttttgcttggtgcatgttagtcttgtaccagttctaaatgtagttggtgagcagaaaacaaagcccacccaacatagtgttcgcggacttcgaggacttggactcatgcctgatattttggcatgtcgcagtacacagccacttgaagaacacgtgaaagtgaagctcgcacaattttgtcatgtcccgataccaaatatcattaatctccatgatgtcaccaacatttggcacattcctttgttgctcagagatcagaaggcccatgaagctattttgaaggtgttagaccttcagtgcgcgagtaaagttgctcgagaaccccaattgtctgaatggactgaaagagtcagcagatgtgacagattgaaatctccggttaggattgcaatggttggaaagtatactggcctgtcagactcctacctatctgttataaaggctcttttgcatgcgtcggttgctttggacaggaaacttgtggtggactgggttccttcctgtgatcttgaagattctacagcaaaagagactcctgacgcctatgaaaaggcatgggagtcgttgaagggtgcagatggtgtgttggtgccaggaggttttggagacagaggagtccaagggaaaattctggctgcaaaatacgcgcgagaaaacaacgttccatatcttggcatttgcttgggcatgcaaattgcagtgattgagtttgcacgctctgtcatgaagttgcacggtgctaacagcacagagtttgatccaaccacaaaaacaccatgtgttgttttcatgccagaggggtccaaaactcatatgggagcaacaatgcgccttggttcaaggaggacctttttccaggccactaactgcaaatctgctaaactgtacggcaatgcttgctacgttgacgaaagacaccgccacagatacgaggtgaatcctgacatggtcccagaatttgagaaggcagggctttctttcgttggcagggatgagagtggcgaacgcatggagattatcgaactaccaactcataggtttttcgtcggagcacagtttcaccctgaattcaagtcaaggcccggcaagccatctccgcttttcttaggattggtagcagcgtcatcaggccagcttgaccacttgctccaacgtggccttaccagttcagcaggcagagacatctgcggcaaagggggagcgcagaaaccaaaagcttgccagaacgggcatgtcatgaagccactgaatggcctggtgcacgggcactattcagcgactcgctgcaatggcgtcattcccatctagcaggctgttttcgcttgttctttttctttccgttctacctacctgcagggcaaccaggaagagaagggctgtttgctctagcgacacggcagccgtttccgatgttttaacgaggaagcaattggcatgcaaagctgtcgcgcgcattaagaggcaaatctagcagcttattagctagggttcgattagtagtagtagtaatccgatgttgctggtttatttgttagtttgtttgctaagaaagattacaagggttagtgatgtgcagctagctccagtgtagcctgccgtctcgccccatttgtacattgtaaaaccactgctactctccatgattgactgaatggatgagtataaacgtattggaccaacatgctcggtgttataaaaatctaagttgcaatccaactgtagttgtctcggggatgttcggtaaagttgcgtgagctggt

SEQ ID NO: 76182 - DNA, 2455 bp, Zea Mays
gacccccaacccaacaacagcagcaggaacaggaaaaagaaaaaactctctcccattcccatctcgcctcccacctcctccgcctcgccgccgcggcaggcaccgccaccaatcttctcttccgccccctcgttcgttcgctcgctcgctcgccaggagatcgactcgaggcgaggccatgaagtacgtgctggtgaccggcggcgtggtgagcgggctcgggaagggcgtgacggccagcagcatcggcgtcgtgctcaaggcctgcggcctccgcgtcacgtctatcaagatcgatccatacctcaacaccgatgccggaaccatgtccccattcgagcacggcgaagtgtttgttttggacgatggtggtggacttggaccttggaaactatgagagatttctggacatcaagttgactcgtgacaacaacataaccacggggaagatataccagtctgttattgacaaggaacgtagaggagattacctaggaaaaactgttcaggtcgtgccacacatcacagatgaaatacaagattggattcaacgtgtggcaatgaatccagttgatgacaccgaagagccagctgatgtttgtgtcatagaacttggtgggactataggggacattgaatcaatgcctttcatagaagcactaggccaattttcataccgtgtagggcctggaaacttttgcttggtgcatgttagtcttgtaccagttctaaatgtagttggtgagcagaaaacaaagcccacccaacatagtgttcgcggacttcgaggacttggactcatgcctgatattttggcatgtcgcagtacacagccacttgaagaacacgtgaaagtgaagctcgcacaattttgtcatgtcccgataccaaatatcattaatctccatgatgtcaccaacatttggcacattcctttgttgctcagagatcagaaggcccatgaagctattttgaaggtgttagaccttcagtgcgcgagtaaagttgctcgagaaccccaattgtctgaatggactgaaagagtcagcagatgtgacagattgaaatctccggttaggattgcaatggttggaaagtatactggcctgtcagactcctacctatctgttataaaggctcttttgcatgcgtcggttgctttggacaggaaacttgtggtggactgggttccttcctgtgatcttgaagattctacagcaaaagagactcctgacgcctatgaaaaggcatgggagtcgttgaagggtgcagatggtgtgttggtgccaggaggttttggagacagaggagtccaagggaaaattctggctgcaaaatacgcgcgagaaaacaacgttccatatcttggcatttgcttgggcatgcaaattgcagtgattgagtttgcacgctctgtcatgaagttgcacggtgctaacagcacagagtttgatccaaccacaaaaacaccatgtgttgttttcatgccagaggggtccaaaactcatatgggagcaacaatgcgccttggttcaaggaggacctttttccaggccactaactgcaaatctgctaaactgtacggcaatgcttgctacgttgacgaaagacaccgccacagatacgaggtgaatcctgacatggtcccagaatttgagaaggcagggctttctttcgttggcagggatgagagtggcgaacgcatggagattatcgaactaccaactcataggtttttcgtcggagcacagtttcaccctgaattcaagtcaaggcccggcaagccatctccgcttttcttaggattggtagcagcgtcatcaggccagcttgaccacttgctccaacgtggccttaccagttcagcaggcagagacatctgcggcaaagggggagcgcagaaaccaaaagcttgccagaacgggcatgtcatgaagccactgaatggcctggtgcacgggcactattcagcgactcgctgcaatggcgtcattcccatctagcaggctgttttcgcttgttctttttctttccgttctacctacctgcagggcaaccaggaagagaagggctgtttgctctagcgacacggcagccgtttccgatgttttaacgaggaagcaattggcatgcaaagctgtcgcgcgcattaagaggcaaatctagcagcttattagctagggttcgattagtagtagtagtaatccgatgttgctggtttatttgttagtttgtttgctaagaaagattacaagggttagtgatgtgcagctagctccagtgtagcctgccgtctcgccccatttgtacattgtaaaaccactgctactctccatgattgactgaatggatgagtataaacgtattggaccaacatgctcggtgttataaaaatctaagttgcaatccaactgtagttgtctcggggatgttcggtaaagttgcgtgagctggt

SEQ ID NO: 76183 - DNA, 2394 bp, Zea Mays
ccttggctggactggacccccaacccaacaacagcagcaggaacaggaaaaagaaaaaactctctcccattcccatctcgcctcccacctcctccgcctcgccgccgcggcaggcaccgccaccaatcttctcttccgccccctcgttcgttcgctcgctcgctcgccaggagatcgactcgaggcgaggccatgaagtacgtgctggtgaccggcggcgtggtgagcgggctcgggaagggcgtgacggccagcagcatcggcgtcgtgctcaaggcctgcggcctccgcgtcacgtctatcaagatcggtggacttggaccttggaaactatgagagatttctggacatcaagttgactcgtgacaacaacataaccacggggaagatataccagtctgttattgacaaggaacgtagaggagattacctaggaaaaactgttcaggtcgtgccacacatcacagatgaaatacaagattggattcaacgtgtggcaatgaatccagttgatgacaccgaagagccagctgatgtttgtgtcatagaacttggtgggactataggggacattgaatcaatgcctttcatagaagcactaggccaattttcataccgtgtagggcctggaaacttttgcttggtgcatgttagtcttgtaccagttctaaatgtagttggtgagcagaaaacaaagcccacccaacatagtgttcgcggacttcgaggacttggactcatgcctgatattttggcatgtcgcagtacacagccacttgaagaacacgtgaaagtgaagctcgcacaattttgtcatgtcccgataccaaatatcattaatctccatgatgtcaccaacatttggcacattcctttgttgctcagagatcagaaggcccatgaagctattttgaaggtgttagaccttcagtgcgcgagtaaagttgctcgagaaccccaattgtctgaatggactgaaagagtcagcagatgtgacagattgaaatctccggttaggattgcaatggttggaaagtatactggcctgtcagactcctacctatctgttataaaggctcttttgcatgcgtcggttgctttggacaggaaacttgtggtggactgggttccttcctgtgatcttgaagattctacagcaaaagagactcctgacgcctatgaaaaggcatgggagtcgttgaagggtgcagatggtgtgttggtgccaggaggttttggagacagaggagtccaagggaaaattctggctgcaaaatacgcgcgagaaaacaacgttccatatcttggcatttgcttgggcatgcaaattgcagtgattgagtttgcacgctctgtcatgaagttgcacggtgctaacagcacagagtttgatccaaccacaaaaacaccatgtgttgttttcatgccagaggggtccaaaactcatatgggagcaacaatgcgccttggttcaaggaggacctttttccaggccactaactgcaaatctgctaaactgtacggcaatgcttgctacgttgacgaaagacaccgccacagatacgaggtgaatcctgacatggtcccagaatttgagaaggcagggctttctttcgttggcagggatgagagtggcgaacgcatggagattatcgaactaccaactcataggtttttcgtcggagcacagtttcaccctgaattcaagtcaaggcccggcaagccatctccgcttttcttaggattggtagcagcgtcatcaggccagcttgaccacttgctccaacgtggccttaccagttcagcaggcagagacatctgcggcaaagggggagcgcagaaaccaaaagcttgccagaacgggcatgtcatgaagccactgaatggcctggtgcacgggcactattcagcgactcgctgcaatggcgtcattcccatctagcaggctgttttcgcttgttctttttctttccgttctacctacctgcagggcaaccaggaagagaagggctgtttgctctagcgacacggcagccgtttccgatgttttaacgaggaagcaattggcatgcaaagctgtcgcgcgcattaagaggcaaatctagcagcttattagctagggttcgattagtagtagtagtaatccgatgttgctggtttatttgttagtttgtttgctaagaaagattacaagggttagtgatgtgcagctagctccagtgtagcctgccgtctcgccccatttgtacattgtaaaaccactgctactctccatgattgactgaatggatgagtataaacgtattggaccaacatgctcggtgttataaaaatctaagttgcaatccaactgtagttgtctcggggatgttcggtaaagttgcgtgagctggt

SEQ ID NO: 76184 - DNA, 2389 bp, Zea Mays
ctccttggctggactggacccccaacccaacaacagcagcaggaacaggaaaaagaaaaaactctctcccattcccatctcgcctcccacctcctccgcctcgccgccgcggcaggcaccgccaccaatcttctcttccgccccctcgttcgttcgctcgctcgctcgccaggagatcgactcgaggcgaggccatgaagtacgtgctggtgaccggcggcgtggtgagcgggctcgggaagggcgtgacggccagcagcatcggcgtcgtgctcaaggcctgcggcctccgcgtcacgtctatcaagatcgatccatacctcaacaccgatgccggaaccatgtccccattcgagcacggcgaagtgtttgttttggacgatggtggtgagtctgttattgacaaggaacgtagaggagattacctaggaaaaactgttcaggtcgtgccacacatcacagatgaaatacaagattggattcaacgtgtggcaatgaatccagttgatgacaccgaagagccagctgatgtttgtgtcatagaacttggtgggactataggggacattgaatcaatgcctttcatagaagcactaggccaattttcataccgtgtagggcctggaaacttttgcttggtgcatgttagtcttgtaccagttctaaatgtagttggtgagcagaaaacaaagcccacccaacatagtgttcgcggacttcgaggacttggactcatgcctgatattttggcatgtcgcagtacacagccacttgaagaacacgtgaaagtgaagctcgcacaattttgtcatgtcccgataccaaatatcattaatctccatgatgtcaccaacatttggcacattcctttgttgctcagagatcagaaggcccatgaagctattttgaaggtgttagaccttcagtgcgcgagtaaagttgctcgagaaccccaattgtctgaatggactgaaagagtcagcagatgtgacagattgaaatctccggttaggattgcaatggttggaaagtatactggcctgtcagactcctacctatctgttataaaggctcttttgcatgcgtcggttgctttggacaggaaacttgtggtggactgggttccttcctgtgatcttgaagattctacagcaaaagagactcctgacgcctatgaaaaggcatgggagtcgttgaagggtgcagatggtgtgttggtgccaggaggttttggagacagaggagtccaagggaaaattctggctgcaaaatacgcgcgagaaaacaacgttccatatcttggcatttgcttgggcatgcaaattgcagtgattgagtttgcacgctctgtcatgaagttgcacggtgctaacagcacagagtttgatccaaccacaaaaacaccatgtgttgttttcatgccagaggggtccaaaactcatatgggagcaacaatgcgccttggttcaaggaggacctttttccaggccactaactgcaaatctgctaaactgtacggcaatgcttgctacgttgacgaaagacaccgccacagatacgaggtgaatcctgacatggtcccagaatttgagaaggcagggctttctttcgttggcagggatgagagtggcgaacgcatggagattatcgaactaccaactcataggtttttcgtcggagcacagtttcaccctgaattcaagtcaaggcccggcaagccatctccgcttttcttaggattggtagcagcgtcatcaggccagcttgaccacttgctccaacgtggccttaccagttcagcaggcagagacatctgcggcaaagggggagcgcagaaaccaaaagcttgccagaacgggcatgtcatgaagccactgaatggcctggtgcacgggcactattcagcgactcgctgcaatggcgtcattcccatctagcaggctgttttcgcttgttctttttctttccgttctacctacctgcagggcaaccaggaagagaagggctgtttgctctagcgacacggcagccgtttccgatgttttaacgaggaagcaattggcatgcaaagctgtcgcgcgcattaagaggcaaatctagcagcttattagctagggttcgattagtagtagtagtaatccgatgttgctggtttatttgttagtttgtttgctaagaaagattacaagggttagtgatgtgcagctagctccagtgtagcctgccgtctcgccccatttgtacattgtaaaaccactgctactctccatgattgactgaatggatgagtataaacgtattggaccaacatgctcggtgttataaaaatctaagttgcaatccaactgtagttgtctcggggatgttcggtaaagttgcgtgagctggt

SEQ ID NO: 76185 - DNA, 2493 bp, Zea Mays
ccaaaccccaaccaaccctccttggctggactggacccccaacccaacaacagcagcaggaacaggaaaaagaaaaaactctctcccattcccatctcgcctcccacctcctccgcctcgccgccgcggcaggcaccgccaccaatcttctcttccgccccctcgttcgttcgctcgctcgctcgccaggagatcgactcgaggcgaggccatgaagtacgtgctggtgaccggcggcgtggtgagcgggctcgggaagggcgtgacggccagcagcatcggcgtcgtgctcaaggcctgcggcctccgcgtcacgtctatcaagatcgatccatacctcaacaccgatgccggaaccatgtccccattcgagcacggcgaagtgtttgttttggacgatggtggtgaggtggacttggaccttggaaactatgagagatttctggacatcaagttgactcgtgacaacaacataaccacggggaagatataccagtctgttattgacaaggaacgtagaggagattacctaggaaaaactgttcaggtcgtgccacacatcacagatgaaatacaagattggattcaacgtgtggcaatgaatccagttgatgacaccgaagagccagctgatgtttgtgtcatagaacttggtgggactataggggacattgaatcaatgcctttcatagaagcactaggccaattttcataccgtgtagggcctggaaacttttgcttggtgcatgttagtcttgtaccagttctaaatgtagttggtgagcagaaaacaaagcccacccaacatagtgttcgcggacttcgaggacttggactcatgcctgatattttggcatgtcgcagtacacagccacttgaagaacacgtgaaagtgaagctcgcacaattttgtcatgtcccgataccaaatatcattaatctccatgatgtcaccaacatttggcacattcctttgttgctcagagatcagaaggcccatgaagctattttgaaggtgttagaccttcagtgcgcgagtaaagttgctcgagaaccccaattgtctgaatggactgaaagagtcagcagatgtgacagattgaaatctccggttaggattgcaatggttggaaagtatactggcctgtcagactcctacctatctgttataaaggctcttttgcatgcgtcggttgctttggacaggaaacttgtggtggactgggttccttcctgtgatcttgaagattctacagcaaaagagactcctgacgcctatgaaaaggcatgggagtcgttgaagggtgcagatggtgtgttggtgccaggaggttttggagacagaggagtccaagggaaaattctggctgcaaaatacgcgcgagaaaacaacgttccatatcttggcatttgcttgggcatgcaaattgcagtgattgagtttgcacgctctgtcatgaagttgcacggtgctaacagcacagagtttgatccaaccacaaaaacaccatgtgttgttttcatgccagaggggtccaaaactcatatgggagcaacaatgcgccttggttcaaggaggacctttttccaggccactaactgcaaatctgctaaactgtacggcaatgcttgctacgttgacgaaagacaccgccacagatacgaggtgaatcctgacatggtcccagaatttgagaaggcagggctttctttcgttggcagggatgagagtggcgaacgcatggagattatcgaactaccaactcataggtttttcgtcggagcacagtttcaccctgaattcaagtcaaggcccggcaagccatctccgcttttcttaggattggtagcagcgtcatcaggccagcttgaccacttgctccaacgtggccttaccagttcagcaggcagagacatctgcggcaaagggggagcgcagaaaccaaaagcttgccagaacgggcatgtcatgaagccactgaatggcctggtgcacgggcactattcagcgactcgctgcaatggcgtcattcccatctagcaggctgttttcgcttgttctttttctttccgttctacctacctgcagggcaaccaggaagagaagggctgtttgctctagcgacacggcagccgtttccgatgttttaacgaggaagcaattggcatgcaaagctgtcgcgcgcattaagaggcaaatctagcagcttattagctagggttcgattagtagtagtagtaatccgatgttgctggtttatttgttagtttgtttgctaagaaagattacaagggttagtgatgtgcagctagctccagtgtagcctgccgtctcgccccatttgtacattgtaaaaccactgctactctccatgattgactgaatggatgagtataaacgtattggaccaacatgctcggtgttataaaaatctaagttgcaatccaactgtagttgtctcggggatgttcggtaaagttgcgtgagctggt

SEQ ID NO: 76186 - DNA, 2005 bp, Zea Mays
ctttgcatgaaatttagacagtgtttgactgccttgcatgatgatgttgctatttactttacgtgcattttgactaacgatttgttgctatgttcctgaggatctatggatatctgctttcctgttggtactaagccaataggaaattttggactgctacctggattaatgctcgagaaaaaagacatggtatgcagtccctagggaccgagcctcagagctagaggaagttattcgtgtacatggatatggaggaaaccctgaccgccttgcatcgctggcagtgcttggggagaagacaacattgatgtctccagatgttcttgtagcccgtggtgtgccctgctgtaggttagtacagtatcctggagagtttgtggtgacattcccaagggcataccacattgggtttagtcatgggcgtccacaggctacaccatgcctccacctccgcagatcacgcctaccctgccccgcccgcgacagcctgcaagcattaatgaagttgtctgttttgcaataactatgtggagcggtttgatcatcactgtccatgggtcggtcagtgcataggactggtgataactccagtgcacaagaatccgctgaacagggtggcgttgagctgtatgaagaggtgaacaaccgtgggctctgcgctattgcccaggctgagtcgtatgttataaggttctcggtggactcgccatgagaaggttacgctcttagttaccccaggcctgtgttcgaagggcgttatggtgttctctggtttgtcatcgagaatagctctttctcttccgtcaagggtttcaccaatggcttgtaacaactggatgtagaatgatttttgttttttaactgatgtagtgtgtttttgcattacaatccattgtggctaagggggcaacacatgtagtgtgtagtcatcgtgaatttaatagtaactagctctacagttgtgattggtttataaatgtgtttggttggacctatcaattggatgtttgttggctacatcacatattctcttaagtttactttgtgtgatcgttgatggtgtctttataaagtgcaggttcaatgttttaactcccgtagcaacgcacgagcacatacctatattattgaatccactatagactttctggagctggctcttcagtttggcatgatcatgatgtttgcctgtgcatttccattgatattctgctttgcagctctgaacaatgttactgaaatcagagcagatgcattgaagttgttagtcatgttgaaaagacctgagccgcgtgctgcagctacaattggagcatggttgaacatattccagttcttggttgtgatggcaatatgcaccaactgcttgcttctcgtttgtctatatgacgaggaggggaaatggaggattgagccaggactagcagcaatcctcataatggagcatgctctcctcttaatcaagtttggtttctcacactttgtgcctaaggagcctgcgtgggtgaaagcaaaccgtgtgcgatatgtagctcaggcacaaaacgtctgctctaaacaacttttgaggagtatttcaaaatttgacggaaaactggattgagaaacaccatgcacagcttagcggttatcgctggttttgtagtttaggtagagcggttttgtatagtacaaagatgtacaaatctaggggtgtaatatcttgatgcatatgacagttaagtgtagatattaggtgatcgccacctatcttaccagcaaatggtaaagaatgccctcaagtgtaagtcagtttttcccctctttcattttaatggtctgttgaattgaacggaaactcacattctgcaccatgtaatgtgctgtgggtgatttcgaagagtaagatggcaccctagccaaaagatatcaattagggcatgttcgtttcaatcctgatccatatggattaggaattgagtgggtttaaatcttgtctgtttggatctttggaattggattctat

SEQ ID NO: 76187 - DNA, 3846 bp, Zea Mays
ggcaagtcgtccccgtagcttcatctccattaaggggattgggaacaagaggaggccactgcacttgggacttcgaatagatagttatggaacctgagagtcatggggcttcaccttctatccgtgtttttactaaacacagttggacatacttggtgtctgtttttttctacttaacatcatatgtatgatcaacaattagagaaggtaacatttctattcaacacacttctggaataagaatttgttattttctagaattttcagtgacctttatatatattcagtagcacattagttttgccatagctgaaataaacactggtcagaattcaacatgaatgtgcctaattatttaacacattaattctaaggcggtcaccataccaggtagagtaaataagctaaggaaagaggtgtggtgcatagcaataacctaaacaacacaaataatagtgaatcagaaggcactgatggagaacaagtatatgtagtcaccgacggagaacaagtatatgtggagaacacatagctaaattttgccttggcacatagcacttgttaaggagaatatagaacaaacaaaacaattatcaaaagggactattttttcgttttcccttgctcggccagatgtttgatgcaaatacacgatctatctaaatatttgaaagaagcaatggagataaaccaaattaatatgaaacaattcaagtaaaactgactaccatgtattgtgtagaactccttcaactggttttataagcagaacacaatgttcaaattcgcagaatggacatgctatttttgtccatcgaggaatccgacagtcaaacattgtgcatttatctcaaaaggaattataagacaatgatcttgtcttcctttgttagcactatacaaattatgttttaattaatagtcagctgaagttagagcttaaactattttggtctgtccatttagctcaaccttcttttggctaggaatatacaaatgtcttgtaagccggattcctcgatgggtcggtatatagtcccgtaaggacttctgtgcttacatctatagttttagcatggtttcttgtattgtgtacacgagactgacccaaaactattgatcgttttatactatttgggatttcttcggaaaggttatttgagaaatcgtgtatgcttgttttgtaaaattagaaggaaaagagaacaactacgaagtgtatggggttgctatttactttgcatgaaatttagacagtgtttgactgccttgcatgatgatgttgctatttactttacgtgcattttgactaacgatttgttgctatgttcctgaggatctatggatatctgctttcctgttggtactaaggtttgctcccatccctgccttcttttataccatgtttgcaaagaattaccattttacctgctatttttgtttgtgttcttacggaagccaataggaaattttggactgctacctggattaatgctcgagaaaaaaggtgcatgacatcaatattgctattctatttgttctatagaaccttatgtggaaacgtgcattacacagtcccagcctcctagagactatagacatggtatgcagtccctagggaccgagcctcagagctagaggaagttattcgtgtacatggatatggaggaaaccctgaccgccttgcatcgctggcagtgcttggggagaagacaacattgatgtctccagatgttcttgtagcccgtggtgtgccctgctgtaggttagtacagtatcctggagagtttgtggtgacattcccaagggcataccacattgggtttagtcatgggcgtccacaggctacaccatgcctccacctccgcagatcacgcctaccctgccccgcccgcgacagcctgcaagcattaatgaagttgtctgttttgcaataactatgtggagcggtttgatcatcactgtccatgggtcggtcagtgcataggactggtgataactccagtgcacaagaatccgctgaacagggtggcgttgagctgtatgaagaggtgaacaaccgtgggctctgcgctattgcccaggctgagtcgtatgttataaggttctcggtggactcgccatgagaaggttacgctcttagttaccccaggcctgtgttcgaaggtgacaattattcaaccccttcattgcattttataattagtgggagggacttattactcttccattgttcgaagtgttggaggaatatgcacttatgaactacgtcaattttagtgatttgttgttttagttgtgttgtgtcctgtcatctatacaacaaataggttaccatgtaccaaccttgtgtcagaagatgaccatatcacatgtgcaaactggtattgtacctctaagaagctttcgcgataagcttatgagatatttatggttggccacattacttgtttgtttgtatgttttgagtttgttttattattaataggtcaagcttcgattgctaaaatattgttgttagtatgctcttttggtgtcctttgtttatctctggtatttaatcttatactaaattggctcgtttgattttcagggcgttatggtgttctctggtttgtcatcgagaatagctctttctcttccgtcaagggtttcaccaatggcttgtaacaactggatgtagaatgatttttgttttttaactgatgtagtgtgtttttgcattacaatccattgtggctaagggggcaacacatgtagtgtgtagtcatcgtgaatttaatagtaactagctctacagttgtgattggtttataaatgtgtttggttggacctatcaattggatgtttgttggctacatcacatattctcttaagtttactttgtgtgatcgttgatggtgtctttataaagtgcaggttcaatgttttaactcccgtagcaacgcacgagcacatacctatattattgaatccactatagactttctggagctggctcttcagtttggcatgatcatgatgtttgcctgtgcatttccattgatattctgctttgcagctctgaacaatgttactgaaatcagagcagatgcattgaagttgttagtcatgttgaaaagacctgagccgcgtgctgcagctacaattggagcatggttgaacatattccagttcttggttgtgatggcaatatgcaccaactgcttgcttctcgtttgtctatatgacgaggaggggaaatggaggattgagccaggactagcagcaatcctcataatggagcatgctctcctcttaatcaagtttggtttctcacactttgtgcctaaggagcctgcgtgggtgaaagcaaaccgtgtgcgatatgtagctcaggcacaaaacgtctgctctaaacaacttttgaggagtatttcaaaatttgacggaaaactggattgagaaacaccatgcacagcttagcggttatcgctggttttgtagtttaggtagagcggttttgtatagtacaaagatgtacaaatctaggggtgtaatatcttgatgcatatgacagttaagtgtagatattaggtgatcgccacctatcttaccagcaaatggtaaagaatgccctcaagtgtaagtcagtttttcccctctttcattttaatggtctgttgaattgaacggaaactcacattctgcaccatgtaatgtgctgtgggtgatttcgaagagtaagatggcaccctagccaaaagatatcaattagggcatgttcgtttcaatcctgatccatatggattaggaattgagtgggtttaaatcttgtctgtttggatctttggaattggattctat

SEQ ID NO: 76188 - DNA, 3956 bp, Zea Mays
ggtggtactagctacttgactttgttttatttctaaaatagtgacgcctttctcctttgatgttttggttatttttgtacttgacacatttttttggattcttatgtgctttattgcagttagtcttcccacacgtagtcatggaaggctaccagattttgatgtgcattttgtatatattcaaccaaacattgtactcacattatgtgtgtacatattctgttttccctgcatggtaccatgcccttatcaaattggttttctgaataatgtagtaatctacattgaggaaacacatgcatatttttttgctctattttatcatatcgattttgtagcaatgcacgggcatatacctattctctactattctatatgagcctaacgagggcgtccacaactacatcgtggccccgcccccgtcaaccacgcgcgtcatgcccccgcccacgctctcccgcgatcttcgccgccgcgtcttcaccacccaagcccgtgatctccgtcgccgtccgcacttgggtcaggtcagatctgcatttggtggcccatcctcatcctcatctgcacgcccccgcccatgctcgccccggatctccgccgccgcgtcttaaccatcctcgctcgtgatctccaccgctgtacgcacttgggtcaggtcagatctgcgtttggtggcccgtccccatcctcatactcttctgtacgcccacgcctgcttcttcatccccgcccactcctgcggtacgatgtggtggtgtgcctggacatactacttcatccccgtccacttcatcaagaggaggccactgcacttgggtagtacgatgtgctggtgtccctggatttttatttgtgtgtggtcgagctgttctcaggctcgttcaaggccatgcgtgcctatctgtgtgccgagggtaacatggaggacaccgtccgccaggctggctggcaagtcgtccccgtagcttcatctccattaaggggattgggaacaagaggaggccactgcacttgggacttcgaatagatagttatggaacctgagagtcatggggcttcaccttctatccgtgtttttactaaacacagttggacatacttggtgtctgtttttttctacttaacatcatatgtatgatcaacaattagagaaggtaacatttctattcaacacacttctggaataagaatttgttattttctagaattttcagtgacctttatatatattcagtagcacattagttttgccatagctgaaataaacactggtcagaattcaacatgaatgtgcctaattatttaacacattaattctaaggcggtcaccataccaggtagagtaaataagctaaggaaagaggtgtggtgcatagcaataacctaaacaacacaaataatagtgaatcagaaggcactgatggagaacaagtatatgtagtcaccgacggagaacaagtatatgtggagaacacatagctaaattttgccttggcacatagcacttgttaaggagaatatagaacaaacaaaacaattatcaaaagggactattttttcgttttcccttgctcggccagatgtttgatgcaaatacacgatctatctaaatatttgaaagaagcaatggagataaaccaaattaatatgaaacaattcaagtaaaactgactaccatgtattgtgtagaactccttcaactggttttataagcagaacacaatgttcaaattcgcagaatggacatgctatttttgtccatcgaggaatccgacagtcaaacattgtgcatttatctcaaaaggaattataagacaatgatcttgtcttcctttgttagcactatacaaattatgttttaattaatagtcagctgaagttagagcttaaactattttggtctgtccatttagctcaaccttcttttggctaggaatatacaaatgtcttgtaagccggattcctcgatgggtcggtatatagtcccgtaaggacttctgtgcttacatctatagttttagcatggtttcttgtattgtgtacacgagactgacccaaaactattgatcgttttatactatttgggatttcttcggaaaggttatttgagaaatcgtgtatgcttgttttgtaaaattagaaggaaaagagaacaactacgaagtgtatggggttgctatttactttgcatgaaatttagacagtgtttgactgccttgcatgatgatgttgctatttactttacgtgcattttgactaacgatttgttgctatgttcctgaggatctatggatatctgctttcctgttggtactaagccaataggaaattttggactgctacctggattaatgctcgagaaaaaaggtgcatgacatcaatattgctattctatttgttctatagaaccttatgtggaaacgtgcattacacagtcccagcctcctagagactatagacatggtatgcagtccctagggaccgagcctcagagctagaggaagttattcgtgtacatggatatggaggaaaccctgaccgccttgcatcgctggcagtgcttggggagaagacaacattgatgtctccagatgttcttgtagcccgtggtgtgccctgctgtaggttagtacagtatcctggagagtttgtggtgacattcccaagggcataccacattgggtttagtcatgggcgtccacaggctacaccatgcctccacctccgcagatcacgcctaccctgccccgcccgcgacagcctgcaagcattaatgaagttgtctgttttgcaataactatgtggagcggtttgatcatcactgtccatgggtcggtcagtgcataggactggtgataactccagtgcacaagaatccgctgaacagggtggcgttgagctgtatgaagaggtgaacaaccgtgggctctgcgctattgcccaggctgagtcgtatgttataaggttctcggtggactcgccatgagaaggttacgctcttagttaccccaggcctgtgttcgaaggttcaatgttttaactcccgtagcaacgcacgagcacatacctatattattgaatccactatagactttctggagctggctcttcagtttggcatgatcatgatgtttgcctgtgcatttccattgatattctgctttgcagctctgaacaatgttactgaaatcagagcagatgcattgaagttgttagtcatgttgaaaagacctgagccgcgtgctgcagctacaattggagcatggttgaacatattccagttcttggttgtgatggcaatatgcaccaactgcttgcttctcgtttgtctatatgacgaggaggggaaatggaggattgagccaggactagcagcaatcctcataatggagcatgctctcctcttaatcaagtttggtttctcacactttgtgcctaaggagcctgcgtgggtgaaagcaaaccgtgtgcgatatgtagctcaggcacaaaacgtctgctctaaacaacttttgaggagtatttcaaaatttgacggaaaactggattgagaaacaccatgcacagcttagcggttatcgctggttttgtagtttaggtagagcggttttgtatagtacaaagatgtacaaatctaggggtgtaatatcttgatgcatatgacagttaagtgtagatattaggtgatcgccacctatcttaccagcaaatggtaaagaatgccctcaagtgtaagtcagtttttcccctctttcattttaatggtctgttgaattgaacggaaactcacattctgcaccatgtaatgtgctgtgggtgatttcgaagagtaagatggcaccctagccaaaagatatcaattagggcatgttcgtttcaatcctgatccatatggattaggaattgagtgggtttaaatcttgtctgtttggatctttggaattggattctat

SEQ ID NO: 76189 - DNA, 1725 bp, Zea Mays
ctttacgtgcattttgactaacgatttgttgctatgttcctgaggatctatggatatctgctttcctgttggtactaagccaataggaaattttggactgctacctggattaatgctcgagaaaaaaggtgcatgacatcaatattgctattctatttgttctatagaaccttatgtggaaacgtgcattacacagtcccagcctcctagagactatagacatggtatgcagtccctagggaccgagcctcagagctagaggaagttattcgtgtacatggatatggaggaaaccctgaccgccttgcatcgctggcagtgcttggggagaagacaacattgatgtctccagatgttcttgtagcccgtggtgtgccctgctgtaggttagtacagtatcctggagagtttgtggtgacattcccaagggcataccacattgggtttagtcatggatgtaaggagggcgtccacaggctacaccatgcctccacctccgcagatcacgcctaccctgccccgcccgcgacagcctgcaagcattaatgaagttgtctgttttgcaataactatgtggagcggtttgatcatcactgtccatgggtcggtcagtgcataggactggtgataactccagtgcacaagaatccgctgaacagggtggcgttgagctgtatgaagaggtgaacaaccgtgggctctgcgctattgcccaggctgagtcgtatgttataaggttctcggtggactcgccatgagaaggttacgctcttagttaccccaggcctgtgttcgaaggttcaatgttttaactcccgtagcaacgcacgagcacatacctatattattgaatccactatagactttctggagctggctcttcagtttggcatgatcatgatgtttgcctgtgcatttccattgatattctgctttgcagctctgaacaatgttactgaaatcagagcagatgcattgaagttgttagtcatgttgaaaagacctgagccgcgtgctgcagctacaattggagcatggttgaacatattccagttcttggttgtgatggcaatatgcaccaactgcttgcttctcgtttgtctatatgacgaggaggggaaatggaggattgagccaggactagcagcaatcctcataatggagcatgctctcctcttaatcaagtttggtttctcacactttgtgcctaaggagcctgcgtgggtgaaagcaaaccgtgtgcgatatgtagctcaggcacaaaacgtctgctctaaacaacttttgaggagtatttcaaaatttgacggaaaactggattgagaaacaccatgcacagcttagcggttatcgctggttttgtagtttaggtagagcggttttgtatagtacaaagatgtacaaatctaggggtgtaatatcttgatgcatatgacagttaagtgtagatattaggtgatcgccacctatcttaccagcaaatggtaaagaatgccctcaagtgtaagtcagtttttcccctctttcattttaatggtctgttgaattgaacggaaactcacattctgcaccatgtaatgtgctgtgggtgatttcgaagagtaagatggcaccctagccaaaagatatcaattagggcatgttcgtttcaatcctgatccatatggattaggaattgagtgggtttaaatcttgtctgtttggatctttggaattggattctat

SEQ ID NO: 76190 - DNA, 1587 bp, Zea Mays
cccatttccatttcatattctagggttttgctgctcccccgtacttcgaagccagccttcgcattagcaagtgcggcccctctcgcatgggaccaagatggcgctgtcgaatcaggggaccatagattaccctaatttcaaactcgtcatcgttgacgatggcgggatggatgaatttctgaatcgccccgtgtctgattagttgttaggaacggttggaagtgattgttagcttgtcacgtgcaaatgattttacgagatctgatgaacttgacttggatgttgtgtgcaatcatttgtgtagtagtttacccagtttatgtctttcgcatataaattgcacaaatatattagacctcagtatcatagtggctgcctacgcccctacctaatggcttgttaatacctacaaatattgtaattgcagataacagaacgagtatatagtaatccagttgtattattgaaagggaaatatggtttaaccttttcctataaataattttggtggttgaatgttcaacacaaatattggactaactagtttgctctagattatatattctacaggtgcataaaggttcaacacaaaccaataaaagattaaagaaagggttcaaaaagaaaggagcaaagggtgccctggtctggcgcaccggactgtccggtgcggcaccggacagtgtccgatgcaccaggaccgtacaactccgaactcgtcaccttcgggtttctccagcgccgctccactataattcaccggactgtccggtgcaccagcggagcaaaggctacgagcgcaatggtcgactgcaacgaacacgtacaaacgctacagtgcgcggatagtgcacgcagaagtcagagcaaccgccagaggcgcaccggacagtgaacattacctttctggtgcggcaccggactgtccggtgccactagaagacaaagctccaacggtcatctgtgcccaaaccctaacgattgggtgacgtggctggcgcactagacagcgtccggtggcgcaccggactgtccggtgcgcccatcgatagcagccctccccaacggttgtttggtggttgagggctataaatacccccaaccacctgcactccaacaatccaagcattcaatacaagagcaatagactccacttcaaagacacaattcaagtgatcgatccgctcaaagtcttcaattcaactctagcgcattaggacttgtgagaggatcatttgtgcttctttgttgctcttgtttgcttggttggctttcttttctttctcacttcttactctcaagttttgtaagcgaggcaagagacaccaattgtgtggtggtccttgtggggtctaagtgacccgtgagatctgtactacttattaagtaagcaatagtagtctgcctcccctcgttctgccgttctgccgttctgcctcacatctatctggaccgtccgtagtatcgtgcgtcccatccgtccgttctgctgttctctcctcaatcgcgcataaccgtcgtcgttccccttctctactctcccaatcatgtagccgccgccgctcgcctccactcccacgcccatcg

SEQ ID NO: 76191 - DNA, 1098 bp, Zea Mays
aggttgcgtggtgcgacaaaccgacaagccaacaatggcgtcgtcagctgctacgaccgcgaagctgatcgcgctcccgccggcgccaacacgcggcggctgctgctgctggaggacacgcaggcccgcgatccccgcggcggcggcgcgcctcaaggtctccgcctccgccgcctcgtcggacgtgccggacttcctctcgtccaattggcttgaaacccgcaagagaaagcccttcggtcccaggttgaattttagtgcagaagaagcagtcgaataccagcttgagtccttaaagtacaatgatctgccccgcccagattatgggatagaggctttgaccccttcgagaggtcaacttactttggacgacagtttgatctaggacagttcgagcgcttccggcgtctgtttcaccactcaacctacagagtgctgctgggccacagagagagaagaatattgagcagtttatgggttgaagagaaccagttcaagcaaagagtttggatacaaggagcccgtcccgaggaagaagagatatttcaattcacaatggttcagagggtcggaggatcatgggatggttactggctgacagagagcttaataaacgatggagacgcgttctcgggtgggattgcttactgatgtagtgatgattggtgtaaatcgatcaggtgcagactagcaggtggcttgaaaaagctgagagacatgttggtgtgtagaatatgccctggctttctggagatgtttggcactgtcggacacgctagtattgtacaggaagacctctcacggcgcccatagcaccagatggccaagcatgcatatctgtggaatacttttctgttgtacgcctgctgcttgcctggtttggtaagaggaagacggcgctgcacatcttgcgccttcatctgcagcgagttacggcgcggttctttcttgatgtcctctcctttctgtgtaaagtgcttcgagttttggccactgcctcttttcacttttacgtgtctgttgtttggtcgagacgtcgagtctatggtgtcgccagcagctcctgcatgcactctcgcgacctacggcaactttttt

SEQ ID NO: 76192 - DNA, 1110 bp, Zea Mays
aggttgcgtggtgcgacaaaccgacaagccaacaatggcgtcgtcagctgctacgaccgcgaagctgatcgcgctcccgccggcgccaacacgcggcggctgctgctgctggaggacacgcaggcccgcgatccccgcggcggcggcgcgcctcaaggtctccgcctccgccgcctcgtcggacgtgccggacttcctctcgtccaattggcttgaaacccgcaagagaaagcccttcggtcccagtttagtgcagaagaagcagtcgaataccagcttgagtccttaaagtacaatgatctgccccgcccagattatgggatagaggtcatgtaccggtttgcaggctttgaccccttcgagaggtcaacttactttggacgacagtttgatctaggacagttcgagcgcttccggcgtctgtttcaccactcaacctacagagtgctgctgggccacagagagagaagaatattgagcagtttatgggttgaagagaaccagttcaagcaaagagtttggatacaaggagcccgtcccgaggaagaagagatatttcaattcacaatggttcagagggtcggaggatcatgggatggttactggctgacagagagcttaataaacgatggagacgcgttctcgggtgggattgcttactgatgtagtgatgattggtgtaaatcgatcaggtgcagactagcaggtggcttgaaaaagctgagagacatgttggtgtgtagaatatgccctggctttctggagatgtttggcactgtcggacacgctagtattgtacaggaagacctctcacggcgcccatagcaccagatggccaagcatgcatatctgtggaatacttttctgttgtacgcctgctgcttgcctggtttggtaagaggaagacggcgctgcacatcttgcgccttcatctgcagcgagttacggcgcggttctttcttgatgtcctctcctttctgtgtaaagtgcttcgagttttggccactgcctcttttcacttttacgtgtctgttgtttggtcgagacgtcgagtctatggtgtcgccagcagctcctgcatgcactctcgcgacctacggcaactttttt

SEQ ID NO: 76193 - DNA, 1112 bp, Zea Mays
aggttgcgtggtgcgacaaaccgacaagccaacaatggcgtcgtcagctgctacgaccgcgaagctgatcgcgctcccgccggcgccaacacgcggcggctgctgctgctggaggacacgcaggcccgcgatccccgcggcggcggcgcgcctcaaggtctccgcctccgccgcctcgtcggacgtgccggacttcctctcgtccaattggcttgaaacccgcaagagaaagcccttcggtcccaggttgaattgcagaagaagcagtcgaataccagcttgagtccttaaagtacaatgatctgccccgcccagattatgggatagaggtcatgtaccggtttgcaggctttgaccccttcgagaggtcaacttactttggacgacagtttgatctaggacagttcgagcgcttccggcgtctgtttcaccactcaacctacagagtgctgctgggccacagagagagaagaatattgagcagtttatgggttgaagagaaccagttcaagcaaagagtttggatacaaggagcccgtcccgaggaagaagagatatttcaattcacaatggttcagagggtcggaggatcatgggatggttactggctgacagagagcttaataaacgatggagacgcgttctcgggtgggattgcttactgatgtagtgatgattggtgtaaatcgatcaggtgcagactagcaggtggcttgaaaaagctgagagacatgttggtgtgtagaatatgccctggctttctggagatgtttggcactgtcggacacgctagtattgtacaggaagacctctcacggcgcccatagcaccagatggccaagcatgcatatctgtggaatacttttctgttgtacgcctgctgcttgcctggtttggtaagaggaagacggcgctgcacatcttgcgccttcatctgcagcgagttacggcgcggttctttcttgatgtcctctcctttctgtgtaaagtgcttcgagttttggccactgcctcttttcacttttacgtgtctgttgtttggtcgagacgtcgagtctatggtgtcgccagcagctcctgcatgcactctcgcgacctacggcaactttttt

SEQ ID NO: 76194 - DNA, 481 bp, Zea Mays
agagacatggttcagtgaacttctttccctgagttccttgcagcaggtggtcgctgtgccttcaggttcgtgtagcttctcctttccccagccatcagtgtgctctgtccagggctgcacgcgccaaactcctatgagttgtgaccacgcctaccaatttgtcacctcgccgtggccaggctagttcaggggcatgtcgccgtgatctggcgttgtgggtagctccaccgcaaaccatacaactcacgttttccccgatcaacctcgcgcgagcatcgtgatctataaaacggagaagagggtgaagtgactgaagaaaagacaccgccacctttggaatctcggccaaggacttggctctacttcgacaactgcgagtccgagcctgactcacctactaacgaaggcaagccccggtgcatgcaacccctttccttgtgtttttaaatacttttcgcacacttaagtctagtgaaatgtg

SEQ ID NO: 76195 - DNA, 1155 bp, Zea Mays
ccatcatctgccaggttcattatttttgttctgggctagtttactctaaccgggttattgataccttaagtgtttgcatattttccactgctttatttagatgtcaacatcaattttaaattgaatacacaaacaaaactgttagccatattttagcaatttattttgttttgaaatcctactcgtagatagcaatttggactctgacttctattaacattttacaaaagttcaaagccaggattaattagcaagagctacaagctctagaggcgtttatactttatagctccattatttcacgcaaacattgtctcttcatactttcaattgtgcccccccccccccccccccccaaaaaaaaagtttcttgccgttattagttttcatttctgaaatcaagctcatatgaccattatatcgttatttgggaacattgatttgtctttcttttcgatataatcctttcttgctccatcttctggctctgaatagctccgttttattttatgcacagcgaaacttttgctgatgtccttaaacaagctggtggaaaagtagagttacaattgtataaagggaaaacacatactgatgtatttttacaggatccactaaggggcggcagggacaaactggttgaagatgttttatctgtcattcatgttgatgatgcaagtgcgcgtgagagggacgcttcggcacctacccctgagcgcctggtttatgaatggcaaattaaattggcccgccaaattagtcccttctaaacaggtctgtacacagaaaggatttgttccaagacttcaacaagcatgtgttgcaacgtgataaactacgtggggtacatgatattttttgggattttcactgggtcaagcaaacgcagcttcaatctttgtttgcagggcgccagttgccaatgatggcagaagatttgccactgatggaagaaataagatttttgaggggtctctaggctgtaggcagtgctctactatactacacctgtttaatttccttggtttctttttacaaaatatatgaaatcctgatacaattctgtaaatagaatacgaagttgtttcatcatcgtaaaaaaacgtgggcaattcatgtgggaaatgttaaaagtgagattatttgttgctgcca

SEQ ID NO: 76196 - DNA, 1369 bp, Zea Mays
ctcatttctactatcttggcatggcttacataagttggcagtcagttgtttagccacaattcaatgccaaaagaatatgctggatgatgttatccaattatcctttgtagcgggatagtagtagttataattataatcgtctaaatttgagtatgtataatcaactgtggcatggataatggagcacatagtatctatgatttatccatatacctaccctacccctgcaattctcaaatccaactcctgcttcttccaaaccatgtgaaactacttgattggggagaggatgggcatagatcagaacaagacattgcagcactaagagcagctttttcacaagaggtctctgtttggcataagcttgaccatccaaatgtaaccaagtttattggagctataatgggtgcaagggatctgaatattcaaacggaaaacggccacattggcatgccaactaatatctgctgtgtcgttgtggagtaccttcctggtggtgcactaaaatcatttctgataaagaacaggagaaagaagctagcttttaaggtcgttgttcaaatcgctcttgaccttgccaggggattaagctatctccattccaagaagattgtgcaccgtgatgtgaagactgaaaatatgcttcttgacaaaacgagaaccgtgaagatcgctgattttggtgttgctcgccttgaagcttcaaatcccagtgacatgacgggcgaaactggaacgcttggttacatggcacctgaggttctcaatggaaatccctacaacaggaaatgcgatgtttacagcttcgggatctgtttgtgggagatatactgctgtgatatgccatatcctgacttgagcttttctgaggtcacgtctgcggttgtccgtcagaacctgaggccggagataccacgctgctgcccgagctctctatcgaacgtgatgaagcgctgctgggacgccaaccccgacaagcgacctgagatggccgaggcggtgtccatgctggaggcgatcgacacgtcgaagggtggaggcatgatccctgtggaccagcggccaggatgccttgcgtgcttccggcagtacagaggtccatgacagataggtggaaacctgttggagctgcggcctctagatctcgtggatgccgatcgatcgcgtgttgttttctggggaagcaaactggttaatggagctagcccgccttaccggctcgtgtaaatcctctgtccatcaattctgtaactctgttttatcgattaatgaaaagaaccgggcttgctcgactgattcctggccgatgcaaatgttgttttttttggaagagaatcgaacttgaaatgaaaacgagatgggtgccgta

SEQ ID NO: 76197 - DNA, 1144 bp, Zea Mays
ctttatttgctgacccaccctacagtactttcccaagtatatttcgtgaaactacttgattggggagaggatgggcatagatcagaacaagacattgcagcactaagagcagctttttcacaagaggtctctgtttggcataagcttgaccatccaaatgtaaccaagtttattggagctataatgggtgcaagggatctgaatattcaaacggaaaacggccacattggcatgccaactaatatctgctgtgtcgttgtggagtaccttcctggtggtgcactaaaatcatttctgataaagaacaggagaaagaagctagcttttaaggtcgttgttcaaatcgctcttgaccttgccaggggctatctccattccaagaagattgtgcaccgtgatgtgaagactgaaaatatgcttcttgacaaaacgagaaccgtgaagatcgctgattttggtgttgctcgccttgaagcttcaaatcccagtgacatgacgggcgaaactggaacgcttggttacatggcacctgaggttctcaatggaaatccctacaacaggaaatgcgatgtttacagcttcgggatctgtttgtgggagatatactgctgtgatatgccatatcctgacttgagcttttctgaggtcacgtctgcggttgtccgtcagaacctgaggccggagataccacgctgctgcccgagctctctatcgaacgtgatgaagcgctgctgggacgccaaccccgacaagcgacctgagatggccgaggcggtgtccatgctggaggcgatcgacacgtcgaagggtggaggcatgatccctgtggaccagcggccaggatgccttgcgtgcttccggcagtacagaggtccatgacagataggtggaaacctgttggagctgcggcctctagatctcgtggatgccgatcgatcgcgtgttgttttctggggaagcaaactggttaatggagctagcccgccttaccggctcgtgtaaatcctctgtccatcaattctgtaactctgttttatcgattaatgaaaagaaccgggcttgctcgactgattcctggccgatgcaaatgttgttttttttggaagagaatcgaacttgaaatgaaaacgagatgggtgccgta

SEQ ID NO: 76198 - DNA, 1174 bp, Zea Mays
gattttcccaccagatagaaacaactttatttgctgacccaccctacagtactttcccaagtatatttcgtgaaactacttgattggggagaggatgggcatagatcagaacaagacattgcagcactaagagcagctttttcacaagaggtctctgtttggcataagcttgaccatccaaatgtaaccaagtttattggagctataatgggtgcaagggatctgaatattcaaacggaaaacggccacattggcatgccaactaatatctgctgtgtcgttgtggagtaccttcctggtggtgcactaaaatcatttctgataaagaacaggagaaagaagctagcttttaaggtcgttgttcaaatcgctcttgaccttgccaggggattaagctatctccattccaagaagattgtgcaccgtgatgtgaagactgaaaatatgcttcttgacaaaacgagaaccgtgaagatcgctgattttggtgttgctcgccttgaagcttcaaatcccagtgacatgacgggcgaaactggaacgcttggttacatggcacctgaggttctcaatggaaatccctacaacaggaaatgcgatgtttacagcttcgggatctgtttgtgggagatatactgctgtgatatgccatatcctgacttgagcttttctgaggtcacgtctgcggttgtccgtcagaacctgaggccggagataccacgctgctgcccgagctctctatcgaacgtgatgaagcgctgctgggacgccaaccccgacaagcgacctgagatggccgaggcggtgtccatgctggaggcgatcgacacgtcgaagggtggaggcatgatccctgtggaccagcggccaggatgccttgcgtgcttccggcagtacagaggtccatgacagataggtggaaacctgttggagctgcggcctctagatctcgtggatgccgatcgatcgcgtgttgttttctggggaagcaaactggttaatggagctagcccgccttaccggctcgtgtaaatcctctgtccatcaattctgtaactctgttttatcgattaatgaaaagaaccgggcttgctcgactgattcctggccgatgcaaatgttgttttttttggaagagaatcgaacttgaaatgaaaacgagatgggtgccgta

SEQ ID NO: 76199 - DNA, 1143 bp, Zea Mays
gccaaccaaacaggccttaagtgccgttgttgttatttattgaatttcattaaggatgatataacaagtagatgcatctccatgtacccagtgaggtaccctttggtgcatggttggttgggagaaaagggagcttatctgcaggagtacaatacaagccacttagtggcagcaaatatcctatgccatttacagaattggagaactggaattatgcaatcagttatggtgttggctcaactagcccgctcagcccttcattcattttctccctggaacttgccagaagcacacagctaaccgcatcattctatcagcacctggttgttcaaagaagggtaaaaaatccttttgaagatgatcaggttgttggcattacaaactacatcgattttggacttgagttggctgccaaggttgataaagataaagtgagtggggatggcaactcgtttcagttggctgcaagttggcaagctaacaaaaactttctgctgaagggaaagcttggtccttccacgtcctctgtagctctggcattcaaatcatggtggagaccatcctttacatttagtgtaacagctgtgaatgatcattcaaagggcacaacatcgtatggatttggcctccgtgtcgaggaccttagacgagcgagttaccagcgagctgatccaaactacgtcatgctgacgccaagcaaggagcacttggcaccaggtgttctgcgcgagtacgggaagcggcccatgttccagacacaaatcgattcgggcaactacgaccatctgcctacagagctgaagcctcttggcaggattttctaactgtaggctggctgctcgtgctcgtggtcgtctttcgctaggagagattttttgttgttgttgttgtagatcttatccgtcttggtcctttagacatgctgctgtaacttgcattgactcgtgagcggattgcgtcatgatagctgcatggcttttggaagccagaaggatcatccaacgcttcttcttgcattgctatgtacttgggtggatatatataacggtatggtgcagtggacaggcggtcttgaatcctcattcacttgtatgatatcatcgggtcgcagtccagtacgtggatgaatcgcagtcagctggg

SEQ ID NO: 76200 - DNA, 1670 bp, Zea Mays
gcctgtattgcagcggagccaccgccgatccggaacaattgaatcgctgcatcggtgtttcgccgccgccgcaaaaagaggcggccgcggtgagttcaagggaggaggaggaagagggtgtgaggcgctgcagaactcctgtggatcggtgagccgagggcgatatggggatgttcttcagcaaggcggaaccgccgccgcccatggtgctggtgccgccgctcttcgactaccctcccatcgctgcccgcaccaggatggcggtgccagcatatgagctaatgtttgggaaagtctccctgcacaatctgtttgaggactactttgatcaagctgggaatatgacctcaaggatcatgttgaagccgcttgaagatcctcacgttgatttgattgctactgtgtctgctgctgctgatagaaacagtggaacagaagtaaaaggggatgctttatttcgctggcagagagagctggatgacccccatacctttgtggaccttcttgtgtcaacttcaaatcccttgctgcagctgagattatgtgcatatcatcctaagtatcgtattggtgcctttggaacattacctttgctaatggggaacagggtgcgttcagaagactatggggtcatgggtgtaagatatggttcagagaatttatctgttggagcatcctttgtgccaatttccttacccagtgaggtaccctttggtgcatggttggttgggagaaaagggagcttatctgcaggagtacaatacaagccacttagtggcagcaaatatcctatgccatttacagaattggagaactggaattatgcaatcagttatggtgttggctcaactagcccgctcagcccttcattcattttctccctggaacttgccagaagcacacagctaaccgcatcattctatcagcacctggttgttcaaagaagggtaaaaaatccttttgaagatgatcaggttgttggcattacaaactacatcgattttggacttgagttggctgccaaggttgataaagataaagtgagtggggatggcaactcgtttcagttggctgcaagttggcaagctaacaaaaactttctgctgaagctgtgaatgatcattcaaagggcacaacatcgtatggatttggcctccgtgtcgaggaccttagacgagcgagttaccagcgagctgatccaaactacgtcatgctgacgccaagcaaggagcacttggcaccaggtgttctgcgcgagtacgggaagcggcccatgttccagacacaaatcgattcgggcaactacgaccatctgcctacagagctgaagcctcttggcaggattttctaactgtaggctggctgctcgtgctcgtggtcgtctttcgctaggagagattttttgttgttgttgttgtagatcttatccgtcttggtcctttagacatgctgctgtaacttgcattgactcgtgagcggattgcgtcatgatagctgcatggcttttggaagccagaaggatcatccaacgcttcttcttgcattgctatgtacttgggtggatatatataacggtatggtgcagtggacaggcggtcttgaatcctcattcacttgtatgatatcatcgggtcgcagtccagtacgtggatgaatcgcagtcagctggg

SEQ ID NO: 76201 - DNA, 1616 bp, Zea Mays
cttgaactagcctgtattgcagcggagccaccgccgatccggaacaattgaatcgctgcatcggtgtttcgccgccgccgcaaaaagaggcggccgcggtgagttcaagggaggaggaggaagagggtgtgaggcgctgcagaactcctgtggatcggtgagccgagggcgatatggggatgttcttcagcaaggcggaaccgccgccgcccatggtgctggtgccgccgctcttcgactaccctcccatcgctgcccgcaccaggtgtctgctgctgctgatagaaacagtggaacagaagtaaaaggggatgctttatttcgctggcagagagagctggatgacccccatacctttgtggaccttcttgtgtcaacttcaaatcccttgctgcagctgagattatgtgcatatcatcctaagtatcgtattggtgcctttggaacattacctttgctaatggggaacagggtgcgttcagaagactatggggtcatgggtgtaagatatggttcagagaatttatctgttggagcatcctttgtgccaatttccttacccagtgaggtaccctttggtgcatggttggttgggagaaaagggagcttatctgcaggagtacaatacaagccacttagtggcagcaaatatcctatgccatttacagaattggagaactggaattatgcaatcagttatggtgttggctcaactagcccgctcagcccttcattcattttctccctggaacttgccagaagcacacagctaaccgcatcattctatcagcacctggttgttcaaagaagggtaaaaaatccttttgaagatgatcaggttgttggcattacaaactacatcgattttggacttgagttggctgccaaggttgataaagataaagtgagtggggatggcaactcgtttcagttggctgcaagttggcaagctaacaaaaactttctgctgaagggaaagcttggtccttccacgtcctctgtagctctggcattcaaatcatggtggagaccatcctttacatttagtgtaacagctgtgaatgatcattcaaagggcacaacatcgtatggatttggcctccgtgtcgaggaccttagacgagcgagttaccagcgagctgatccaaactacgtcatgctgacgccaagcaaggagcacttggcaccaggtgttctgcgcgagtacgggaagcggcccatgttccagacacaaatcgattcgggcaactacgaccatctgcctacagagctgaagcctcttggcaggattttctaactgtaggctggctgctcgtgctcgtggtcgtctttcgctaggagagattttttgttgttgttgttgtagatcttatccgtcttggtcctttagacatgctgctgtaacttgcattgactcgtgagcggattgcgtcatgatagctgcatggcttttggaagccagaaggatcatccaacgcttcttcttgcattgctatgtacttgggtggatatatataacggtatggtgcagtggacaggcggtcttgaatcctcattcacttgtatgatatcatcgggtcgcagtccagtacgtggatgaatcgcagtcagctggg

SEQ ID NO: 76202 - DNA, 1706 bp, Zea Mays
cttgaactagcctgtattgcagcggagccaccgccgatccggaacaattgaatcgctgcatcggtgtttcgccgccgccgcaaaaagaggcggccgcggtgagttcaagggaggaggaggaagagggtgtgaggcgctgcagaactcctgtggatcggtgagccgagggcgatatggggatgttcttcagcaaggcggaaccgccgccgcccatggtgctggtgccgccgctcttcgactaccctcccatcgctgcccgcaccaggatggcggtgccagcatatgagctaatgtttgggaaagtctccctgcacaatctgtttgaggactactttgatcaagctgggaatatgacctcaaggatcatgttgaagccgcttgaagatcctcacgttgatttgattgctactgtgtctgctgctgctgatagaaacagtggaacagaagtaaaaggggatgctttatttcgctggcagagagagctggatgacccccatacctttgtggaccttcttgtgtcaacttcaaatcccttgctgcagctgagattatgtgcatatcatcctaagtatcgtattggtgcctttggaacattacctttgctaatggggaacagggtgcgttcagaagactatggggtcatgggttacccagtgaggtaccctttggtgcatggttggttgggagaaaagggagcttatctgcaggagtacaatacaagccacttagtggcagcaaatatcctatgccatttacagaattggagaactggaattatgcaatcagttatggtgttggctcaactagcccgctcagcccttcattcattttctccctggaacttgccagaagcacacagctaaccgcatcattctatcagcacctggttgttcaaagaagggtaaaaaatccttttgaagatgatcaggttgttggcattacaaactacatcgattttggacttgagttggctgccaaggttgataaagataaagtgagtggggatggcaactcgtttcagttggctgcaagttggcaagctaacaaaaactttctgctgaagggaaagcttggtccttccacgtcctctgtagctctggcattcaaatcatggtggagaccatcctttacatttagtgtaacagctgtgaatgatcattcaaagggcacaacatcgtatggatttggcctccgtgtcgaggaccttagacgagcgagttaccagcgagctgatccaaactacgtcatgctgacgccaagcaaggagcacttggcaccaggtgttctgcgcgagtacgggaagcggcccatgttccagacacaaatcgattcgggcaactacgaccatctgcctacagagctgaagcctcttggcaggattttctaactgtaggctggctgctcgtgctcgtggtcgtctttcgctaggagagattttttgttgttgttgttgtagatcttatccgtcttggtcctttagacatgctgctgtaacttgcattgactcgtgagcggattgcgtcatgatagctgcatggcttttggaagccagaaggatcatccaacgcttcttcttgcattgctatgtacttgggtggatatatataacggtatggtgcagtggacaggcggtcttgaatcctcattcacttgtatgatatcatcgggtcgcagtccagtacgtggatgaatcgcagtcagctggg

SEQ ID NO: 76203 - DNA, 1771 bp, Zea Mays
gttacccttgaactagcctgtattgcagcggagccaccgccgatccggaacaattgaatcgctgcatcggtgtttcgccgccgccgcaaaaagaggcggccgcggtgagttcaagggaggaggaggaagagggtgtgaggcgctgcagaactcctgtggatcggtgagccgagggcgatatggggatgttcttcagcaaggcggaaccgccgccgcccatggtgctggtgccgccgctcttcgactaccctcccatcgctgcccgcaccaggatggcggtgccagcatatgagctaatgtttgggaaagtctccctgcacaatctgtttgaggactactttgatcaagctgggaatatgacctcaaggatcatgttgaagccgcttgaagatcctcacgttgatttgattgctactgtgtctgctgctgctgatagaaacagtggaacagaagtaaaaggggatgctttatttcgctggcagagagagctggatgacccccatacctttgtggaccttcttgtgtcaacttcaaatcccttgctgcagctgagattatgtgcatatcatcctaagtatcgtattggtgcctttggaacattacctttgctaatggggaacaggtagggtgcgttcagaagactatggggtcatgggtgtaagatatggttcagagaatttatctgttggagcatcctttgtgccaatttccttacccagtgaggtaccctttggtgcatggttggttgggagaaaagggagcttatctgcaggagtacaatacaagccacttagtggcagcaaatatcctatgccatttacagaattggagaactggaattatgcaatcagttatggtgttggctcaactagcccgctcagcccttcattcattttctccctggaacttgccagaagcacacagctaaccgcatcattctatcagcacctggttgttcaaagaagggtaaaaaatccttttgaagatgatcaggttgttggcattacaaactacatcgattttggacttgagttggctgccaaggttgataaagataaagtgagtggggatggcaactcgtttcagttggctgcaagttggcaagctaacaaaaactttctgctgaagggaaagcttggtccttccacgtcctctgtagctctggcattcaaatcatggtggagaccatcctttacatttagtgtaacagctgtgaatgatcattcaaagggcacaacatcgtatggatttggcctccgtgtcgaggaccttagacgagcgagttaccagcgagctgatccaaactacgtcatgctgacgccaagcaaggagcacttggcaccaggtgttctgcgcgagtacgggaagcggcccatgttccagacacaaatcgattcgggcaactacgaccatctgcctacagagctgaagcctcttggcaggattttctaactgtaggctggctgctcgtgctcgtggtcgtctttcgctaggagagattttttgttgttgttgttgtagatcttatccgtcttggtcctttagacatgctgctgtaacttgcattgactcgtgagcggattgcgtcatgatagctgcatggcttttggaagccagaaggatcatccaacgcttcttcttgcattgctatgtacttgggtggatatatataacggtatggtgcagtggacaggcggtcttgaatcctcattcacttgtatgatatcatcgggtcgcagtccagtacgtggatgaatcgcagtcagctggg

SEQ ID NO: 76204 - DNA, 1065 bp, Zea Mays
gagatactactgcttttatgcaatatacttttgttgtgttgtgtgcctgataagttgcaccataatatttcttactttaaggacaaaggttctgatgaggttgtattcaaggccatggggagggctatcaataagactgtcatggttgtggaattgatcaagaggaggattgttggcctccatcagaataccaccactggatctactgatattactgatatgtgggagccattggaagaaggcctacttccgcttgagacaacaagacatgtctccatgatcactataactctttcaaagaaggagctggacacatcatctatcgggaagcggatggatcgggcgctcaaagacttgaaggaaaagcaaaacaacaagaaggaatcgaacattccagatgtttacccttttcagaatcatagttggcagtaccatttctgttataatatcctttatgtggaaattaaatttgttgttaattgtttcttaacctgtagtgtggcagcagatattcagactatgctagaagaaacccagctgaaatttgaggaggaaagacagaatttgttaaaagtactgtctaacacttccaaagagcatattcgggccggtgcaggacatgcgcatcccataccagcagaagcgcatgttcggcttcgtcaccttcatgtatgccgagacggtgaaggccatcctgagcaaggcaacccgcacttcgtgtgcgacgtgcgcgtgctcgtcaagccctacaaggagaagggcaaggtccccggcaggttcaggaagctgcagcacgcgcaccatggcggagccgagttcgccggttgcgcgtcgcccactggattgctggattccagggacccctacgccctcctgcttctttcaggtgcccaggttttctcctgggcatgaagccattgggctatgatgtgtgaggtgcacaaagcaaaaaaagggggaggggccccctccattcctctaatctgggagggactactaatatggctacatgatggccggccccatcaaccgagcgtagagaagctttgacaaagaaaaaggaaa

SEQ ID NO: 76205 - DNA, 2254 bp, Zea Mays
ggtcccttcaatctctctgcgcaatcaaactgcggtggccaaccccggaagcggcggcgggcaaagcgcgcgacgcagagaagcgtaacttcaggccgccggtcgctctacgcatcctgctccccgttctcgtcggagatccaccggggcagcctttctttccccttcctcaatcaagtcgatccaatttcgcgcgcgggtcgggctcgccttctcctccagtctccacctccaccagcgctcgaggtcgacggacgctactcgcagcagttcttctttgcggtgcggccgagaagaagctaaggctcaggcatgagcttccgggaccaggagagtggcggggaggatgggggcaggacgtcctccgcctccgacctgcggaagccgctcatcaacaccgggagctggtaccgcatgccgccggcgggtggcgtgatgggctcgcggcaatctagcctcatggagcgattgggctcctctgcgttctctctccgcgacgtcgctatctcggcgacgctctgcacgctcattgtcgcgctaggtcccatccagttcggtttcacatgtggctactcctcacccacgcaggacgccatcattgctgaccttggcctctccctctctgagttctccctcttcggttcattatctaatgtaggggcgatggtaggcgccatctccagtgggcaacttgcagagtatatcggccgcaagggtctctcatgatcgctgcgattccaaacataattgggtggctcgcgatatcatttgcaaaagattcctctttcttgtttatgggtcggctgctagaaggatttggagttggtgtaatatcgtatacagtaccggtttatattgcagaaatcgctcctcaagatcagaggggagctcttggttctgtcaatcagctctccgtcacgattggtatattgcttgcctatttgtttggcatgtttgttccctggagaattcttgctgttctaggcattttaccctgttcaatcctgattcctggactgttctttgtccctgaatccccaaggtggttggcaaaaatggggaagatggaggattttgaatattcattgcaagttctgcgaggatttcagacagatatcacagcagaagtaaatgaaataaagagatcattagcatcatcgaggaggaggacaaccataaggttcgctgatatcaaacagaagagatacagtgttccccttgtggttggtgacttgctatttgtttctctgtttacatattgatgtttaaacttttgtagttttgctaattggcttgtttttagataggaatcggtctccttgtcctgcagcagctaagtggtgtcaatggcattctattttatgctgcgagcatcttcaaagctgctggtattacaaacagtaatctagcaacatttggtttaggggctgttcaggtgattgctactggagtgacaacctggttgactgacaaagctggtcgaaggcttcttctcattatttccaccacaggaatggtcattactcttgttattgtttctgtgtcattttttgtgaaggacaacatagctgctggttcgcacttatactctgtaatgagtatgctttcactggctggacttgtggcatttgtgattgcattttctcttggcttgggagcgattccgtggatcattatgtctgagatccttcctgttaacatcaagagccttgctggaagtgttgcgaccctggcgaactggctgacagcatgggccattacaatgacggcaagcctgatgttgaactggagcagtggaggaacctttgctatctacgccgtcgtgtctaccatggccctcattttcgtgtgcttgtgggtgcctgagaccaagggaagaacgctagaggaaatcgccttctcattccgctgacacgtcgtcatgatctaggtatgggaagccacaccacaccatgtgtcattgagtcatgccgcggtgcgttcagttcatgaatcccgcagggatcttgcggccattctgttgcttggatgtaccaccatcttcagtgttcataccaatgtacattgtacaatatgacgacgacgccatagcagaaaggcaagtgggtttatgtttgtacgatggactagtagcagaaagcactcgaacccctgtacgggttgcggaggagagcaatttatttgctgtattttcctggttcaataccggacacgttagaattttgaaaaataaaaatctgagcaaatttatcaa

SEQ ID NO: 76206 - DNA, 2100 bp, Zea Mays
ggtcccttcaatctctctgcgcaatcaaactgcggtggccaaccccggaagcggcggcgggcaaagcgcgcgacgcagagaagcgtaacttcaggccgccggtcgctctacgcatcctgctccccgttctcgtcggagatccaccggggcagcctttctttccccttcctcaatcaagtcgatccaatttcgcgcgcgggtcgggctcgccttctcctccagtctccacctccaccagcgctcgaggtcgacggacgctactcgcagcagttcttctttgcggtgcggccgagaagaagctaaggctcaggcatgagcttccgggaccaggagagtggcggggaggatgggggcaggacgtcctccgcctccgacctgcggaagccgctcatcaacaccgggagctggtaccgcatgccgccggcgggtggcgtgatgggctcgcggcaatctagcctcatggagcgattgggctcctctgcgttctctctccgcgacgtcgctatctcggcgacgctctgcacgctcattgtcgcgctaggtcccatccagttcggtttcacatgtggctactcctcacccacgcaggacgccatcattgctgaccttggcctctccctctctgagttctccctcttcggttcattatctaatgtaggggcgatggtaggcgccatctccagtgggcaacttgcagagtatatcggccgcaaggggtctctcatgatcgctgcgattccaaacataattgggtggctcgcgatatcatttgcaaaagattcctctttcttgtttatgggtcggctgctagaaggatttggagttggtgtaatatcgtatacagtaccggtttatattgcagaaatcgctcctcaagatcagaggggagctcttggttctgtcaatcagctctccgtcacgattggtatattgcttgcctatttgtttggcatgtttgttccctggagaattcttgctgttctaggcattttaccctgttcaatcctgattcctggactgttctttgtccctgaatccccaaggtggttggcaaaaatggggaagatggaggattttgaatattcattgcaagttctgcgaggatttcagacagatatcacagcagaagtaaatgaaataaagagatcattagcatcatcgaggaggaggacaaccataaggttcgctgatatcaaacagaagagatacagtgttccccttgtggaatcggtctccttgtcctgcagcagctaagtggtgtcaatggcattctattttatgctgcgagcatcttcaaagctgctggtattacaaacagtaatctagcaacatttggtttaggggctgttcaggtgattgctactggagtgacaacctggttgactgacaaagctggtcgaaggcttcttctcattatttccaccacaggaatggtcattactcttgttattgtttctgtgtcattttttgtgaaggacaacatagctgctggttcgcacttatactctgtaatgagtatgctttcactggctggacttgtggcatttgtgattgcattttctcttggcttgggagcgattccgtggatcattatgtctgagatccttcctgttaacatcaagagccttgctggaagtgttgcgaccctggcgaactggctgacagcatgggccattacaatgacggcaagcctgatgttgaactggagcagtggaggaacctttgctatctacgccgtcgtgtctaccatggccctcattttcgtgtgcttgtgggtgcctgagaccaagggaagaacgctagaggaaatcgccttctcattccgctgacacgtcgtcatgatctagggatcttgcggccattctgttgcttggatgtaccaccatcttcagtgttcataccaatgtacattgtacaatatgacgacgacgccatagcagaaaggcaagtgggtttatgtttgtacgatggactagtagcagaaagcactcgaacccctgtacgggttgcggaggagagcaatttatttgctgtattttcctggttcaataccggacacgttagaattttgaaaaataaaaatctgagcaaatttatcaa

SEQ ID NO: 76207 - DNA, 2189 bp, Zea Mays
ggtcccttcaatctctctgcgcaatcaaactgcggtggccaaccccggaagcggcggcgggcaaagcgcgcgacgcagagaagcgtaacttcaggccgccggtcgctctacgcatcctgctccccgttctcgtcggagatccaccggggcagcctttctttccccttcctcaatcaagtcgatccaatttcgcgcgcgggtcgggctcgccttctcctccagtctccacctccaccagcgctcgaggtcgacggacgctactcgcagcagttcttctttgcggtgcggccgagaagaagctaaggctcaggcatgagcttccgggaccaggagagtggcggggaggatgggggcaggacgtcctccgcctccgacctgcggaagccgctcatcaacaccgggagctggtaccgcatgccgccggcgggtggcgtgatgggctcgcggcaatctagcctcatggagcgattgggctcctctgcgttctctctccgcgacgtcgctatctcggcgacgctctgcacgctcattgtcgcgctaggtcccatccagttcggtttcacatgtggctactcctcacccacgcaggacgccatcattgctgaccttggcctctccctctctgagttctccctcttcggttcattatctaatgtaggggcgatggtaggcgccatctccagtgggcaacttgcagagtatatcggccgcaaggggtctctcatgatcgctgcgattccaaacataattgggtggctcgcgatatcatttgcaaaagattcctctttcttgtttatgggtcggctgctagaaggatttggagttggtgtaatatcgtatacagtaccggtttatattgcagaaatcgctcctcaagatcagaggggagctcttggttctgtcaatcagctctccgtcacgattggtatattgcttgcctatttgtttggcatgtttgttccctggagaattcttgctgttctaggcattttaccctgttcaatcctgattcctggactgttctttgtccctgaatccccaaggtggttgattgtttgtttcaggcaaaaatggggaagatggaggattttgaatattcattgcaagttctgcgaggatttcagacagatatcacagcagaagtaaatgaaataaagagatcattagcatcatcgaggaggaggacaaccataaggttcgctgatatcaaacagaagagatacagtgttccccttgtgataggaatcggtctccttgtcctgcagcagctaagtggtgtcaatggcattctattttatgctgcgagcatcttcaaagctgctggtattacaaacagtaatctagcaacatttggtttaggggctgttcaggtgattgctactggagtgacaacctggttgactgacaaagctggtcgaaggcttcttctcattatttccaccacaggaatggtcattactcttgttattgtttctgtgtcattttttgtgaaggacaacatagctgctggttcgcacttatactctgtaatgagtatgctttcactggctggacttgtggcatttgtgattgcattttctcttggcttgggagcgattccgtggatcattatgtctgagatccttcctgttaacatcaagagccttgctggaagtgttgcgaccctggcgaactggctgacagcatgggccattacaatgacggcaagcctgatgttgaactggagcagtggaggaacctttgctatctacgccgtcgtgtctaccatggccctcattttcgtgtgcttgtgggtgcctgagaccaagggaagaacgctagaggaaatcgccttctcattccgctgacacgtcgtcatgatctaggtatgggaagccacaccacaccatgtgtcattgagtcatgccgcggtgcgttcagttcatgaatcccgcagggatcttgcggccattctgttgcttggatgtaccaccatcttcagtgttcataccaatgtacattgtacaatatgacgacgacgccatagcagaaaggcaagtgggtttatgtttgtacgatggactagtagcagaaagcactcgaacccctgtacgggttgcggaggagagcaatttatttgctgtattttcctggttcaataccggacacgttagaattttgaaaaataaaaatctgagcaaatttatcaa

SEQ ID NO: 76208 - DNA, 2123 bp, Zea Mays
cctttttctgtccgtccgtggtcccttcaatctctctgcgcaatcaaactgcggtggccaaccccggaagcggcggcgggcaaagcgcgcgacgcagagaagcgtaacttcaggccgccggtcgctctacgcatcctgctccccgttctcgtcggagatccaccggggcagcctttctttccccttcctcaatcaagtcgatccaatttcgcgcgcgggtcgggctcgccttctcctccagtctccacctccaccagcgctcgaggtcgacggacgctactcgcagcagttcttctttgcggtgcggccgagaagaagctaaggctcaggcatgagcttccgggaccaggagagtggcggggaggatgggggcaggacgtcctccgcctccgacctgcggaagccgctcatcaacaccgggagctggtaccgcatgccgccggcgggtggcgtgatgggctcgcggcaatctagcctcatggagcgattgggctcctctgcgttctctctccgcgacgtcgctatctcggcgacgctctgcacgctcattgtcgcgctaggtcccatccagttcggtttcacatgtggctactcctcacccacgcaggacgccatcattgctgaccttggcctctccctctctgagttctccctcttcggttcattatctaatgtaggggcgatggtaggcgccatctccagtgggcaacttgcagagtatatcggccgcaaggggtctctcatgatcgctgcgattccaaacataattgggtggctcgcgatatcatttgcaaaagattcctctttcttgtttatgggtcggctgctagaaggatttggagttggtgtaatatcgtatacagtaccggtttatattgcagaaatcgctcctcaagatcagaggggagctcttggttctgtcaatcagctctccgtcacgattggtatattgcttgcctatttgtttggcatgtttgttccctggagaattcttgctgttctaggcattttaccctgttcaatcctgattcctggactgttctttgtccctgaatccccaaggtggttggcaaaaatggggaagatggaggattttgaatattcattgcaagttctgcgaggatttcagacagatatcacagcagaagtaaatgaaataaagagatcattagcatcatcgaggaggaggacaaccataaggttcgctgatatcaaacagaagagatacagtgttccccttgtggttggaatcggtctccttgtcctgcagcagctaagtggtgtcaatggcattctattttatgctgcgagcatcttcaaagctgctggtattacaaacagtaatctagcaacatttggtttaggggctgttcaggtgattgctactggagtgacaacctggttgactgacaaagctggtcgaaggcttcttctcattatttccaccacaggaatggtcattactcttgttattgtttctgtgtcattttttgtgaaggacaacatagctgctggttcgcacttatactctgtaatgagtatgctttcactggctggacttgtggcatttgtgattgcattttctcttggcttgggagcgattccgtggatcattatgtctgagatccttcctgttaacatcaagagccttgctggaagtgttgcgaccctggcgaactggctgacagcatgggccattacaatgacggcaagcctgatgttgaactggagcagtggaggaacctttgctatctacgccgtcgtgtctaccatggccctcattttcgtgtgcttgtgggtgcctgagaccaagggaagaacgctagaggaaatcgccttctcattccgctgacacgtcgtcatgatctagggatcttgcggccattctgttgcttggatgtaccaccatcttcagtgttcataccaatgtacattgtacaatatgacgacgacgccatagcagaaaggcaagtgggtttatgtttgtacgatggactagtagcagaaagcactcgaacccctgtacgggttgcggaggagagcaatttatttgctgtattttcctggttcaataccggacacgttagaattttgaaaaataaaaatctgagcaaatttatcaa

SEQ ID NO: 76209 - DNA, 2098 bp, Zea Mays
atagaagaaactgggacgaccctttttctgtccgtccgtggtcccttcaatctctctgcgcaatcaaactgcggtggccaaccccggaagcggcggcgggcaaagcgcgcgacgcagagaagcgtaacttcaggccgccggtcgctctacgcatcctgctccccgttctcgtcggagatccaccggggcagcctttctttccccttcctcaatcaagtcgatccaatttcgcgcgcgggtcgggctcgccttctcctccagtctccacctccaccagcgctcgaggtcgacggacgctactcgcagcagttcttctttgcggtgcggccgagaagaagctaaggctcaggcatgagcttccgggaccaggagagtggcggggaggatgggggcaggacgtcctccgcctccgacctgcggaagccgctcatcaacaccgggagctggtaccgcatgccgccggcgggtggcgtgatgggctcgcggcaatctagcctcatggagcgattgggctcctctgcgttctctctccgcgacgtcgctatctcggcgacgctctgcacgctcattgtcgcgctaggtcccatccagttcggtttcacatgtggctactcctcacccacgcaggacgccatcattgctgaccttggcctctccctctctgagttctccctcttcggttcattatctaatgtaggggcgatggtaggcgccatctccagtgggcaacttgcagagtatatcggccgcaaggggtctctcatgatcgctgcgattccaaacataattgggtggctcgcgatatcatttgcaaaagattcctctttcttgtttatgggtcggctgctagaaggatttggagttggtgtaatatcgtatacagtaccggtttatattgcagaaatcgctcctcaagatcagaggggagctcttggttctgtcaatcagctctccgtcacgattggtatattgcttgcctatttgtttggcatgtttgttccctggagaattcttgctgttctaggcattttaccctgttcaatcctgattcctggactgttctttgtccctgaatccccaaggtggttggcaaaaatggggaagatggaggattttgaatattcattgcaagttctgcgaggatttcagacagatatcacagcagaagtaaatgaaataaagagatcattagcatcatcgaggaggaggacaaccataaggttcgctgatatcaaacagaagagatacagtgttccccttgtgataggaatcggtctccttgtcctgcagcagctaagtggtgtcaatggcattctattttatgctgcgagcatcttcaaagctgctggtattacaaacagtaatctagcaacatttggtttaggggctgttcaggtgattgctactggagtgacaacctggttgactgacaaagctggtcgaaggcttcttctcattatttccaccacaggaatggtcattactcttgttattgtttctgtgtcattttttgtgaaggacaacatagctgctggttcgcacttatactctgtaatgagtatgctttcactggctggacttgtggcatttgtgattgcattttctcttggcttgggagcgattccgtggatcattatgtctgagatccttcctgttaacatcaagagccttgctggaagtgttgcgaccctggcgaactggctgacagcatgggccattacaatgacggcaagcctgatgttgaactggagcagtggaggaacctttgctatctacgccgtcgtgtctaccatggccctcattttcgtgtgcttgtgggtgcctgagaccaagggaagaacgctagaggaaatcgccttctcattccgctgacacgtcgtcatgatctagtgttcataccaatgtacattgtacaatatgacgacgacgccatagcagaaaggcaagtgggtttatgtttgtacgatggactagtagcagaaagcactcgaacccctgtacgggttgcggaggagagcaatttatttgctgtattttcctggttcaataccggacacgttagaattttgaaaaataaaaatctgagcaaatttatcaa

SEQ ID NO: 76210 - DNA, 966 bp, Zea Mays
caagcacatgcctcaatgcctgcaagcgagaaagaaggttagtcacccttaatgacatccgtcttgagtttcgttcgatcctatatataatcccatcggaactggttacattctggaatctctgaatctaatggaaatatgttaagaattcgtacccaatccaaggcctatgcccctacaaaatccagctcactcaacattgttagcttgctgcgttattgctgttaatcatcctatttttcagcacgatggcatatctcaactcctaagggccaaggaagcgcacgagttggcttgcttctcaacaccgcggcgctactgcctcagcatgggtgatggccctatcatcatgaatcgaaatccttgtaaatccttaggttctggaaggtagaggcggcgacagcactacagcagccatgtgagtacgtgacttggagctccagccctccattaatggaatcaatcaggtctggacaatgacactcgctccatgcatggcagcatgggatgcatctagagccaagtacagtttaagcttaaacaccacagcatgcaagtacacctccaattgaatggcaaacagagagagagagagtgtgtgaaaggtacgagtatttcatgcaacctcgagtctctctaatggcggtgtcacagataataaaatctgcatgcaagcattgttttccactatatttcatccaggcccccctccacacacacacacagtatatcctagctacaggtattgcatgctgctctctaattagcaattggctgaagagaactcaagattaatagcttatcatgaactcatgccattttggccattagtttatgctgggttggaagcttgagctaaatggaaaaaagtgctgcattagaagggaggagagaccaccggctatattcgctattgattaacagattaagtgaagatggaaatatagatcggaatttagattggtt

SEQ ID NO: 76211 - DNA, 774 bp, Zea Mays
ccaaatcaacttcagcaagcacatgcctcaatgcctgcaagcgagaaagaagcacgatggcatatctcaactcctaagggccaaggaagcgcacgagttggcttgcttctcaacaccgcggcgctactgcctcagcatgggtgatggccctatcatcatgaatcgaaatccttgtaaatccttaggttctggaaggtagaggcggcgacagcactacagcagccatgtgagtacgtgacttggagctccagccctccattaatggaatcaatcaggtctggacaatgacactcgctccatgcatggcagcatgggatgcatctagagccaagtacagtttaagcttaaacaccacagcatgcaagtacacctccaattgaatggcaaacagagagagagagagtgtgtgaaaggtacgagtatttcatgcaacctcgagtctctctaatggcggtgtcacagataataaaatctgcatgcaagcattgttttccactatatttcatccaggcccccctccacacacacacacagtatatcctagctacaggtattgcatgctgctctctaattagcaattggctgaagagaactcaagattaatagcttatcatgaactcatgccattttggccattagtttatgctgggttggaagcttgagctaaatggaaaaaagtgctgcattagaagggaggagagaccaccggctatattcgctattgattaacagattaagtgaagatggaaatatagatcggaatttagattggtt

SEQ ID NO: 76212 - DNA, 736 bp, Zea Mays
gggataccggaaataccctgcacggccatccgatcgagccaacgcttggagacgccgtctccgaatgaagtaggggagagcggggtgccggggggtcagtttgttgccggtcatcctcctcgtcgtccaacccaggtgagttccgcatttcacatcatcccatgctcgccttttaattttatatgggaacactaggtcatcgcatcgttcacgttcactctctgagactccgagacgcggttgctatggcctatttgttgattattacgggaatatggctgatgaggaatgcagtttaaaaactggagcaccaccgcgtggttgcttttgcaggatagtgtgccaatcaggtcaggacataggcttcagcattattttctgaatcctgctcacaacaattgaactgcagtctgtgccatgacaactgacaagtcatatgcgtgagtcagacgaagagtttgagacgagacaaattttcaaagcaggacacctctactaattagttgcagaatcaagtgtgtctgttgcacatggctttgacaaagcattgcatttctagtttgctgttacatacctagaccctagtgaatagagaagtcactccggtgctgctttaggaataatgctaatttattcagtcttgatatcttctgtaaaattcacagtaaattcataaacgaaagggaattttatttgtgagtaaagccgtaatagtatttgcatcaggagttcacaa

SEQ ID NO: 76213 - DNA, 2420 bp, Zea Mays
ctttctcacattttggctcgggttgaggttgttctgctctacttttccaagaattttgtatctccgtgtcagagagacctctaaaaacattattggacaaagagttattttgtgctttacttgtcagtgacatctgaccggaatgatcatgcctattgccaggaatactgatgctggtgtccacccagctttggttctgctttgatgacagtgatgccttaattgactccccatcaaacaaagggttcctgttaactacagcttgagcacctcgtgcatgttatgtcacccaaaatgcacctaacggtgcatctcctgcctttgagcttccatgcggtaaaaaaactattagattgctctcttggaggtggtggagggttccttctaggcatcacaggtgttcttttatgagcacctacacaagtaaaaaagatgatcagccaataaacatcatttggacagtgatgtccaaaaatacatcagtaaaatgacctcgttcatcgtttacacattgcttgctaagaacataaggaacataaacaaggccaaaatatttagatgctccttacagaacgctacatgcagattagagacatgacagaaaaaggtaagaatgataggttggtggcgatcttcatagaaatttcacaggaattagttcaatttcatatgaaaaaacacaggaacaggggggatcccgttttcaaaatagaccttaagggctagtttgggaaccacattttcagattttcccaagggaaattagttcattttcccttggaaaaatgaaaatcccttcgaaaaatgggggttcccaaattaaccctaaaaaggatatttcatgcattagcagaggacaggtgggaattgaggtatggcgtagacagtcaagcagaacaatgtagcatgatttatagcatagttagcaaatgaaacagcatattacagtaggtacggaagaaactcaaggtatggtaatggccccaccttgccaagaggcgagagctctgccgctggttatagtagggtgttagagtatgttagtagtaattatcaaaattgaaggccaggagaaataaacaaaaaatatttaaacaggataataaggaaacaactaacgaaagtacacacagaattcttgtcaaaacccactaacccatgaaaatgaacataatgcatagcattgaaccctgttgcattcatctatcaaagatgcaccaatttccatcgttccatgctgagttaaatatctattatggtttccatgttttgtggtctacaattacaaaaggtgattttagtttcatataggactgaaggagccatgttaccgttctgtacgaaaagaaatgctactgcattaaagcattattgcacacatcaaaagcgagttgcagccgtaagctgttctgattttctgatggccatcactttgcaggtacctcgtccctgcagatcttacagttggacaattcgtgtgtgttgttaggaagataatcaagctcagtgctgagaaggctatcttcatatttgtgaaaaacacccttccaccaacaggtctggaaagtcaatgcagaaacaacatgattctgactctaattttgcttcctataagaactcatggagaaacaggagtcctatatgagagcaatagacataatatagagtggagagagcaccttcctcccattcgaggccgagccaagcgaggtcggcgaggacggcctcctcggacttcctggtagagcgcttgaggtcggtgtccttgacttcctcatccaaatgttaaatactaatctgatcatcgtaaacatataaagacaattttacaattgcatgactacaggcaagggaacagctactacatcggaagaatgtggagaaacaacaagctggtatacattgacatctagttagaaagcaggcttcaaaatcattgcaatgtagttacaagcttgagaagttatcattattaagtcagaaagcaataacccatttaagaaatccatgcaatccctacatctgtgtagtctacatctaggaacaaaccataaaatttgtttatccttgttccatatacttggaggagtaaaactaacaggtgtgctacaaatttgtctgcaaaaccataagcatttgtgaacacaaaccccactactccatatctctttacatcaatatgggactgtttgttagtagtgctgcaagcattcatcaaaatgtgcatatataccaaccagatttatcacaattggacaatgtacctgtttagtagtgcctcaaattgacatcaggaacaggcaaaatagcttggaagtaatttgtacaagatggtagcagcgatgtaaccgaagttgtggttaatcagaccacgaaatcacaaatctacacaaccaaagctgagactgcaaagccctaga

SEQ ID NO: 76214 - DNA, 425 bp, Zea Mays
atcattgcaatggttgcaaccggttagtaaaattcaagggttaatcagagctcgaggcacaacagtcagttcgaatgttgttggccaatgacgactttctgttttggtatatgataggatattaagcacttgtctgacctagtaacagaaaagaccacctaacttgtgaacacgtaaatgttggataatattgagccacacctgaaataggaagttactaaattgtgctaggattcatgtattacatccatgccaatgaaatgaacaaagtagttacaagcttgagaagttatcattattaagtcagaaagcaataacccatttaagaaatccatgcaatccctacatctgtgtagtctacatctaggaacaaaccataaaatttgtttatccttgttccatatacttggaggagtaaaactaac

SEQ ID NO: 76215 - DNA, 642 bp, Zea Mays
gtcaagtgtcatggacgaacgagcgattgaaactgccagaccaaaatagtggagaaaacgctccaccaactataggctcctgtcagcctggtcaaaagctgcctcaatcaggtgccactccttcgcctacatttcctcccccttcgagccatcaaggatgaacatgggaaggtttccatggccactccagaagccgaaaggggaggcgttgacagcacacgcgaggaggagacaacaggaggtggcagcgacggagcccgaggcatgagtcatgacggacgccgcagctaccaccgccgtagcgcccaaagacagcaacagcggtggtagggaaacaaccgtcgaacccaccgtgggaggggcaccagcagtgatagctgtgtcacgggaaccacctcgaggtcaggcaagaactcctgtatctctggaacagggacgccgacagtatgctcccaacacttcccggacaatggaggtcgccgatgcacccacgtcagcagcagcggacgtcgaggctgcaggcaagacgaccgggacggccgagagagtcaccctggcagatgtatggcagatgtaggagggggaggatttgagaggccgatgcgcccccttcgccgcaagggcagcagccttcactgtctt

SEQ ID NO: 76216 - DNA, 509 bp, Zea Mays
ccgtattttactacgattcgtattcacactttgatctatgttcaagacttttgtactttgatatatgttcaagactatgtggatgtctcgtacatcatgatgtaatcaaattaatacattttacgttattatctgagcactgtgtgatgacgtccagttatgtaatcaatgtgtctataaaattctgattctggcacgtacatggttcgcattcagtttactttttaaaatcgggtgtgacactacctccaaccacccctgctctcgctgaaggtccaagttcacctcctccaagcgagcgtttgtcgcccgcagggaccatcggcgtcctcgacctgcaagctcgcctcgcgtagatctcaccgaagatgggcctctccccacgaagttgtctgacatcgttacacgccgcatcgcgccccgagtgaaggcatgttgcctcactctcgagacgctcggccttggcttgaagggtggagactggagagctggtggtccctcttctccca

SEQ ID NO: 76217 - DNA, 1367 bp, Zea Mays
cccacatcgcatcacagactttcttttctcttgttttttcctttttactttcccactcctctcgctgaatgactagcgttcagtgtcaaccgccgcctcctgtcctgaccaccaggcaccctgcactgcacgcccaagtttcctcttgttcccctgcccagactgcacgcctcctgtcctgaccatgcctctgaggccagttcatggctttgcgtctcttcttgtcatcttcgcctgccactgccatgggggaggaagcgagcagggagcggacgtggcggcagagcggctggagcgcgacgtgacgtcgcccctggccacggtcccggtggtggacccgacggcggcggcggcggcgacgacgacgcagtcgccggccaccggcgggagctggtgcgtggcgagccccagcgcgagcgcgacggcgctgcgggtggcgctggactacgcgtgcgggcagggcggcgcggactgctccgcgatccagcagggcgggagctgcttcagcccggacaccgtccgcgaccacgcgtcctacgccttcaacagctactaccagaagaaccccgtgcagaccagctgcgactttggcggcaccgccgccctcaccaccgcagacccaagcacttcgacgtgccagtatccatcaacgagcaccggcgcttcggtcctgaacacgtcgactccgctgacgccaacgaacgggtctccgcccggccccgggtacgggagctctccgccggccggatacgccaactctcctccgctgtacgggaacatgtcgccgccggactacggcgacaacatcagcgccgcagcgagggcgctgcccggccgcaagacgacggcgacggcggccgtcgcgtcgctggcgacgacgtgcctactgaccgcggcactgtcactgacggtgagcggctgaacctgcacacgcacgcaacaatagctccaagccgccgccgccgcacgttcaggtgccgaccgtgatgtcctggaaggccatgaaggtggagacgagacaaacatgtgccggtgcagcagagactacagaggatacgtgcgtgtacagtacaggcagtggcggatctggagagcaggatggtgatggagaccagtgacgccgtgtcactgtcagtcactctgtcagtagtgttgcctgccctttgtaatgtttagcaaatgtgtacagatagactcgtatacacggcgacggttatgatctttggtatcccctcggcccctccaactctaaactctatctcttaaattaaaaaaaaacaagccatgatttgagagcttttactggtgtaaaaattgcccttttacaagatagggatggacacttattaaatagtggtttgattttt

SEQ ID NO: 76218 - DNA, 1086 bp, Zea Mays
agccagctccaagctagctttgctttagcctcggtcttcgccattcttaatccagtgctccccaccacgccaatggaggctccgctcctcctaccaatctccaccgcctcatcctgcatcgagatcgccgagggcgccgtgccatcgggccctcgtgctcgctcgtcctcgtccatgccttcggcccagagcttcgtcctccgcgtggtgaccgtggtcgccgtggcgtgcgcgtccctgttcgcgcagcacgaggccggcaaaggcttcgccgtgtccgtcgcgaacgacctgccgcggggcagcgccgcggcgcggcgcttcgacctcctcctggtgtccaacgcgcgcgctgttcccggacccgtcgttcccgccccggcgcgcgtcaccgagtccatggttgactacctcgcctccgccgcggccgaggtcgaggtcgaggtcgaggcgcctccatcggctgccgggtgcggcatgtcggcgcggctcctgaggcttctggaggcgcggcgcgagggcttcgtggcaaggctgaaccgggcgatgagggaccggtggagcgacgccgctgtggacgcggcgctcggcgcgccggcccggctcgcctgccacgaccagaagaagggagcgacggcgctgaccggccgcggcaccaccacctctccacgtcggacgccggacgccgctcgtgggtccagcgtggcaacgtgaggctggaagcgaagggcagttctggtattggtgtcttagattgaaattaaaactggtcccgcgggtggtaggcgtgggccatggccgcggccctaatggtggctggaggtgagtgagtggtcgttgtcatgcatgtaaaaatggtagatggctgggactgggaggatgagggccccccggtggcttcatcatttggcttgagcatgagagcatccatccagatccatagtggattgtaaatgacaggtagtgctataaaaatatggttccattccatgccatagcaaacgcgatgtgagaaatagattttttgttttatctttgcctgtgacgtggatgaacgcggcggttgataatgatcgacgaagaaga

SEQ ID NO: 76219 - DNA, 339 bp, Zea Mays
ggagccggagcagttccggcatctgggagctctcgcggatggccatggcgccttgctcgtcaggaccgctcagctcgcgtcgccgaaggaggaagaggtgccgactgcgactaggtagtgtaggtgcacatgaagcagctgccttgtggctggctggaccgctggagtggctgggtgatgtgccgccgagctcgcgctcggcgcccgtctatatagaggtcagggaggacgtcaggtgtaagaaaggaggcggcatcgagaggaagatggtctgcgtctgcgtctattacgaaggtctgacgaatctgaacaacattgaccaacgcgagaattggatca

SEQ ID NO: 76220 - DNA, 1550 bp, Zea Mays
gtctagaggaggaatgattgttgtttgatttggcgagcagttcagggatcttgtcggcagcgcttactacgtcgccccagaggtgctcaagcggcgatacggagctgaggcagacatatggagtgccggagttatcctctacatcctgctatccggcgtccctcctttctgggccgagaacgaggatggcatatttgatgctgttttgcgaggtcatattgacttcgcatctgatccctggccttccatatcgaatagcgcaaaagatttggtcaagaagatgctgcgccaagaccccaaggagcggcttactgctgctgaaattttgaaccatccatggattagagaggatggagaggccccagacaagccactagacataacagtaataagcagaatgaagcagttccgggccatgaacaagcttaagaaggttgccttgaaggttgttgctgagaacttgtcagaggaagagatcgtgggcttgaaggaaatgttcaaatccctggatactgacaacagtgggacaataacgctggaagaattgagagctggtttaccaaagctcggcaccaaaatctctgaatcagaaataaggcagttgatggaagcagctgatgttgatgggaatggcaccattgattatgttgaatttatatcagcaacaatgcacatgaatagactagagaaggaggatcatatatttaaagcattcgagtattttgacaaggatcatagcgggtaatttcactccgaactccaccttttcgttacttttcacctttaacattaactttgtttgtcgcttgtacattcatgtacaggcacattacagttgatgagttggaagaagctttgaagaagtatgatatgggcgatgaggcaacagttaaagaaattattgctgaagtagacacagatcacgatgggagaatcaactaccaggagtttgttgccatgatgaagaataatagccccgagattgttccaaatcggaggcgcatgttttaaggctcatctcctacatttaattggaaaaaagaaagacttctaagatatatttttccgcggtcagaggggagagcaactgatactcgaaagtgggattcagcctgggcatatgtgcaatgatattacagactttggacaagtcatcagtcatgggtgattgcctttgtgttgcttccattttcgaccatctcatcctacgatctttccaagttatctttaatgaggtgtgtcgtgtggtctatgtttcctgcctctggatcttttatgtaagagaaacggacttgtaaaacagttccaaattatcatataccaggcgaaaagtaatgcgatgtgccttgtgatcctcttttttttcttttctctttggtcagcggatcatttaatgtcgatgctttctccaactgacaggagcaaatcgtaatcgcccactgcccccttttcaagaacggaacacatgactcctgtgtacatgccaaaacctcttggacagtgagcaggtttgaaacgagcccttccagaacaggaaaaaaaacaacaac

SEQ ID NO: 76221 - DNA, 1243 bp, Zea Mays
cgatttcagtcctactcgctatgcgagcagttcagggatcttgtcggcagcgcttactacgtcgccccagaggtgctcaagcggcgatacggagctgaggcagacatatggagtgccggagttatcctctacatcctgctatccggcgtccctcctttctgggccgagaacgaggatggcatatttgatgctgttttgcgaggtcatattgacttcgcatctgatccctggccttccatatcgaatagcgcaaaagatttggtcaagaagatgctgcgccaagaccccaaggagcggcttactgctgctgaaattttgaaccatccatggattagagaggatggagaggccccagacaagccactagacataacagtaataagcagaatgaagcagttccgggccatgaacaagcttaagaaggttgccttgaaggttgttgctgagaacttgtcagaggaagagatcgtgggcttgaaggaaatgttcaaatccctggatactgacaacagtgggacaataacgctggaagaattgagagctggtttaccaaagctcggcaccaaaatctctgaatcagaaataaggcagttgatggaagcagctgatgttgatgggaatggcaccattgattatgttgaatttatatcagcaacaatgcacatgaatagactagagaaggaggatcatatatttaaagcattcgagtattttgacaaggatcatagcgggcacattacagttgatgagttggaagaagctttgaagaagtatgatatgggcgatgaggcaacagttaaagaaattattgctgaagtagacacagatcacgatgggagaatcaactaccaggagtttgttgccatgatgaagaataatagccccgagattgttccaaatcggaggcgcatgttttaagaaagacttctaagatatatttttccgcggtcagaggggagagcaactgatactcgaaagtgggattcagcctgggcatatgtgcaatgatattacagactttggacaagtcatcagtcatgggtgattgcctttgtgttgcttccattttcgaccatctcatcctacgatctttccaagttatctttaatgaggagcaaatcgtaatcgcccactgcccccttttcaagaacggaacacatgactcctgtgtacatgccaaaacctcttggacagtgagcaggtttgaaacgagcccttccagaacaggaaaaaaaacaacaac

SEQ ID NO: 76222 - DNA, 2716 bp, Zea Mays
ggttaaacaactgttgtcttttgtgctatatcaagcacacaacgcatgtctattgtcccttccggaaactgaagctcagccccccaaaacctcaccgtcctcctgtggttcttgaaagtggcgagagatggatcgtgacgatgtggctggctttgtcagcggaggttgcaaacatttcttgcgggagacttctaatctaatataacccagcagcacagcacagtagatgacagtagcagtagtagggtttttggttcttttcgtttcgtctctggacatgtttcttgactggaatggacagggcctcctcctccctaagccttggatctggtggtaacgttgactcctcgaacgatccctgtcaccggcaggcagttcagtgcagatcgaggtactgccgtcggcacactactagtgtatcgtcccagcttctctggggacaagacaacccgagggctggtatggctggagttgaaggtcctggaaacccgctgctcacgcttggtctgggccggtcaccaagttcctctgagacgaacagcaaggtcagctcccccacagcctgcatgatgtctccatcttcagtgaaagaggctgacgaggagtcgtcgatggatcttggtctgagctttgatctctgtcttggtcatgacactgcacatcgtcacaagaagccatcggcaggtgctccgaagttggaccttcagttgagcctgtccacctgttcgcctgaatcagccttgaccaatgtaagtgccaatgatggcttagagacagtggcagatactactactactctggaaaagctagagccctggatcttcaggaattacatggcttcatcatcatcatatgcatatgcttctgaagcaacctacggcctttctttgccaaagatacctgaagatgtcgtggtcgtgccttcaacaacagacgtgtcatcagccgttacggtgagcgtgaaaagcccggctccgaaacggagcaatattagcacgaaatgctgccagttcccagggtgtgagaagggagcgagaggagcctctggttactgtatcgcccatggcggcggcaggcggtgccagaaacctggctgccagaagggagccgaggggaggaccatctactgcaaagcccacggtggcggcaggcggtgccagtacctgggctgcacgaagagcgccgaaggccgcaccgaccactgcatagcccacggcggcgggcggcgctgcagccaggacggctgctcgcgcgccgcgcgcgggaggtccggcctgtgcatcaagcacggcggcggcaagcggtgccagagggagagctgcaggaggagcgcggaggggcactcgggcctctgcatctcgcacggcggcgggaggcggtgccagttcccggagtgcgccaagggcgcccaggggagcacggggctgtgcaaggcgcacggcggcgggaagcgctgcacgttccccggatgcaccaggggagccgaaggcagcacctggctctgcaaggcgcacggcggagggaagcgctgcgcccaccagggcggcggcggcggcggcgcgtgccccaagagcgtccacggcgggacgcggtactgcgtcgcgcacggcggcgggaagcggtgcctggtcgcgggctgtaccaggagcgcgcgagggaggacggagcactgcgtccgccacggcggcggcaggcggtgcagggccgagggctgcgccaagagcgcgcaggggagcaccgacttctgcaaggctcatggcggagggaaacgctgcgtgtggggccaggagggctcgagcctcggggccggcgggccgccgtgcgataggttcgcgcggagcagggtcggtctctgtgcgggtcacggcgctctggtcgaggaccgctgcgtacacggtggcggctcgttgggccctgcccctgctatcgggcagctgacaaccgattgtgagcctgctgctgctgctgcaacgaggggcgatgctgatatggcggacggagacgaggaagcgttcctgacgctgggatggaacggcgacggtgagtctgctggcgccacggccccggccccgttcatggagggcagggtccatggcagcgggctgcttgctctgctcagctgctctggtaatggcggcgcctcggcggcttcgtcgactggcatgcgcacctggatgtgatgttgtaggttcgagtagtgacagtgtcttgtcgcaatgcctgaatccggcggcataaacggctgccccgtgtagcagaaataataaggggtagccagcaggggtcatagtgtgttattgctatcgttggtgaagtgtttatctgactgactgtgtgtattgcccgtgattgattgaaagtctgtcttatacattgtgaagtggtagccttgtttcgttcagtagacgcgcgagtaccaggaaatgtgggacaggcagccttgggatttgatgtggactcgccatggtccatgcatccatcacccatgaagtggtcgcgtgacatgacggacggacggacgcggtgagagcagtgtcccttcccggcggcggcggcatacgtagagctcagctgagtcgccggatgggatggatcctccacgacatgggtgaggtgtcttgtttaaaccaaataatgtggtgtgggtgaggtgtcttgtttaaaccaaataatgtggtgtatatcaaggaaacatgtgtcggtaagtaataggagc

SEQ ID NO: 76223 - DNA, 1655 bp, Zea Mays
tccagcccagcggtttgccgcgccaccccgcccccgcaggccgcagccgcttttttattataaaccgcctgcgctgcgccccctcctcgcgtgctcgatctttcccccctgcgctgcgcacaccaccaccagacgccccgccgccgccgccccccgtcgccccggcgctgcagccaggacggctgctcgcgcgccgcgcgcgggaggtccggcctgtgcatcaagcacggcggcggcaagcggtgccagagggagagctgcaggaggagcgcggaggggcactcgggcctctgcatctcgcacggcggcgggaggcggtgccagttcccggagtgcgccaagggcgcccaggggagcacggggctgtgcaaggcgcacggcggcgggaagcgctgcacgttccccggatgcaccaggggagccgaaggcagcacctggctctgcaaggcgcacggcggagggaagcgctgcgcccaccagggcggcggcggcggcggcgcgtgccccaagagcgtccacggcgggacgcggtactgcgtcgcgcacggcggcgggaagcggtgcctggtcgcgggctgtaccaggagcgcgcgagggaggacggagcactgcgtccgccacggcggcggcaggcggtgcagggccgagggctgcgccaagagcgcgcaggggagcaccgacttctgcaaggctcatggcggagggaaacgctgcgtgtggggccaggagggctcgagcctcggggccggcgggccgccgtgcgataggttcgcgcggagcagggtcggtctctgtgcgggtcacggcgctctggtcgaggaccgctgcgtacacggtggcggctcgttgggccctgcccctgctatcgggcagctgacaaccgattgtgagcctgctgctgctgctgcaacgaggggcgatgctgatatggcggacggagacgaggaagcgttcctgacgctgggatggaacggcgacggtgagtctgctggcgccacggccccggccccgttcatggagggcagggtccatggcagcgggctgcttgctctgctcagctgctctggtaatggcggcgcctcggcggcttcgtcgactggcatgcgcacctggatgtgatgttgtaggttcgagtagtgacagtgtcttgtcgcaatgcctgaatccggcggcataaacggctgccccgtgtagcagaaataataaggggtagccagcaggggtcatagtgtgttattgctatcgttggtgaagtgtttatctgactgactgtgtgtattgcccgtgattgattgaaagtctgtcttatacattgtgaagtggtagccttgtttcgttcagtagacgcgcgagtaccaggaaatgtgggacaggcagccttgggatttgatgtggactcgccatggtccatgcatccatcacccatgaagtggtcgcgtgacatgacggacggacggacgcggtgagagcagtgtcccttcccggcggcggcggcatacgtagagctcagctgagtcgccggatgggatggatcctccacgacatgggtgaggtgtcttgtttaaaccaaataatgtggtgtgggtgaggtgtcttgtttaaaccaaataatgtggtgtatatcaaggaaacatgtgtcggtaagtaataggagc

SEQ ID NO: 76224 - DNA, 1729 bp, Zea Mays
gcctggctcgtccgtcctacgcacgcctccaccatcaagatcgagctgagcctcccttagcttctctctctctccgccatgctcaaacacgaggaaagctagcttaccagcttaattagctatcttcgtcttcctccagtccccggccggcccgccctccttgttcgctacttctctcgtgaccctgtgcaaaccatatactatactatataagtgcagaacatgcatggtgatcagtgactgatcgctgctgagttctggagagctttacagtgcttcttgtttatttagctgctgcgcgctgcctgctccggccggccggccatgcacacgcaccgcctgtgagcctgcctagctgccgacctgcatgtgtccgtcgtgattcatcaaagcaccaccaaatacgctgctgctccacccgcctgatcatggacaaagagcagcaggagagtcacctcgacagcttcgcgccgctggacggcgccgcggcgccggaggaccagcagcaccagcccgcctgcggcggggggcccgagatggtcgactacatgcttggccgccaccacgtgaacgcgcacgcgccgccgtcgccgacgcagagccaagcggtgtcgttcgacaagctcagcttctccgacgtgctgcagtttgccgacttcggccccaagctcgcgctcaaccatccggtggccgcgtccgtcggcggcggcgaggacgcggacgcggacgacgacgacgacgggtacttcttcaggttccagtcgctgccccagcgccatgcggaccgtgaggcggcgggaagcaagacgacggccgaggacggtggaggaaccggcgtcgtcgtctccgagggcaccacgctggtgcagcagcaggccgatcacggccgggcggacaaagccggggaccaggggaagagcggccgccggaagcgcccgcggaccgtgaagaccagcgaggaggtggagagccagcggatgacgcacatcgccgtcgagcgcaaccgccggcgccagatgaacgagtacctcaggatcctcaggtcactcatgccaggatcctacgtccagaggggagaccaggcatccatcataggaggcgccatcgagttcataagagagctagagcagctgatccagtgcctggagtcgcagaagcggcggcgcctgtacggcgggtccggggacgcgccacggccgccggtggtggacgcggcagcgggctccggcggcgcgctaataacgtcctccactcagccgctggcgctgcagccgccgcacctgttccctccgaccccgagccaccctttcccggtggcgggcgccgacgccaagatcacgctggacctggaggcggcggggggcgccgtggtcgacgacgccggcggcgggctccgggaggaggtggcggagaacaagtcgtgcctggcggacatcgaggtgcgcgcgctgggcgccgatgccatgatcaagatcctatcccggcgccggccaggccagctgatcaagaccatcgccgccctggaggacatgcagatgtccatcctgcacaccaacatcaccaccatcgagcagaccgtcctctactccttcaacgtaaaaatcgtcggcgaggcaaggtactcggcggaggacatcgccggcgccgtgcaccagatcctcagcttcatcgacgtcaactacagcctaaccttgacgttcaacgggttgacgaaccgaggcgtcttgaa

SEQ ID NO: 76225 - DNA, 455 bp, Zea Mays
gcggagatgttgtttgtcagcacagcagagcaggaaggaatgctcagctcaggtggtattgtatttatttaccttaccttacctagatcgatcccgtcggtgttgggggagtcgtgcggcgccaacacagtcaggtttgctatcactacgttgctgcagtaaaccgggtggatgttccagaacggcgagtcctggaagacgaggttggagacgacgacgtcggtggagtacatgagctccagcaggtgcggcctcgtgaagggcagcgtgcgcttcttccacatgtcccaccacacgccgccttggccgtcgatggtgccgttctcacctgtgatgaagacgtcctgcagaccgtggccgtggatcaagctcatgtatctcccgccaggcagctcgcgccctctcccgtacgacggcagcgggtcgatgagcggccagctcgacgtgtcctgggt

SEQ ID NO: 76226 - DNA, 271 bp, Zea Mays
cttgcaatggctgctggtaaaaatagattatcctctgccaacagcagaattcaacagtgacagctgaatcgcagaagagtttgccaaagaaacaaagggccctgtaggtgatgaacaaaatggagaaatgctgacgtctttattgctgctataggaggcggaaaaactgattcaggtacagaaacctgtcccggacgtactagccagctccgcacatggcgacggttgcacgtcgagtgcgctgccactgacggctcggcatctccacggc

SEQ ID NO: 76227 - DNA, 1049 bp, Zea Mays
taacacacttacacaccgatcgcgaaactgcttcctagcttcgttccggttccggagcgccagagagagaaagaaagggaaaagaagcgcctttgcccaccgcgcgatcgatcgatccggggtccggcggcctgccatggtgaagctggcgacggccagggaggccgccaggagacgggcgctgcccaccgagctccggtgatcatcgcccgcgccaggcgccacccatcatttcccgtgccgtaaaatgaggggaaaagggtagataaataaattgtttcagcgccacccttttgggccgttgcttgggctcaatggaggcccgaagccccggattgtagggcccattagctgctggagcttatcgcattccatttcctatgtccgagtcccttgcggctcctttggaaggaaaaggaatgagagaattaagagatggattgaagagggttggaaggattaaatttctttatattcaaatttgactagaatgggtttaatctaccctaatctttcttaatctatctctaactgaacaaatttagggttagaatcccttactatttaaaattgaatattaaaattaaatagtaagagattctagccccctcaatccgtaggtcggattgaggtcgtttctcagtataggtttctcagtatagcttagcagaagtgtcacatcctgatttaagggctaaacccgtgctgggctaaacccgagcacgaatcaaatgtgtgctaagatcaagttttacatatatggactcatgatacagaaacgaatgtcacatctttactatataataagagttatgtacaaaatagctatataattacattatacgaagacgacgatccaacagccatagttgactgggagacaacgatctagacctctcatgaacgaatcgcgacatccttaatgctccttatcctgtggtacctgttcctgacctaggggatgtgagtacagcaagtgtgagcagtgagctcacatacgttcatcgctcaacaagttgtggaaataatatgcatgatctcacagtggg

SEQ ID NO: 76228 - DNA, 955 bp, Zea Mays
tctacactaaccacaccaagaacttggagggtaggtggtgtacttgcaatgtctcgggcatttggcaaccgtctcttaaaacaatttgttattgcagaccctgagattcaggaacaagaaataaatgatgagttggagtttctaattatagctagtgatgggctgtgggatgtggttccgaatgaggacgctgtttcacttgtgaagatggaggaggatcctgaggcagcagcccggaagctgacagagactgcgttctcccgtgggagcggcgataacatcacctgcatcgttgtgaagttcgagcatgacaagcctggtggcggcggctactcgcctccaggcgacaagagttgattccatttgctgttggttatacgctttgccggtgtcccttttaccctgggccggattttgctggccccatccatggtgccccccgcggctggtacttgaggaaggagctggttcatgttcgtcgcctgtcttgtctatatttatgccactaattttggtctccggtcagtggggttaccggcgggcagtgcttgcccatttgcatgtttatcgtgggttcatcgtcctatacggcattgttgtagacttgtagttgctgttgcctgttgtatcaatgagagctaattctgtgaggcgcagggggatgggtgcactttgagatgttcccggaccgatctccttgcaaacacctccgctgcactgtatgtttctgttatatacagatcattgtccttgcacggccgtcagccaaggacgaatggccagtgaaaatgtggtggtgctcactgcccaaaagcctctctcaaggcagagggctttgcagtgtggccaaggtctgcagctggagaggatgctgagttgcaggctacagcgttggagtaatagtgggcacatggttcactaacctactgatttcatgagtagggatcgatgggca

SEQ ID NO: 76229 - DNA, 1452 bp, Zea Mays
ggcggttcttctttctcctcgtctctcttcaccctcgcgtgggtaggagcgccagcggcttcgtccgatctctcacctcacttcagtcttcagccacgcacactccctccttccctccccgatcactactctccctctccagttcacacccaccgccccacctctcccactcaaatccagggccatcgcagatccaccgcctccccgatccggtcgcctacccagccgcccgatcggatcctgcaggtcatggcggttcacgtgctgctgagtatttgaaggagcatttgtttgagaacctcatgaaacatccagagttcatgacaaacacaaaattagcaataaatgaaacatataggaagaccgattcagagttcttggatgctgaaaggaattctcatagagatgatgggtcaacagcatcaacagcagtgctagttggtgaccatctttacgtggcaaatgttggagactcaagggctgttatatcaaaggctggcaaagctattgcgctctctgaagatcacaagccgaacagaagtgatgagaggaaacgaatcgagagtgctggtggaatagttatgtgggctggaacttggagggtaggtggtgtacttgcaatgtctcgggcatttggcaaccgtctcttaaaacaatttgttattgcagaccctgagattcaggacgctgtttcacttgtgaagatggaggaggatcctgaggcagcagcccggaagctgacagagactgcgttctcccgtgggagcggcgataacatcacctgcatcgttgtgaagttcgagcatgacaagcctggtggcggcggctactcgcctccaggcgacaagagttgattccatttgctgttggttatacgctttgccggtgtcccttttaccctgggccggattttgctggccccatccatggtgccccccgcggctggtacttgaggaaggagctggttcatgttcgtcgcctgtcttgtctatatttatgccactaattttggtctccggtcagtggggttaccggcgggcagtgcttgcccatttgcatgtttatcgtgggttcatcgtcctatacggcattgttgtagacttgtagttgctgttgcctgttgtatcaatgagagctaattctgtgaggcgcagggggatgggtgcactttgagatgttcccggaccgatctccttgcaaacacctccgctgcactgtatgtttctgttatatacagatcattgtccttgcacggccgtcagccaaggacgaatggccagtgaaaatgtggtggtgctcactgcccaaaagcctctctcaaggcagagggctttgcagtgtggccaaggtctgcagctggagaggatgctgagttgcaggctacagcgttggagtaatagtgggcacatggttcactaacctactgatttcatgagtagggatcgatgggca

SEQ ID NO: 76230 - DNA, 1527 bp, Zea Mays
ggcggttcttctttctcctcgtctctcttcaccctcgcgtgggtaggagcgccagcggcttcgtccgatctctcacctcacttcagtcttcagccacgcacactccctccttccctccccgatcactactctccctctccagttcacacccaccgccccacctctcccactcaaatccagggccatcgcagatccaccgcctccccgatccggtcgcctacccagccgcccgatcggatcctgcaggtcatggcggttcacgtgctgctgagtatttgaaggagcatttgtttgagaacctcatgaaacatccagagttcatgacaaacacaaaattagcaataaatgaaacatataggaagaccgattcagagttcttggatgctgaaaggaattctcatagagatgatgggtcaacagcatcaacagcagtgctagttggtgaccatctttacgtggcaaatgttggagactcaagggctgttatatcaaaggctggcaaagctattgcgctctctgaagatcacaagccgaacagaagtgatgagaggaaacgaatcgagagtgctggtggaatagttatgtgggctggaacttggagggtaggtggtgtacttgcaatgtctcgggcatttggcaaccgtctcttaaaacaatttgttattgcagaccctgagattcaggaacaagaaataaatgatgagttggagtttctaattatagctagtgatgggctgtgggatgtggttccgaatgaggacgctgtttcacttgtgaagatggaggaggatcctgaggcagcagcccggaagctgacagagactgcgttctcccgtgggagcggcgataacatcacctgcatcgttgtgaagttcgagcatgacaagcctggtggcggcggctactcgcctccaggcgacaagagttgattccatttgctgttggttatacgctttgccggtgtcccttttaccctgggccggattttgctggccccatccatggtgccccccgcggctggtacttgaggaaggagctggttcatgttcgtcgcctgtcttgtctatatttatgccactaattttggtctccggtcagtggggttaccggcgggcagtgcttgcccatttgcatgtttatcgtgggttcatcgtcctatacggcattgttgtagacttgtagttgctgttgcctgttgtatcaatgagagctaattctgtgaggcgcagggggatgggtgcactttgagatgttcccggaccgatctccttgcaaacacctccgctgcactgtatgtttctgttatatacagatcattgtccttgcacggccgtcagccaaggacgaatggccagtgaaaatgtggtggtgctcactgcccaaaagcctctctcaaggcagagggctttgcagtgtggccaaggtctgcagctggagaggatgctgagttgcaggctacagcgttggagtaatagtgggcacatggttcactaacctactgatttcatgagtagggatcgatgggca

SEQ ID NO: 76231 - DNA, 2260 bp, Zea Mays
gtgggcggttcttctttctcctcgtctctcttcaccctcgcgtgggtaggagcgccagcggcttcgtccgatctctcacctcacttcagtcttcagccacgcacactccctccttccctccccgatcactactctccctctccagttcacacccaccgccccacctctcccactcaaatccagggccatcgcagatccaccgcctccccgatccggtcgcctacccagccgcccgatcggatcctgcagggtttgtgcccgccgtgagttagatggtttacgatggtgccgtgaaggaccaggaccaggagagcgcagcggcgagcactgcgttggcggcatcggtggtggcggcgtctcccgagcaggtggtggtggggagcacgagggtctcggcgaggccgccgcaagacaagcgcctcggcgtgcgccaccccttgaagcaccgctggttccgtgcccggggtaaggtgatggtggagctcggaggggtgccgcccgctcacgccgtgccggaaggcgaggaggaggaagaggaggaggagggagtcagcgagagcgaggtggaagaggagttagtggaggtagaggtggagcaagcctcgtcagcggggacgggaatgcggggcgttgaagtggaggtgttatccgcgccagcaacaggggtgcaggagatggacgtggaggtcggtgaaatggaggtgtcgcctgagcccgcggtcgctgtggggggcaccgagctggagccccagccggacgacgaggacgaggtctcatccgtcaccttggcgcgaggggagaggaagcaggaggccgctcctgctcctgcttcctctgccgtgctagctgtggaggcgcccagggagaaggatcaggatggggagagggtggagaaggagaagagggacaaggagagggaaatgcagaaggagcgggagagggtggatgaggtcggctacatgagcggaggatggaagaggtcatggcggttcacgtgctgctgagtatttgaaggagcatttgtttgagaacctcatgaaacatccagagttcatgacaaacacaaaattagcaataaatgaaacatataggaagaccgattcagagttcttggatgctgaaaggaattctcatagagatgatgggtcaacagcatcaacagcagtgctagttggtgaccatctttacgtggcaaatgttggagactcaagggctgttatatcaaaggctggcaaagctattgcgctctctgaagatcacaagccgaacagaagtgatgagaggaaacgaatcgagagtgctggtggaatagttatgtgggctggaacttggagggtaggtggtgtacttgcaatgtctcgggcatttggcaaccgtctcttaaaacaatttgttattgcagaccctgagattcaggaacaagaaataaatgatgagttggagtttctaattatagctagtgatgggctgtgggatgtggttccgaatgaggacgctgtttcacttgtgaagatggaggaggatcctgaggcagcagcccggaagctgacagagactgcgttctcccgtgggagcggcgataacatcacctgcatcgttgtgaagttcgagcatgacaagcctggtggcggcggctactcgcctccaggcgacaagagttgattccatttgctgttggttatacgctttgccggtgtcccttttaccctgggccggattttgctggccccatccatggtgccccccgcggctggtacttgaggaaggagctggttcatgttcgtcgcctgtcttgtctatatttatgccactaattttggtctccggtcagtggggttaccggcgggcagtgcttgcccatttgcatgtttatcgtgggttcatcgtcctatacggcattgttgtagacttgtagttgctgttgcctgttgtatcaatgagagctaattctgtgaggcgcagggggatgggtgcactttgagatgttcccggaccgatctccttgcaaacacctccgctgcactgtatgtttctgttatatacagatcattgtccttgcacggccgtcagccaaggacgaatggccagtgaaaatgtggtggtgctcactgcccaaaagcctctctcaaggcagagggctttgcagtgtggccaaggtctgcagctggagaggatgctgagttgcaggctacagcgttggagtaatagtgggcacatggttcactaacctactgatttcatgagtagggatcgatgggca

SEQ ID NO: 76232 - DNA, 531 bp, Zea Mays
tatataagggaggaaggtgagagtgtggatggacgctgaatttgtggatattcaagttttagaggaaaaatggcaagcatggaagatttctatgatttaaaatcatctaaaattgatgataacaaatacatctctttggaatttttgatgatagagattttgttcttctagacttccttttgtgtctcagtgcatatatctaaagcatttatattctcgcaggtcatggcggttcacgtgctgctgagtatttgaaggagcatttgtttgagaacctcatgaaacatccagagttcatgacaaacacaaaattagcaataaatgaaacatataggaagaccgattcagagttcttggatgctgaaaggaattctcatagagatgatgggtcaacagcatcaacagcagtgctagttggtgaccatctttacgtggcaaatgttggagactcaagggctgttatatcaaaggctggcaaagctttcggtttctaagtgaattgcatgttggacatgtatcaagttattgcac

SEQ ID NO: 76233 - DNA, 1470 bp, Zea Mays
cgagtgtgaggaggccgtccgcctcgatccggccagcggccgcgcgcacggccgcctcgccggcttatgcctcaggcttgggatggttgagaaggcaaagacgcacttcacactggctggaagtgcaaaccagtctgatccggctgagtggcagaagctgcatgaggtagagatccatcaaggcagatgcatggatgcaaggaaaattggagactggaagagtgcactcagggaagccgacgcagccatcgctgttggagcggactcctctcgattgcttcttgccttgaggtcagaagcgttgctttggttgcacaaattagaggaagctgatttgactattacaagcttgttgaaactggatgacgcgtcgttgccttcgacgccaaccagagtctcaggcatgtcagctgactcttatgtccatatcgtccaagccaaggtcaacgtgacatttggaaggttcgattcagctgtcgcactggctgagaaggctaagcttattgatggcgtgagctcagaggttgaagtgatcctaaacaacgtgagattagtcgcattggctcgagcccgggggaatgacctttttaaggcagcttgctggtcaaagctgggtcggtgggcaaaagctgttgaggactgcagcgaggccctaagagtccagcctaactacacaaaggctctgctaaggcgtgcggcgtcatatgcaaagcttgagcgctgggcggactgtgtgcgggactacgaggtgcttcgcaaggatcttcctggtgacactgaggttgcagagtccttgttccatgcccaagttgcattaaagacagcccgtggagaggtggtatctaatatgaagtttggaggggtagttgaagaaattatcagcttagagcaactccaagatgttatccgttcacctggtgtatccgttctttacttcatggctacaatgaacaagcaatgtgcacaaattaccccgtctgtggactccctttgctccgagtgccctgcattgaatttcctgaaggtaaacgttgacgagcgccctctggtagcaagcgcggagaacgtgcgagtagtcccaagcttcaagatttacaaggacggcacgagagtgaaggagatggtctgccctagcttgcaggtcttgcgctattccgtgaggcactatgctgtctccagctcttgaggtccggcactcagttcgctggccctgttagtgtcaccacatgccaacatttcaccaacaaatctgtccctctatagtatcacagcatttcccccttcccatcgcgtcacttaggctcctcctaccgcaacatctctagaaccatttgatccaagcttaagcaattctcatgcctcgctttccaaagtgatgacttcaactcctgaagaaaggctccctgtggtggtgttcagggaatagctgtttacgtgcatctgttcgatctatggcttctcggcgctctc

SEQ ID NO: 76234 - DNA, 1943 bp, Zea Mays
cgactcccgcgaggaccagcggtgacgcggccccgctgctccacggccacggcagcaattcctcgaggtcgaggtccccggcgagctgccctgcgccagcgccgccggccaccagcggtggcctgcaggagattactcgcgcggggaacgagtggtacaagaagggccgccacgccgacgcgctgcgccactacgaccgtgccgtggcgctgtgccccgacagcgccgcgtgccgcggcaaccgcgccgccgcgctcatcgggctcgggcgcctagcagaagcgttccgcgagtgtgaggaggccgtccgcctcgatccggccagcggccgcgcgcacggccgcctcgccggcttatgcctcaggcttgggatggttgagaaggcaaagacgcacttcacactggctggaagtgcaaaccagtctgatccggctgagtggcagaagctgcatgaggtagagatccatcaaggcagatgcatggatgcaaggaaaattggagactggaagagtgcactcagggaagccgacgcagccatcgctgttggagcggactcctctcgattgcttcttgccttgaggtcagaagcgttgctttggttgcacaaattagaggaagctgatttgactattacaagcttgttgaaactggatgacgcgtcgttgccttcgacgccaaccagagtctcaggcatgtcagctgactcttatgtccatatcgtccaagccaaggtcaacgtgacatttggaaggttcgattcagctgtcgcactggctgagaaggctaagcttattgatggcgtgagctcagaggttgaagtgatcctaaacaacgtgagattagtcgcattggctcgagcccgggggaatgacctttttaaggcagcttgctggtcaaagctgggtcggtgggcaaaagctgttgaggactgcagcgaggccctaagagtccagcctaactacacaaaggctctgctaaggcgtgcggcgtcatatgcaaagcttgagcgctgggcggactgtgtgcgggactacgaggtgcttcgcaaggatcttcctggtgacactgaggttgcagagtccttgttccatgcccaagttgcattaaagacagcccgtggagaggtggtatctaatatgaagtttggaggggtagttgaagaaattatcagcttagagcaactccaagatgttatccgttcacctggtgagtttctcctctacatgcacctagcctgttgtaggcatttcacctccttcttggttcttgttgtgctaagaagtggacagttaaccaggtgtatccgttctttacttcatggctacaatgaacaagcaatgtgcacaaattaccccgtctgtggactccctttgctccgagtgccctgcattgaatttcctgaaggtaaacgttgacgagcgccctctggtagcaagcgcggagaacgtgcgagtagtcccaagcttcaagatttacaaggacggcacgagagtgaaggagatggtctgccctagcttgcaggtcttgcgctattccgtgaggcactatgctgtctccagctcttgaggtccggcactcagttcgctggccctgttagtgtcaccacatgccaacatttcaccaacaaatctgtccctctatagtatcacagcatttcccccttcccatcgcgtcacttaggctcctcctaccgcaacatctctagaaccatttgatccaagcttaagcaattctcatgcctcgctttccaaagtgatgacttcaactcctgaagaaaggctccctgtggtggtgttcagggaataggaacatggaacattgagacgtatgtcaacccaataaattggatattgaagaatggctggatatagatgaaccagctgatatttatgttcttagctgtttacgtgcatctgttcgatctatggcttctcggcgctctc

SEQ ID NO: 76235 - DNA, 2442 bp, Zea Mays
ctcccttgtatgcctgcctctgccagcgcgttgtcggcgaggggactgcccccgccgccgccgctcgcgtcggctgccgtcagcccgtcacccacccacgcgacctccggtgatggcagaggccgacctcacgctgcacgacgccggcggcggcgccagggacaagccggaccggaaagccgacgtcttcgcggatcttggctcgccggtctcgccgctgcgcctgcgcccggcagcgacgccctccacctcgtcctcctcgtccggctccgccaagtcgccggcgcccggtaatgcggccgcggggaggggaggccgggggaaccactcgggcgagctggcgcaggagagcaccaacccgcctggccaccgtcgcgccggatctggcccgctcattttctccggtgccagcagcagcaccaccgccagctcgccgctcaccaatgcgctccccaccggcaacatctgccgcgtcgccggggcggcggcggcggcagcagccacgcagccgccgcgcgctcgcccggccgtgctcggatccggtaccggccactacggccacggcagcatcatgcgccgcggcgggggagcgactcccgcgaggaccagcggtgacgcggccccgctgctccacggccacggcagcaattcctcgaggtcgaggtccccggcgagctgccctgcgccagcgccgccggccaccagcggtggcctgcaggagattactcgcgcggggaacgagtggtacaagaagggccgccacgccgacgcgctgcgccactacgaccgtgccgtggcgctgtgccccgacagcgccgcgtgccgcggcaaccgcgccgccgcgctcatcgggctcgggcgcctagcagaagcgttccgcgagtgtgaggaggccgtccgcctcgatccggccagcggccgcgcgcacggccgcctcgccggcttatgcctcaggcttgggatggttgagaaggcaaagacgcacttcacactggctggaagtgcaaaccagtctgatccggctgagtggcagaagctgcatgaggtagagatccatcaaggcagatgcatggatgcaaggaaaattggagactggaagagtgcactcagggaagccgacgcagccatcgctgttggagcggactcctctcgattgcttcttgccttgaggtcagaagcgttgctttggttgcacaaattagaggaagctgatttgactattacaagcttgttgaaactggatgacgcgtcgttgccttcgacgccaaccagagtctcaggcatgtcagctgactcttatgtccatatcgtccaagccaaggtcaacgtgacatttggaaggttcgattcagctgtcgcactggctgagaaggctaagcttattgatggcgtgagctcagaggttgaagtgatcctaaacaacgtgagattagtcgcattggctcgagcccgggggaatgacctttttaaggcagcttgctggtcaaagctgggtcggtgggcaaaagctgttgaggactgcagcgaggccctaagagtccagcctaactacacaaaggctctgctaaggcgtgcggcgtcatatgcaaagcttgagcgctgggcggactgtgtgcgggactacgaggtgcttcgcaaggatcttcctggtgacactgaggttgcagagtccttgttccatgcccaagttgcattaaagacagcccgtggagaggtggtatctaatatgaagtttggaggggtagttgaagaaattatcagcttagagcaactccaagatgttatccgttcacctggtgtatccgttctttacttcatggctacaatgaacaagcaatgtgcacaaattaccccgtctgtggactccctttgctccgagtgccctgcattgaatttcctgaaggtaaacgttgacgagcgccctctggtagcaagcgcggagaacgtgcgagtagtcccaagcttcaagatttacaaggacggcacgagagtgaaggagatggtctgccctagcttgcaggtcttgcgctattccgtgaggcactatgctgtctccagctcttgaggtccggcactcagttcgctggccctgttagtgtcaccacatgccaacatttcaccaacaaatctgtccctctatagtatcacagcatttcccccttcccatcgcgtcacttaggctcctcctaccgcaacatctctagaaccatttgatccaagcttaagcaattctcatgcctcgctttccaaagtgatgacttcaactcctgaagaaaggctccctgtggtggtgttcagggaataggaacatggaacattgagacgtatgtcaacccaataaattggatattgaagaatggctggatatagatgaaccagctgatatttatgttcttagctgtttacgtgcatctgttcgatctatggcttctcggcgctctc

SEQ ID NO: 76236 - DNA, 866 bp, Zea Mays
cttatgtccatatcgtccaagccaaggtcaacgtgacatttggaaggttcgattcagctgtcgcactggctgagaaggctaagcttattgatggcgtgagctcagaggttgaagtgatcctaaacaacgtgagattagtcgcattggctcgagcccgggggaatgacctttttaaggcaggcaagtttgctgaggcgtcgctagcctatggtgaagggctgaaatatgagccttctaatccagtgctatactgcaaccgggcagcttgctggtcaaagctgggtcggtgggcaaaagctgttgaggactgcagcgaggccctaagagtccagcctaactacacaaaggctctgctaaggcgtgcggcgtcatatgcaaagcttgagcgctgggcggactgtgtgcgggactacgaggtgcttcgcaaggatcttcctggtgacactgaggttgcagagtccttgttccatgcccaagttgcattaaagacagcccgtggagaggtggtatctaatatgaagtttggaggggtagttgaagaaattatcagcttagagcaactccaagatgttatccgttcacctggtgtatccgttctttacttcatggctacaatgaacaagcaatgtgcacaaattaccccgtctgtggactccctttgctccgagtgccctgcattgaatttcctgaaggtaaacgttgacgagcgccctctggtagcaagcgcggagaacgtgcgagtagtcccaagcttcaagatttacaaggacggcacgagagtgaaggagatggtctgccctagcttgcaggtcttgcgctattccgtgaggcactatgctgtctccagctcttgaggaacatggaac

SEQ ID NO: 76237 - DNA, 1629 bp, Zea Mays
cgagtgtgaggaggccgtccgcctcgatccggccagcggccgcgcgcacggccgcctcgccggcttatgcctcaggcttgggatggttgagaaggcaaagacgcacttcacactggctggaagtgcaaaccagtctgatccggctgagtggcagaagctgcatgaggtagagatccatcaaggcagatgcatggatgcaaggaaaattggagactggaagagtgcactcagggaagccgacgcagccatcgctgttggagcggactcctctcgattgcttcttgccttgaggtcagaagcgttgctttggttgcacaaattagaggaagctgatttgactattacaagcttgttgaaactggatgacgcgtcgttgccttcgacgccaaccagagtctcaggcatgtcagctgactcttatgtccatatcgtccaagccaaggtcaacgtgacatttggaaggttcgattcagctgtcgcactggctgagaaggctaagcttattgatggcgtgagctcagaggttgaagtgatcctaaacaacgtgagattagtcgcattggctcgagcccgggggaatgacctttttaaggcagcttgctggtcaaagctgggtcggtgggcaaaagctgttgaggactgcagcgaggccctaagagtccagcctaactacacaaaggctctgctaaggcgtgcggcgtcatatgcaaagcttgagcgctgggcggactgtgtgcgggactacgaggtgcttcgcaaggatcttcctggtgacactgaggttgcagagtccttgttccatgcccaagttgcattaaagacagcccgtggagaggtggtatctaatatgaagtttggaggggtagttgaagaaattatcagcttagagcaactccaagatgttatccgttcacctggtgtatccgttctttacttcatggctacaatgaacaagcaatgtgcacaaattaccccgtctgtggactccctttgctccgagtgccctgcattgaatttcctgaaggtaaacgttgacgagcgccctctggtagcaagcgcggagaacgtgcgagtagtcccaagcttcaagatttacaaggacggcacgagagtgaaggagatggtctgccctagcttgcaggtcttgcgctattccgtgaggcactatgctgtctccagctcttgaggtccggcactcagttcgctggccctgttagtgtcaccacatgccaacatttcaccaacaaatctgtccctctatagtatcacagcatttcccccttcccatcgcgtcacttaggctcctcctaccgcaacatctctagaaccatttgatccaagcttaagcaattctcatgcctcgctttccaaagtgatgacttcaactcctgaagaaaggctccctgtggtggtgttcagggaataggataacatgacgtgctccacctcgtagacggacctgtgccactactcatcgtcagcacgccatgacagccgcagcaacaaggtcacctcctctcggaacggtggccggttcctcgcctcccgccacaggaaaatatcactctcagatttcttcatctatgggtcggcgcaatccaagagtgacacacaccagcaatgaatggc

SEQ ID NO: 76238 - DNA, 1585 bp, Zea Mays
cgagtgtgaggaggccgtccgcctcgatccggccagcggccgcgcgcacggccgcctcgccggcttatgcctcaggcttgggatggttgagaaggcaaagacgcacttcacactggctggaagtgcaaaccagtctgatccggctgagtggcagaagctgcatgaggtagagatccatcaaggcagatgcatggatgcaaggaaaattggagactggaagagtgcactcagggaagccgacgcagccatcgctgttggagcggactcctctcgattgcttcttgccttgaggtcagaagcgttgctttggttgcacaaattagaggaagctgatttgactattacaagcttgttgaaactggatgacgcgtcgttgccttcgacgccaaccagagtctcaggcatgtcagctgactcttatgtccatatcgtccaagccaaggtcaacgtgacatttggaaggttcgattcagctgtcgcactggctgagaaggctaagcttattgatggcgtgagctcagaggttgaagtgatcctaaacaacgtgagattagtcgcattggctcgagcccgggggaatgacctttttaaggcagcttgctggtcaaagctgggtcggtgggcaaaagctgttgaggactgcagcgaggccctaagagtccagcctaactacacaaaggctctgctaaggcgtgcggcgtcatatgcaaagcttgagcgctgggcggactgtgtgcgggactacgaggtgcttcgcaaggatcttcctggtgacactgaggttgcagagtccttgttccatgcccaagttgcattaaagacagcccgtggagaggtggtatctaatatgaagtttggaggggtagttgaagaaattatcagcttagagcaactccaagatgttatccgttcacctggtgagtttctcctctacatgcacctagcctgttgtaggcatttcacctccttcttggttcttgttgtgctaagaagtggacagttaaccaggtgtatccgttctttacttcatggctacaatgaacaagcaatgtgcacaaattaccccgtctgtggactccctttgctccgagtgccctgcattgaatttcctgaaggtaaacgttgacgagcgccctctggtagcaagcgcggagaacgtgcgagtagtcccaagcttcaagatttacaaggacggcacgagagtgaaggagatggtctgccctagcttgcaggtcttgcgctattccgtgaggcactatgctgtctccagctcttgaggtccggcactcagttcgctggccctgttagtgtcaccacatgccaacatttcaccaacaaatctgtccctctatagtatcacagcatttcccccttcccatcgcgtcacttaggctcctcctaccgcaacatctctagaaccatttgatccaagcttaagcaattctcatgcctcgctttccaaagtgatgacttcaactcctgaagaaaggctccctgtggtggtgttcagggaataggttcttcaactgcaaaaggcatccagccactcattcggcctccgtcgaatcttgctacgggaaccgca

SEQ ID NO: 76239 - DNA, 1633 bp, Zea Mays
gcggcaaccgcgccgccgcgctcatcgggctcgggcgcctagcagaagcgttccgcgagtgtgaggaggccgtccgcctcgatccggccagcggccgcgcgcacggccgcctcgccggcttatgcctcaggcttgggatggttgagaaggcaaagacgcacttcacactggctggaagtgcaaaccagtctgatccggctgagtggcagaagctgcatgaggtagagatccatcaaggcagatgcatggatgcaaggaaaattggagactggaagagtgcactcagggaagccgacgcagccatcgctgttggagcggactcctctcgattgcttcttgccttgaggtcagaagcgttgctttggttgcacaaattagaggaagctgatttgactattacaagcttgttgaaactggatgacgcgtcgttgccttcgacgccaaccagagtctcaggcatgtcagctgactcttatgtccatatcgtccaagccaaggtcaacgtgacatttggaaggttcgattcagctgtcgcactggctgagaaggctaagcttattgatggcgtgagctcagaggttgaagtgatcctaaacaacgtgagattagtcgcattggctcgagcccgggggaatgacctttttaaggcaggcaagtttgctgaggcgtcgctagcctatggtgaagggctgaaatatgagccttctaatccagtgctatactgcaaccgggcagcttgctggtcaaagctgggtcggtgggcaaaagctgttgaggactgcagcgaggccctaagagtccagcctaactacacaaaggctctgctaaggcgtgcggcgtcatatgcaaagcttgagcgctgggcggactgtgtgcgggactacgaggtgcttcgcaaggatcttcctggtgacactgaggttgcagagtccttgttccatgcccaagttgcattaaagacagcccgtggagaggtggtatctaatatgaagtttggaggggtagttgaagaaattatcagcttagagcaactccaagatgttatccgttcacctggtgtatccgttctttacttcatggctacaatgaacaagcaatgtgcacaaattaccccgtctgtggactccctttgctccgagtgccctgcattgaatttcctgaaggtaaacgttgacgagcgccctctggtagcaagcgcggagaacgtgcgagtagtcccaagcttcaagatttacaaggacggcacgagagtgaaggagatggtctgccctagcttgcaggtcttgcgctattccgtgaggcactatgctgtctccagctcttgaggtccggcactcagttcgctggccctgttagtgtcaccacatgccaacatttcaccaacaaatctgtccctctatagtatcacagcatttcccccttcccatcgcgtcacttaggctcctcctaccgcaacatctctagaaccatttgatccaagcttaagcaattctcatgcctcgctttccaaagtgatgacttcaactcctgaagaaaggctccctgtggtggtgttcagggaataggttcttcaactgcaaaaggcatccagccactcattcggcctccgtcgaatcttgctacgggaaccgca

SEQ ID NO: 76240 - DNA, 1653 bp, Zea Mays
cgagtgtgaggaggccgtccgcctcgatccggccagcggccgcgcgcacggccgcctcgccggcttatgcctcaggcttgggatggttgagaaggcaaagacgcacttcacactggctggaagtgcaaaccagtctgatccggctgagtggcagaagctgcatgaggtagagatccatcaaggcagatgcatggatgcaaggaaaattggagactggaagagtgcactcagggaagccgacgcagccatcgctgttggagcggactcctctcgattgcttcttgccttgaggtcagaagcgttgctttggttgcacaaattagaggaagctgatttgactattacaagcttgttgaaactggatgacgcgtcgttgccttcgacgccaaccagagtctcaggcatgtcagctgactcttatgtccatatcgtccaagccaaggtcaacgtgacatttggaaggttcgattcagctgtcgcactggctgagaaggctaagcttattgatggcgtgagctcagaggttgaagtgatcctaaacaacgtgagattagtcgcattggctcgagcccgggggaatgacctttttaaggcagcttgctggtcaaagctgggtcggtgggcaaaagctgttgaggactgcagcgaggccctaagagtccagcctaactacacaaaggctctgctaaggcgtgcggcgtcatatgcaaagcttgagcgctgggcggactgtgtgcgggactacgaggtgcttcgcaaggatcttcctggtgacactgaggttgcagagtccttgttccatgcccaagttgcattaaagacagcccgtggagaggtggtatctaatatgaagtttggaggggtagttgaagaaattatcagcttagagcaactccaagatgttatccgttcacctggtgtatccgttctttacttcatggctacaatgaacaagcaatgtgcacaaattaccccgtctgtggactccctttgctccgagtgccctgcattgaatttcctgaaggtaaacgttgacgagcgccctctggtagcaagcgcggagaacgtgcgagtagtcccaagcttcaagatttacaaggacggcacgagagtgaaggagatggtctgccctagcttgcaggtcttgcgctattccgtgaggcactatgctgtctccagctcttgaggtccggcactcagttcgctggccctgttagtgtcaccacatgccaacatttcaccaacaaatctgtccctctatagtatcacagcatttcccccttcccatcgcgtcacttaggctcctcctaccgcaacatctctagaaccatttgatccaagcttaagcaattctcatgcctcgctttccaaagtgatgacttcaactcctgaagaaaggctccctgtggtggtgttcagggaataggtaaacacggctggctggttttctcattacatgtacatatattcccgtatagcaacacatcaaacccattgatagattggttcactgtggagaaaaggcggggttcggacttggatgaagagtacaggtctagttgccattgaatgtagagatggagaagatagatgggtcgtgttgttggtatggtacgtagagagacagaggagggaggtggctggtgtggttca

SEQ ID NO: 76241 - DNA, 1502 bp, Zea Mays
ggcaaccatgcggcagccgccccgcggaccacgcagattagagcagcccgcagcagcgaattaaagttacagcgggtcgtttgcgagcacacaaggatctctagctctgccatggtggtaactggtattctgggcgggctgctctaaccatcaaagcgtagcgcacaccacttgctcgacaaaagattttcagaatccgattatcctctacgacagcacaaggtgtgacaaaccgcactgccatgcaatgcagattcaaggaatctttcaacatatattcctctctccaggctttcattataaatagaggccaactgggttttgcacttcatacaaccccataccttcagagcttacaaggagtagcagagctcagaagagcattcgtattcagcacatagtgcgccttcttgaaagaactgtacaggagatcacacaatgagctattatggcagcagctcttctggtggacgaagcagtaggagagtcgactatgggaggacatatgtggtgaggccaaagggaaggcacctagccaccattgtgtggctccatggcataggtgacaatggtgctagctggtcccagctcctggattctcttcctctaccaaatatcaagtggatatgccccactgctgcaacccggcctgtcgcggcttttggtggattcccctgcacagcatggtttgacgttgaggacacatctatagatggccgagacgacattgagggactggatgcttcagctgcacacattgcaaatctgctgtcgtctgagccgtctgatgtgaagcttgggattggcggtttcagcatgggcgccgccgttgcccttcactcagcagcatgctatgctcatggcaaattcacaagtggcattccctatccaatcgcactcaacgcagtcatcagtttgagtggctggctcccttgctcaaggaccctgaggagcaagatggagggttcacatattgctgtaagaagggctggctccttgcccatcctgcttagtcatggaagagtggatgaagttgtcgtctacagggatggcgagagatcagctgaggttctgaggaactcaggattctcatttctgactttcaagccctacaacgggttgggccattatacgatccctgaagaactggacgacctctgcaagtggcttagttcgtcgcttggcctcggccgatctcgctaaaagaatagttttttttttttggcgtatgcgcaatgggtttggtgacagcatatattttgaggggaggtttggtttgatagcttgtaaaacacttgatgctagctgctctcttcgcatgtggcttttgtttccgtcgtcctaatttacgtactctatgtctctatgtaatgcggtactttgttgtctgatgtttgctaataaaaagaaaatgccgttgaggcctctgatcaatggaaacagcatttgtactgtatccaggcagcaaaacaacatttgtactcatcactgcagaaaacaga

SEQ ID NO: 76242 - DNA, 4868 bp, Zea Mays
ggcaaccatgcggcagccgccccgcggaccacgcagattagagcagcccgcagcagcgaattaaagttacagcgggtcgtttgcgagcacacaaggatctctagctctgccatggtggtaactggtattctgggcgggctgctctaaccatcaaagcgtagcgcacaccacttgctcgacaaaaggttgggtggaaaactgtctagagtttcatttgcttttttctatattttatttttgttattagtttttgaatgctttgacttctgtcttgaatatatatgtatatgcccttacattttataactaacaatatcatgacgaatcattatcatcaacgatctgacctgtgaagacagtgacatgcacatcgcatccgtttaatctctgagctgcacaggtgctttctctttgccatggtaacctccaaagattatacaaggaaatgtagttgttgccaaatatatcaaccgtttgtgtgatgctcatctctgcactgcttgaccttgacatctatacgctgacattttacactctagtagctctacatagtgtagaccacatcaaaaagataatgtcttgattcttccactcctaacgacctttggcatgttttcatattacggattcagcctttcagagtaacagcggatagctggaattttctgcctggaaagcagagtgtctagggcacatgacattccttcagcatcttgcactgcacatctttatggatggaatgatgtgagacatgacgacgtattccctttcagcttggcctgcactctttagtctcattgtttcatcccatcaacatggaagagctatcagttatcacaggcttatttcatcaccaagtttacagtagaggctcaagttggaaatgtgatgagttctccttttatttagatgctgaacttgtcatactcatggatatatgcaccacatatagttcccctgaacagaacggaataggcagtgattactcaatgacaattattctattcgattctgttatgttctattctatcttctgctggtgcaatgcaccccaaaacagcactgttccttttgccaatctgtagtaaccacatatctacttacaaagctacatgatcactgattagtcacgtttcacttggtggtgatactgccagttcagatctggttactatagttttctcttttcttttccttgtgagaacacaacactatggttaacagttaccactgttgaaaattgagcactaacaaatttttgtttaagatttactatgagagagactatagttgacttaaaggttataatatttccacagcccatatgcacgccataactttcagcgttttcctactgtcacccatggattatgatggtccatctcacaacttcaaacccccagttaaacaacattcctttgctttggtctatctgaggttgatcaaagggataaattctgcactatgtttatggaaacattgcctttcatttattacctttcacctttccaaaacttttcagaagtcctaagattaaaactgaatggaagaacaacatgtacattaaaataactgctaacacaaaagggcaagtaatgttcatgtataagtaacagtatgaaatagaaagcggagaaggagatgctacttcagattttctggagagatcaagccattgaaataaggagcatgcataattctcccatttacttccaaaggcataattcttcagataacggcagctacacattccctcttgcattttagaatttgacttctgttgagccttgatgtggacttcttacagtgagtattctttaccttttaaaattattcagtgaactggccttagtgggagctgaatatggaaagtgtacctaactgcatatgtaatcagaaacttgcttgcaaagaagctacagtcacaagtattccctctggaaggtgtacataattgtgttatcctgctgatatatagatctatagtaagcatggaccatggagtgaaagcatttaaaaaacttatagttttcctgtttttgtatcctctcgaactgtatgcttttaggttttgagtaacgacaaatctgatattttgtataggttgctttttgaggacctttttctgattttatagaaaaaaacacctttttgcaggaacatgtgcaatatggaggggaacaatatgcatgcttctagtaccagggcataacacaatgatgcctataatttttagtgtgaaaaaagttagatcaggtggcttatgaatctgtcttgtggagtagcttcatctagcaccatgtaaactgaaacctctgatgctattgtaaccgtgtagggacaacacgcatagctcacatattttggcttgagctgcctcccacactgcccatctcaatcattagaaaatgaaaaggagaatggaatatgattcttgttgtatgtagtgggcctggcacacacaaaaaaaaatgagaaaaggtccaggtttttttgttttttctaccagcttagcattttcttggaaaaataccatattttgcatagacatcagtttatatttatctttttgtatttttaatcacctcttaaaatttgcatcattgaaaaagaatcaactgctctgcatttgcaaaagcaatatgaatatttgcaaaggtgaacacctttgctggcatgcaaacctggagtttttgcagtctgtaaaaagttaatcttctgaaaatattgagagctggaaagaatcggatggtttgcatagctactttgttacaaaaccttgaattcaaaaccttaattttacaggtgttctcattatattaaaattactacatgttaaggctcttagcctcttatattggtgtactcatgtaccatcatgaagagtgtagccacgtatatgctgcaagtggacttgcatttctgcctttggttcccatatccatgctgattctgtactgaggcttgatagatatgtcttgcaatataatcatcttttctgaattctttattgtatcctgatggtatatcatttgcaatttgcagtagaatattatttcgtttttgctttctttgtgaaaatctgccaccaagtggttttctgtgggtctgtgggcaagtaatgtttccatcaaagattttttgcagtttaatcgaacagaaactgctagtggtgattcaaaagaaaaaagttcatgactagaaaataagttgactaatgcttattccttgcaagtttgttttgagtttgtcacatagggagttgcatggatttgttggcagaaggaagtgcgcattaatactccatacaccatgcagcagagagttgttcattggctgcagaacagagaaaaaggagaagacaacattatatatttggttatttctccaccgtcagagatgcggcctagtaacctgtgtgccaaatgcattttcatgaaatggcaaagtgccattgccaccctcaatatgtatatctgtgtgcaactctctgcgtgcacgattcttcacttagagggggaaaataatcttatatcctttcgtgccataagattttcagaatccgattatcctctacgacagcacaaggtgtgacaaaccgcactgccatgcaatgcagattcaaggaatctttcaacatatattcctctctccaggctttcattataaatagaggccaactgggttttgcacttcatacaaccccataccttcagagcttacaaggagtagcagagctcagaagagcattcgtattcagcacatagtgcgccttcttgaaagaactgtacaggagatcacacaatgagctattatggcagcagctcttctggtggacgaagcagtaggagagtcgactatgggaggacatatgtggtgaggccaaagggaaggcacctagccaccattgtgtggctccatggcataggtgacaatggtgctagctggtcccagctcctggattctcttcctctaccaaatatcaagtggatatgccccactgctgcaacccggcctgtcgcggcttttggtggattcccctgcacagcatggtttgacgttgaggacacatctatagatggccgagacgacattgagggactggatgcttcagctgcacacattgcaaatctgctgtcgtctgagccgtctgatgtgaagcttgggattggcggtttcagcatgggcgccgccgttgcccttcactcagcagcatgctatgctcatggcaaattcacaagtggcattccctatccaatcgcactcaacgcagtcatcagtttgagtggctggctcccttgctcaaggaccctgaggagcaagatggagggttcacatattgctgtaagaagggctggctccttgcccatcctgcttagtcatggaagagtggatgaagttgtcgtctacagggatggcgagagatcagctgaggttctgaggaactcaggattctcatttctgactttcaagccctacaacgggttgggccattatacgatccctgaagaactggacgacctctgcaagtggcttagttcgtcgcttggcctcggccgatctcgctaaaagaatagttttttttttttggcgtatgcgcaatgggtttggtgacagcatatattttgaggggaggtttggtttgatagcttgtaaaacacttgatgctagctgctctcttcgcatgtggcttttgtttccgtcgtcctaatttacgtactctatgtctctatgtaatgcggtactttgttgtctgatgtttgctaataaaaagaaaatgccgttgaggcctctgatcaatggaaacagcatttgtactgtatccaggcagcaaaacaacatttgtactcatcactgcagaaaacaga

SEQ ID NO: 76243 - DNA, 2900 bp, Zea Mays
cagcgaggctctcgagccattcctttttctatgtggccaagcacgggcttcaaccacggcatcagccaccaggcaaccatgcggcagccgccccgcggaccacgcagattagagcagcccgcagcagcgaattaaagttacagcgggtcgtttgcgagcacacaaggatctctagctctgccatggtggtaactggtattctgggcgggctgctctaaccatcaaagcgtagcgcacaccacttgctcgacaaaaggaacatgtgcaatatggaggggaacaatatgcatgcttctagtaccagggcataacacaatgatgcctataatttttagtgtgaaaaaagttagatcaggtggcttatgaatctgtcttgtggagtagcttcatctagcaccatgtaaactgaaacctctgatgctattgtaaccgtgtagggacaacacgcatagctcacatattttggcttgagctgcctcccacactgcccatctcaatcattagaaaatgaaaaggagaatggaatatgattcttgttgtatgtagtgggcctggcacacacaaaaaaaaatgagaaaaggtccaggtttttttgttttttctaccagcttagcattttcttggaaaaataccatattttgcatagacatcagtttatatttatctttttgtatttttaatcacctcttaaaatttgcatcattgaaaaagaatcaactgctctgcatttgcaaaagcaatatgaatatttgcaaaggtgaacacctttgctggcatgcaaacctggagtttttgcagtctgtaaaaagttaatcttctgaaaatattgagagctggaaagaatcggatggtttgcatagctactttgttacaaaaccttgaattcaaaaccttaattttacaggtgttctcattatattaaaattactacatgttaaggctcttagcctcttatattggtgtactcatgtaccatcatgaagagtgtagccacgtatatgctgcaagtggacttgcatttctgcctttggttcccatatccatgctgattctgtactgaggcttgatagatatgtcttgcaatataatcatcttttctgaattctttattgtatcctgatggtatatcatttgcaatttgcagtagaatattatttcgtttttgctttctttgtgaaaatctgccaccaagtggttttctgtgggtctgtgggcaagtaatgtttccatcaaagattttttgcagtttaatcgaacagaaactgctagtggtgattcaaaagaaaaaagttcatgactagaaaataagttgactaatgcttattccttgcaagtttgttttgagtttgtcacatagggagttgcatggatttgttggcagaaggaagtgcgcattaatactccatacaccatgcagcagagagttgttcattggctgcagaacagagaaaaaggagaagacaacattatatatttggttatttctccaccgtcagagatgcggcctagtaacctgtgtgccaaatgcattttcatgaaatggcaaagtgccattgccaccctcaatatgtatatctgtgtgcaactctctgcgtgcacgattcttcacttagagggggaaaataatcttatatcctttcgtgccataagattttcagaatccgattatcctctacgacagcacaaggctttcattataaatagaggccaactgggttttgcacttcatacaaccccataccttcagagcttacaaggagtagcagagctcagaagagcattcgtattcagcacatagtgcgccttcttgaaagaactgtacaggagatcacacaatgagctattatggcagcagctcttctggtggacgaagcagtaggagagtcgactatgggaggacatatgtggtgaggccaaagggaaggcacctagccaccattgtgtggctccatggcataggtgacaatggtgctagctggtcccagctcctggattctcttcctctaccaaatatcaagtggatatgccccactgctgcaacccggcctgtcgcggcttttggtggattcccctgcacagcatggtttgacgttgaggacacatctatagatggccgagacgacattgagggactggatgcttcagctgcacacattgcaaatctgctgtcgtctgagccgtctgatgtgaagcttgggattggcggtttcagcatgggcgccgccgttgcccttcactcagcagcatgctatgctcatggcaaattcacaagtggcattccctatccaatcgcactcaacgcagtcatcagtttgagtggctggctcccttgctcaaggaccctgaggagcaagatggagggttcacatattgctgtaagaagggctggctccttgcccatcctgcttagtcatggaagaggtggatgaagttgtcgtctacagggatggcgagagatcagctgaggttctgaggaactcaggattctcatttctgactttcaagccctacaacgggttgggccattatacgatccctgaagaactggacgacctctgcaagtggcttagttcgtcgcttggcctcggccgatctcgctaaaagaatagttttttttttttggcgtatgcgcaatgggtttggtgacagcatatattttgaggggaggtttggtttgatagcttgtaaaacacttgatgctagctgctctcttcgcatgtggcttttgtttccgtcgtcctaatttacgtactctatgtctctatgtaatgcggtactttgttgtctgatgtttgctaataaaaagaaaatgccgttgaggcctctgatcaatggaaacagcatttgtactgtatccaggcagcaaaacaacatttgtactcatcactgcagaaaacaga

SEQ ID NO: 76244 - DNA, 3002 bp, Zea Mays
cagcgaggctctcgagccattcctttttctatgtggccaagcacgggcttcaaccacggcatcagccaccaggcaaccatgcggcagccgccccgcggaccacgcagattagagcagcccgcagcagcgaattaaagttacagcgggtcgtttgcgagcacacaaggatctctagctctgccatggtggtaactggtattctgggcgggctgctctaaccatcaaagcgtagcgcacaccacttgctcgacaaaaggaacatgtgcaatatggaggggaacaatatgcatgcttctagtaccagggcataacacaatgatgcctataatttttagtgtgaaaaaagttagatcaggtggcttatgaatctgtcttgtggagtagcttcatctagcaccatgtaaactgaaacctctgatgctattgtaaccgtgtagggacaacacgcatagctcacatattttggcttgagctgcctcccacactgcccatctcaatcattagaaaatgaaaaggagaatggaatatgattcttgttgtatgtagtgggcctggcacacacaaaaaaaaatgagaaaaggtccaggtttttttgttttttctaccagcttagcattttcttggaaaaataccatattttgcatagacatcagtttatatttatctttttgtatttttaatcacctcttaaaatttgcatcattgaaaaagaatcaactgctctgcatttgcaaaagcaatatgaatatttgcaaaggtgaacacctttgctggcatgcaaacctggagtttttgcagtctgtaaaaagttaatcttctgaaaatattgagagctggaaagaatcggatggtttgcatagctactttgttacaaaaccttgaattcaaaaccttaattttacaggtgttctcattatattaaaattactacatgttaaggctcttagcctcttatattggtgtactcatgtaccatcatgaagagtgtagccacgtatatgctgcaagtggacttgcatttctgcctttggttcccatatccatgctgattctgtactgaggcttgatagatatgtcttgcaatataatcatcttttctgaattctttattgtatcctgatggtatatcatttgcaatttgcagtagaatattatttcgtttttgctttctttgtgaaaatctgccaccaagtggttttctgtgggtctgtgggcaagtaatgtttccatcaaagattttttgcagtttaatcgaacagaaactgctagtggtgattcaaaagaaaaaagttcatgactagaaaataagttgactaatgcttattccttgcaagtttgttttgagtttgtcacatagggagttgcatggatttgttggcagaaggaagtgcgcattaatactccatacaccatgcagcagagagttgttcattggctgcagaacagagaaaaaggagaagacaacattatatatttggttatttctccaccgtcagagatgcggcctagtaacctgtgtgccaaatgcattttcatgaaatggcaaagtgccattgccaccctcaatatgtatatctgtgtgcaactctctgcgtgcacgattcttcacttagagggggaaaataatcttatatcctttcgtgccataagattttcagaatccgattatcctctacgacagcacaaggtgtgacaaaccgcactgccatgcaatgcagattcaaggaatctttcaacatatattcctctctccaggctttcattataaatagaggccaactgggttttgcacttcatacaaccccataccttcagagcttacaaggagtagcagagctcagaagagcattcgtattcagcacatagtgcgccttcttgaaagaactgtacaggagatcacacaatgagctattatggcagcagctcttctggtggacgaagcagtaggagagtcgactatgggaggacatatgtggtgaggccaaagggaaggcacctagccaccattgtgtggctccatggcataggtgacaatggtgctagctggtcccagctcctggattctcttcctctaccaaatatcaagtggatatgccccactgctgcaacccggcctgtcgcggcttttggtggattcccctgcacagcatggtttgacgttgaggacacatctatagatggccgagacgacattgagggactggatgcttcagctgcacacattgcaaatctgctgtcgtctgagccgtctgatgtgaagcttgggattggcggtttcagcatgggcgccgccgttgcccttcactcagcagcatgctatgctcatggcaaattcacaagtggcattccctatccaatcgcactcaacgcagtcatcagtttgagtggctggctcccttgctcaaggaccctgaggagcaagatggagggttcacatattgctgtaagaagggctggctccttgcccatcctgcttagtcatggaagaggtgatgatgatgctgattcaaaagaaaaagaaattcagtacatgctactactagacaggatggcgagagatcagctgaggttctgaggaactcaggattctcatttctgactttcaagccctacaacgggttgggccattatacgatccctgaagaactggacgacctctgcaagtggcttagttcgtcgcttggcctcggccgatctcgctaaaagaatagttttttttttttggcgtatgcgcaatgggtttggtgacagcatatattttgaggggaggtttggtttgatagcttgtaaaacacttgatgctagctgctctcttcgcatgtggcttttgtttccgtcgtcctaatttacgtactctatgtctctatgtaatgcggtactttgttgtctgatgtttgctaataaaaagaaaatgccgttgaggcctctgatcaatggaaacagcatttgtactgtatccaggcagcaaaacaacatttgtactcatcactgcagaaaacaga

SEQ ID NO: 76245 - DNA, 2956 bp, Zea Mays
cagcgaggctctcgagccattcctttttctatgtggccaagcacgggcttcaaccacggcatcagccaccaggcaaccatgcggcagccgccccgcggaccacgcagattagagcagcccgcagcagcgaattaaagttacagcgggtcgtttgcgagcacacaaggatctctagctctgccatggtggtaactggtattctgggcgggctgctctaaccatcaaagcgtagcgcacaccacttgctcgacaaaaggaacatgtgcaatatggaggggaacaatatgcatgcttctagtaccagggcataacacaatgatgcctataatttttagtgtgaaaaaagttagatcaggtggcttatgaatctgtcttgtggagtagcttcatctagcaccatgtaaactgaaacctctgatgctattgtaaccgtgtagggacaacacgcatagctcacatattttggcttgagctgcctcccacactgcccatctcaatcattagaaaatgaaaaggagaatggaatatgattcttgttgtatgtagtgggcctggcacacacaaaaaaaaatgagaaaaggtccaggtttttttgttttttctaccagcttagcattttcttggaaaaataccatattttgcatagacatcagtttatatttatctttttgtatttttaatcacctcttaaaatttgcatcattgaaaaagaatcaactgctctgcatttgcaaaagcaatatgaatatttgcaaaggtgaacacctttgctggcatgcaaacctggagtttttgcagtctgtaaaaagttaatcttctgaaaatattgagagctggaaagaatcggatggtttgcatagctactttgttacaaaaccttgaattcaaaaccttaattttacaggtgttctcattatattaaaattactacatgttaaggctcttagcctcttatattggtgtactcatgtaccatcatgaagagtgtagccacgtatatgctgcaagtggacttgcatttctgcctttggttcccatatccatgctgattctgtactgaggcttgatagatatgtcttgcaatataatcatcttttctgaattctttattgtatcctgatggtatatcatttgcaatttgcagtagaatattatttcgtttttgctttctttgtgaaaatctgccaccaagtggttttctgtgggtctgtgggcaagtaatgtttccatcaaagattttttgcagtttaatcgaacagaaactgctagtggtgattcaaaagaaaaaagttcatgactagaaaataagttgactaatgcttattccttgcaagtttgttttgagtttgtcacatagggagttgcatggatttgttggcagaaggaagtgcgcattaatactccatacaccatgcagcagagagttgttcattggctgcagaacagagaaaaaggagaagacaacattatatatttggttatttctccaccgtcagagatgcggcctagtaacctgtgtgccaaatgcattttcatgaaatggcaaagtgccattgccaccctcaatatgtatatctgtgtgcaactctctgcgtgcacgattcttcacttagagggggaaaataatcttatatcctttcgtgccataagattttcagaatccgattatcctctacgacagcacaaggctttcattataaatagaggccaactgggttttgcacttcatacaaccccataccttcagagcttacaaggagtagcagagctcagaagagcattcgtattcagcacatagtgcgccttcttgaaagaactgtacaggagatcacacaatgagctattatggcagcagctcttctggtggacgaagcagtaggagagtcgactatgggaggacatatgtggtgaggccaaagggaaggcacctagccaccattgtgtggctccatggcataggtgacaatggtgctagctggtcccagctcctggattctcttcctctaccaaatatcaagtggatatgccccactgctgcaacccggcctgtcgcggcttttggtggattcccctgcacagcatggtttgacgttgaggacacatctatagatggccgagacgacattgagggactggatgcttcagctgcacacattgcaaatctgctgtcgtctgagccgtctgatgtgaagcttgggattggcggtttcagcatgggcgccgccgttgcccttcactcagcagcatgctatgctcatggcaaattcacaagtggcattccctatccaatcgcactcaacgcagtcatcagtttgagtggctggctcccttgctcaaggaccctgaggagcaagatggagggttcacatattgctgtaagaagggctggctccttgcccatcctgcttagtcatggaagaggtgatgatgatgctgattcaaaagaaaaagaaattcagtacatgctactactagacatggatgaagttgtcgtctacagggatggcgagagatcagctgaggttctgaggaactcaggattctcatttctgactttcaagccctacaacgggttgggccattatacgatccctgaagaactggacgacctctgcaagtggcttagttcgtcgcttggcctcggccgatctcgctaaaagaatagttttttttttttggcgtatgcgcaatgggtttggtgacagcatatattttgaggggaggtttggtttgatagcttgtaaaacacttgatgctagctgctctcttcgcatgtggcttttgtttccgtcgtcctaatttacgtactctatgtctctatgtaatgcggtactttgttgtctgatgtttgctaataaaaagaaaatgccgttgaggcctctgatcaatggaaacagcatttgtactgtatccaggcagcaaaacaacatttgtactcatcactgcagaaaacaga

SEQ ID NO: 76246 - DNA, 2986 bp, Zea Mays
cagcgaggctctcgagccattcctttttctatgtggccaagcacgggcttcaaccacggcatcagccaccaggcaaccatgcggcagccgccccgcggaccacgcagattagagcagcccgcagcagcgaattaaagttacagcgggtcgtttgcgagcacacaaggatctctagctctgccatggtggtaactggtattctgggcgggctgctctaaccatcaaagcgtagcgcacaccacttgctcgacaaaaggaacatgtgcaatatggaggggaacaatatgcatgcttctagtaccagggcataacacaatgatgcctataatttttagtgtgaaaaaagttagatcaggtggcttatgaatctgtcttgtggagtagcttcatctagcaccatgtaaactgaaacctctgatgctattgtaaccgtgtagggacaacacgcatagctcacatattttggcttgagctgcctcccacactgcccatctcaatcattagaaaatgaaaaggagaatggaatatgattcttgttgtatgtagtgggcctggcacacacaaaaaaaaatgagaaaaggtccaggtttttttgttttttctaccagcttagcattttcttggaaaaataccatattttgcatagacatcagtttatatttatctttttgtatttttaatcacctcttaaaatttgcatcattgaaaaagaatcaactgctctgcatttgcaaaagcaatatgaatatttgcaaaggtgaacacctttgctggcatgcaaacctggagtttttgcagtctgtaaaaagttaatcttctgaaaatattgagagctggaaagaatcggatggtttgcatagctactttgttacaaaaccttgaattcaaaaccttaattttacaggtgttctcattatattaaaattactacatgttaaggctcttagcctcttatattggtgtactcatgtaccatcatgaagagtgtagccacgtatatgctgcaagtggacttgcatttctgcctttggttcccatatccatgctgattctgtactgaggcttgatagatatgtcttgcaatataatcatcttttctgaattctttattgtatcctgatggtatatcatttgcaatttgcagtagaatattatttcgtttttgctttctttgtgaaaatctgccaccaagtggttttctgtgggtctgtgggcaagtaatgtttccatcaaagattttttgcagtttaatcgaacagaaactgctagtggtgattcaaaagaaaaaagttcatgactagaaaataagttgactaatgcttattccttgcaagtttgttttgagtttgtcacatagggagttgcatggatttgttggcagaaggaagtgcgcattaatactccatacaccatgcagcagagagttgttcattggctgcagaacagagaaaaaggagaagacaacattatatatttggttatttctccaccgtcagagatgcggcctagtaacctgtgtgccaaatgcattttcatgaaatggcaaagtgccattgccaccctcaatatgtatatctgtgtgcaactctctgcgtgcacgattcttcacttagagggggaaaataatcttatatcctttcgtgccataagattttcagaatccgattatcctctacgacagcacaaggtgtgacaaaccgcactgccatgcaatgcagattcaaggaatctttcaacatatattcctctctccaggctttcattataaatagaggccaactgggttttgcacttcatacaaccccataccttcagagcttacaaggagtagcagagctcagaagagcattcgtattcagcacatagtgcgccttcttgaaagaactgtacaggagatcacacaatgagctattatggcagcagctcttctggtggacgaagcagtaggagagtcgactatgggaggacatatgtggtgaggccaaagggaaggcacctagccaccattgtgtggctccatggcataggtgacaatggtgctagatcaagtggatatgccccactgctgcaacccggcctgtcgcggcttttggtggattcccctgcacagcatggtttgacgttgaggacacatctatagatggccgagacgacattgagggactggatgcttcagctgcacacattgcaaatctgctgtcgtctgagccgtctgatgtgaagcttgggattggcggtttcagcatgggcgccgccgttgcccttcactcagcagcatgctatgctcatggcaaattcacaagtggcattccctatccaatcgcactcaacgcagtcatcagtttgagtggctggctcccttgctcaaggaccctgaggagcaagatggagggttcacatattgctgtaagaagggctggctccttgcccatcctgcttagtcatggaagaggtgatgatgatgctgattcaaaagaaaaagaaattcagtacatgctactactagactggatgaagttgtcgtctacagggatggcgagagatcagctgaggttctgaggaactcaggattctcatttctgactttcaagccctacaacgggttgggccattatacgatccctgaagaactggacgacctctgcaagtggcttagttcgtcgcttggcctcggccgatctcgctaaaagaatagttttttttttttggcgtatgcgcaatgggtttggtgacagcatatattttgaggggaggtttggtttgatagcttgtaaaacacttgatgctagctgctctcttcgcatgtggcttttgtttccgtcgtcctaatttacgtactctatgtctctatgtaatgcggtactttgttgtctgatgtttgctaataaaaagaaaatgccgttgaggcctctgatcaatggaaacagcatttgtactgtatccaggcagcaaaacaacatttgtactcatcactgcagaaaacaga

SEQ ID NO: 76247 - DNA, 2910 bp, Zea Mays
ccacgctggcacactgagcatgcctcagcgaggctctcgagccattcctttttctatgtggccaagcacgggcttcaaccacggcatcagccaccaggcaaccatgcggcagccgccccgcggaccacgcagattagagcagcccgcagcagcgaattaaagttacagcgggtcgtttgcgagcacacaaggatctctagctctgccatggtggtaactggtattctgggcgggctgctctaaccatcaaagcgtagcgcacaccacttgctcgacaaaaggaacatgtgcaatatggaggggaacaatatgcatgcttctagtaccagggcataacacaatgatgcctataatttttagtgtgaaaaaagttagatcagggacaacacgcatagctcacatattttggcttgagctgcctcccacactgcccatctcaatcattagaaaatgaaaaggagaatggaatatgattcttgttgtatgtagtgggcctggcacacacaaaaaaaaatgagaaaaggtccaggtttttttgttttttctaccagcttagcattttcttggaaaaataccatattttgcatagacatcagtttatatttatctttttgtatttttaatcacctcttaaaatttgcatcattgaaaaagaatcaactgctctgcatttgcaaaagcaatatgaatatttgcaaaggtgaacacctttgctggcatgcaaacctggagtttttgcagtctgtaaaaagttaatcttctgaaaatattgagagctggaaagaatcggatggtttgcatagctactttgttacaaaaccttgaattcaaaaccttaattttacaggtgttctcattatattaaaattactacatgttaaggctcttagcctcttatattggtgtactcatgtaccatcatgaagagtgtagccacgtatatgctgcaagtggacttgcatttctgcctttggttcccatatccatgctgattctgtactgaggcttgatagatatgtcttgcaatataatcatcttttctgaattctttattgtatcctgatggtatatcatttgcaatttgcagtagaatattatttcgtttttgctttctttgtgaaaatctgccaccaagtggttttctgtgggtctgtgggcaagtaatgtttccatcaaagattttttgcagtttaatcgaacagaaactgctagtggtgattcaaaagaaaaaagttcatgactagaaaataagttgactaatgcttattccttgcaagtttgttttgagtttgtcacatagggagttgcatggatttgttggcagaaggaagtgcgcattaatactccatacaccatgcagcagagagttgttcattggctgcagaacagagaaaaaggagaagacaacattatatatttggttatttctccaccgtcagagatgcggcctagtaacctgtgtgccaaatgcattttcatgaaatggcaaagtgccattgccaccctcaatatgtatatctgtgtgcaactctctgcgtgcacgattcttcacttagagggggaaaataatcttatatcctttcgtgccataagattttcagaatccgattatcctctacgacagcacaaggtgtgacaaaccgcactgccatgcaatgcagattcaaggaatctttcaacatatattcctctctccaggctttcattataaatagaggccaactgggttttgcacttcatacaaccccataccttcagagcttacaaggagtagcagagctcagaagagcattcgtattcagcacatagtgcgccttcttgaaagaactgtacaggagatcacacaatgagctattatggcagcagctcttctggtggacgaagcagtaggagagtcgactatgggaggacatatgtggtgaggccaaagggaaggcacctagccaccattgtgtggctccatggcataggtgacaatggtgctagctggtcccagctcctggattctcttcctctaccaaatatcaagtggatatgccccactgctgcaacccggcctgtcgcggcttttggtggattcccctgcacagcatggtttgacgttgaggacacatctatagatggccgagacgacattgagggactggatgcttcagctgcacacattgcaaatctgctgtcgtctgagccgtctgatgtgaagcttgggattggcggtttcagcatgggcgccgccgttgcccttcactcagcagcatgctatgctcatggcaaattcacaagtggcattccctatccaatcgcactcaacgcagtcatcagtttgagtggctggctcccttgctcaaggaccctgaggagcaagatggagggttcacatattgctgtaagaagggctggctccttgcccatcctgcttagtcatggaagagtggatgaagttgtcgtctacagggatggcgagagatcagctgaggttctgaggaactcaggattctcatttctgactttcaagccctacaacgggttgggccattatacgatccctgaagaactggacgacctctgcaagtggcttagttcgtcgcttggcctcggccgatctcgctaaaagaatagttttttttttttggcgtatgcgcaatgggtttggtgacagcatatattttgaggggaggtttggtttgatagcttgtaaaacacttgatgctagctgctctcttcgcatgtggcttttgtttccgtcgtcctaatttacgtactctatgtctctatgtaatgcggtactttgttgtctgatgtttgctaataaaaagaaaatgccgttgaggcctctgatcaatggaaacagcatttgtactgtatccaggcagcaaaacaacatttgtactcatcactgcagaaaacaga

SEQ ID NO: 76248 - DNA, 1533 bp, Zea Mays
ctgccacgctggcacactgagcatgcctcagcgaggctctcgagccattcctttttctatgtggccaagcacgggcttcaaccacggcatcagccaccaggcaaccatgcggcagccgccccgcggaccacgcagattagagcagcccgcagcagcgaattaaagttacagcgggtcgtttgcgagcacacaaggatctctagctctgccatggtggtaactggtattctgggcgggctgctctaaccatcaaagcgtagcgcacaccacttgctcgacaaaagattcaaggaatctttcaacatatattcctctctccaggctttcattataaatagaggccaactgggttttgcacttcatacaaccccataccttcagagcttacaaggagtagcagagctcagaagagcattcgtattcagcacatagtgcgccttcttgaaagaactgtacaggagatcacacaatgagctattatggcagcagctcttctggtggacgaagcagtaggagagtcgactatgggaggacatatgtggtgaggccaaagggaaggcacctagccaccattgtgtggctccatggcataggtgacaatggtgctagctggtcccagctcctggattctcttcctctaccaaatatcaagtggatatgccccactgctgcaacccggcctgtcgcggcttttggtggattcccctgcacagcatggtttgacgttgaggacacatctatagatggccgagacgacattgagggactggatgcttcagctgcacacattgcaaatctgctgtcgtctgagccgtctgatgtgaagcttgggattggcggtttcagcatgggcgccgccgttgcccttcactcagcagcatgctatgctcatggcaaattcacaagtggcattccctatccaatcgcactcaacgcagtcatcagtttgagtggctggctcccttgctcaaggaccctgaggagcaagatggagggttcacatattgctgtaagaagggctggctccttgcccatcctgcttagtcatggaagagtggatgaagttgtcgtctacagggatggcgagagatcagctgaggttctgaggaactcaggattctcatttctgactttcaagccctacaacgggttgggccattatacgatccctgaagaactggacgacctctgcaagtggcttagttcgtcgcttggcctcggccgatctcgctaaaagaatagttttttttttttggcgtatgcgcaatgggtttggtgacagcatatattttgaggggaggtttggtttgatagcttgtaaaacacttgatgctagctgctctcttcgcatgtggcttttgtttccgtcgtcctaatttacgtactctatgtctctatgtaatgcggtactttgttgtctgatgtttgctaataaaaagaaaatgccgttgaggcctctgatcaatggaaacagcatttgtactgtatccaggcagcaaaacaacatttgtactcatcactgcagaaaacaga

SEQ ID NO: 76249 - DNA, 1412 bp, Zea Mays
atggtgtcctacgacaaggcgttcgagtcctacaagaaggccctcaccaccgcgacgtccgttgccggacttgccacatccatgatgatggaccacaccatcgtcgtcgagaagaagaacgacgggctcgccaacaaccatgtctactgcgtagtgaagacttacctcgccatgtgcatgaacatcgacatccagcagcgcctgcgcgtcagcagcatggacgaggatgacaagatgatggtcagcatggacgagggcgacaagatgctggatgtttatcaaggcacggagttcaagtggtgccttgtctgcaaagacagctcaaaggactccctcaataatggcagtcagaatgagtcccagttatttgagttgaccttcaacaagaggcacaaggacaaggccatcaaagcccaggagagaactctcatgatatacatgactgagtacgacgattggtccgcgattgacctcaaccacccatctacgttcgacacgcttgccatggaccacaagctgaagcagtccatcattgatgatcttaacaggttcatcaagaggaaagattactataagaagattggcaaggcgtggaagcgggggtacctgctgtatggtccacctgggactgggaagtctagcctaatcgcgaccatggccaaccagctcaggtttgacatatatgatctcgagctaactgcggtcacatccaactcagacctcgagaggcttcttgttggcatgggcaaccgatccattcttgtgatcgaagatattgactgcaccatcgaactggaacaaagggaggaaggtgagggacatgacaagtcaaattctacagaacaaaacaggagggaagagaaggtaacgatgtctgggctgctcaactttgttgatgggttgtggccaacaagtggggaagaaaggatcatcgtcttcacaaccaattacaaggagcggctcgacccaacactgttgcggcctggaaggatggacatgcacatccacatgggaggttgctgaggttctgatgaggaatgatgacactgatgttgtgctccatgatcttgtcggattcctgaagtcaagaatgaaggatgtcaatgaggtcaagactgaacacaagaaagaaaataacaagatggacgaaaagaaggaagacaaggacaatgacaaagattaaaaccagtgcacttccttctacaatagtaaagaatatgaaagcaacacatcacatttcatatagatagatcctacaggtgatccattggtgtgtgtatgtgaatgtttgcatattctcaacattgtgtttttggatcaatgaggcgtggtggtacttgcacggagttctgttagtacttgtttagtagcatgtatgcagaactacagacacatgaaatccataaaacaat

SEQ ID NO: 76250 - DNA, 606 bp, Zea Mays
ctggtacggaatttggcctgctcggcccatttagtgaatccctctgcgcagcccaactcgcccgcgaccgcgcctcactgcacaccgggcccagtcgtcggccgcgttggattcgcgcagtggtgccgacgcccggggcccatctgtcggtcgctgctggtgatactgcgcgcatgctttcgcttccacgtgggtcccacctgtcatcctggacctccgttaaaatcgcaccgcacaacggagctccgcttcagccgcgcacgtcccgggatctcctccgcgggcgactatccgcccataaaggctctcgtgtcgcgcctcccaagacctgttcctcccctctatcctccctcaaatccgagcgctcctctttggccactcgttgccgccgccgcggggaatctccgctgtgctggtgaagcatctccgacgtgtccgcccagagcttcgccgtggttcatgggaagttggggtggcggtattgggcttggagcgtcaccggtgtcggctcaattgctccccggagtctctgcgtgccgcgaatccatctaactccgtgggcagcatcgcccgagcaccaattcgagaagagcctgtgactgagga

SEQ ID NO: 76251 - DNA, 2102 bp, Zea Mays
tattttttacatctcgctgctaataattttaactgcattctactatatcttatggttatgccttttatcatgaagggtaatcgccaggagctcaagccaatcatgcagccacatagttcccatgttatcacactttcacaagcatgtccgaacaacatttctgggtgcactttgacacccattaaccaacatctaaatgccgtctttatattttgtctaaacttaaacaggccccttgatctctgtgatgtaacaaacgagataacactgccgaaccatcagggttctgttggtccttctactccttcaaatctgaattccaggttaccagggtctcctgctatggttttgggcaacaattcaccgttcccttcaacattgagtagtcctagcctggtcagggtatggaagagcataggcagatgtcggagtttgacatgccggtttcacagggaagcggccaagccactatccagtttagcagcatgaattcatctttctcgagtccacctgttcagcaaccccaacggccacatcagatgtcacaatcgttacacatgtttgggaatccacaccattctcagatccagggaactagttcaagctcacaacagcaggcatatgctgtgcacttggctaaagaaagacaaatgcaacagcatatggcacctcaacagcatagtgatctttctggagcaagtgcagtacccaatgtgcagagtaatactcaaacattgcagcagggccaaacctcatctgccaattcagccccttgttcaaaatcacagcatcagcgacagcaagcggcacaaaatctgccggatagctcttcatctcccaaccaacctgccacttttacacaacagaagcagaagaaacaacaggaacaacagcagtctagacaaaatgagccacaaaggaaccgtggcagtcaacaagctaagcttatgaagagtttaggacgaggaaacatgatggcccagactcctccaattgactgcacaccaaccaatgctgcttctactccatcaaaaaaccatgtgtctgaaaaactggtgcaacatggccaaggacatttccctgccaatacaacaccagtaccgtcaatgcctcaacctaggctagtcacttcgttgcctcagtcaccaacgaaggtggcagacattggtaaccaaggtttaaaaaagggtggttctttgagtcaggccatgttagctttgcaacaacctccacatggttctaaatcgacattgaccactcagctgcagcagcggcaggtcaatccgccacagaacaacaatgggagagcagtggtgcaacagaaccgccaaatgaactctgactgtaggacagacttgcacgtcggtcaggtccgtcacaatcagatggttccaacatccatgccacagagtgcagattcgtgtagccctgtactgtcatctgtaaaccagcagaagcgtgagccatcgctcaatcagacttcagttacctcgccgtctaacctgcttaggtctcctaaagatacttcttttgggtagccaagacatgctacaaaggcaagttttcaggtggcttccctatacaggctcatggtgttggtgaccagtggaaccaacatggcagagagcaattgcagtctcagcatcagcagagacaaccggttgttcaaggcagtgcatatgctccttcaaattctgggcctggctgatcattaattatttcaggattcgtttttcttattcaagtgacagtttgacaaagttcattaagagccagagtcggatgagggactgtatggctgcatggatgcatggaccaggatggcccatgagaccaggccaggcgaagccatattttttagggtcctttgtttcattggggccctagattagcctgatttacccgtttgatctatggatttacctcccgtatcgaggtcgagatgcacattagtttccatgagtgtcttgatcggcttgacatccttcatcccaaacttgatgagtatgtcttgaatgtatttcgtttgactgatgaaagtgcccttttgaagttgctttacttgaaatcctaagaaatacttcaactcctctatcatagac

SEQ ID NO: 76252 - DNA, 3331 bp, Zea Mays
tctgtttgctggtgccatcagaatgaactgccgctttcagtgacatgcatgcgatgcatgcttttgcttttcttcaatggtgaatgctgagccatgctcgatgggtggaattatggattacggtgttggtgtgggcaccaaatcttcaccacgcagtatggccattgagaaagctcaggaggagctcaggcaggagtctgatgttcgcgatgaatggaggagagaattggaatttctagagaaagtatgcccgcaccagggaggcaacccattggatttcaattttgcacatctggaaacggtcggtgtacactctgcttctctcacaaatcaagtagaagcacaaactgtgataagtgacgcgaaaggtagtttttctgcatcacctcttggagattcggtcgagagtaccgacaaaccaggaggttccatgtgccgcgaaaccaacacagcagacaatcttatgcttttgggtggaggtaaaaatgacattgcagaagaaaaggttgtaaaaagaggaaccaaaagattaaatgcagcacaacccaaacattcattgcccagtgacggtcacaaaaacacaaaaaagcctgctgcttctggtttgtcacacctcggtgtcaaaagccaggcatatgttcggcgcaacaggtcaaagccaagtagggagagcgggaatgtcacatctattagatcttctatgatccctgctaaagtctatgagccaaatgatgaaaaggttacagcacagaaaaacaatgcagacgatcatggtgtattgtccgtttctagtataaaacagtctggacctaaccgtgacattgcaccaaagagtatagcttctgatgaccatgcagcaatggagctggatggcattcaaacaattctcgaaagtgaatgtgtggtgaacgacaaagtaaacaaagctggcaataataacaaagctaaacagttgtcatcaaatgacacaaatcatgatcgtttccttgttgggtgtggtgagatagctgctgaagtttcatctgcggaaacccctgatgccaatttaaaagttgttataaagccatgttattctagtgcatctacatatgatgagaaagagtcatgtgctgttcacgaaaaggctgatgatggacacctggatgaatgtatggcccatatccgtgaaggggaacttggtcacagcaggacacttccttgtgttgtagaagcttctacttcacacaatgatgtagtgggcccatcttgtgaaggcactgtgaatattgttgatgaacatgcagatggggacatcaatactgttgcagggaagattgattctcatgaagacctagatagtagtagacattctaacatgattctcaaggtaagtggcacatcgatagatttcagcaggcctgcttctttgaaggaaagttctgatcttgtacgacctgaagccagtaatatttctcatgtgaaagatgaaattgaagtttgtaacagtgcaatagttgcacagaaagacacagagtgcttgtcttctggccgcagcatgaacattgaggaaagtccagtttcggttaggaaaaatagctatgttgggaattcaaactctgcacatcctatatccgtaggcatcgatttgtctgatgccttgtctccaccaaaaaatgatgaatctaacgtggagagtgagattaaaaaatatgagaacctgaataagatggaaaagaaggcctatgaagattctattcttaaaaatgctcgcgttatagaggcaaatattaaaaaggctggtcaacgatctccctgtaacattgctttagagaagaggagaaagagtcactgggattttgtccttgaggagatgacttggatggctaatgatttcatgcaggaacgactttggaaaagtgtggctgcagctcaggtgtgccattggattgcctctgatgcccacgccaagtttgaaaaagcaagcattctgaaaaagcagaaagctgttataaagatcattgcaaagggtatcatgagtttctggcgttcagctgaggctttacagactgctgacaggacagctaaagtgatgccacacaattcaactatgctggaggagatagatccttcgggagtcaaagcaggaaaagaacagggtcacaattcactggaagcgaaagaatccagccagcaacggtcacagattcatgattatgcagttcgatttcttgaatataatagaacagctgatttgcacgtgttgcctgaagctccaccaactcctgacaggctgaatgactttggagtcttgaaagtgtctgatcatctctcagaagaaagtctcttttatacagtagcagcacctggtgcagtgctggcatacagggactctctggaatctcttttcatgtatcacaaggaagatggcaatgctgagctcaacgatgactatgaggcatctgcgtgtgattctgttgcagatttgccccaggagaatgcatacgaggaggatgaaggcgagacatgtacttttctttctcctaaagcatatgttggtggttccatatcgaatatggttcacaagaagaaacatgtaatgccacaaaggattagccttgctaggccatatgaaattggtacctatgtgccttatcaaccatgcatggaaagcaagtcaaggaaccaaccattgttatcaaatggcaaaagacctacttctttccttgcaattcctccaaagcgcacacgcacagctgcaaggcaacaagttgtaagcccgtttcatgctggtgctagtgtaccgccccaagatttctcaagtggcaacacaaactcctaccaagatgatcaaagttcattgcatagtgagtctttgccgtggaggaacatggattttgaatctacagttgattctgatagacaactgccttatgatgctggtgaaatgtgcactaaagtcaacaacaagaaaaaactgaagaactcaggatacaaaattgctcaaaatgcagccaatttgtatgtgccaacttctgcaaagtttcagggccatatttatgatccaagaaagcaaatgcaagttgacttggttaataaatatgagcaggaatatctcaagaagagaacagatgtgcaccaatatggttcaaatggaaacaaagttgcatatggtggtcaacatgcttctaagaagcttaaaatggggaagcaagggatagatatttcacaagaaacttctgttgcatcacagatgagcaacatggcacatcctgctagatttataaagatcattgctaatagggatcgtgggagaaaatgcaaagcactaaagataacacgcatactgggttga

SEQ ID NO: 76253 - DNA, 3596 bp, Zea Mays
cggacaacagcgcgcaggcctgtgaattgcttccctctccacgcgcaccttcccgcctccgcgcccagcccaaccccaccgttgccacgcccacctccggcgtccacctcgcggttctccgctgcacaatcctccggaagacttccccagtgcccctgcgacccgtctgcacacctccgcggctgctcgccctcctctacccaaaccctaaccctaggtccgcgcgccggtgagtccttcgcgctggaaggatacatctgtttgctggtgccatcagaatgaactgccgctttcagtgacatgcatgcgatgcatgcttttgcttttcttcaatggtgaatgctgagccatgctcgatgggtggaattatggattacggtgttggtgtgggcaccaaatcttcaccacgcagtatggccattgagaaagctcaggaggagctcaggcaggagtctgatgttcgcgatgaatggaggagagaattggaatttctagagaaagtatgcccgcaccagggaggcaacccattggatttcaattttgcacatctggaaacggtcggtgtacactctgcttctctcacaaatcaagtagaagcacaaactgtgataagtgacgcgaaaggtagtttttctgcatcacctcttggagattcggtcgagagtaccgacaaaccaggaggttccatgtgccgcgaaaccaacacagcagacaatcttatgcttttgggtggaggtaaaaatgacattgcagaagaaaaggttgtaaaaagaggaaccaaaagattaaatgcagcacaacccaaacattcattgcccagtgacggtcacaaaaacacaaaaaagcctgctgcttctggtttgtcacacctcggtgtcaaaagccaggcatatgttcggcgcaacaggtcaaagccaagtagggagagcgggaatgtcacatctattagatcttctatgatccctgctaaagtctatgagccaaatgatgaaaaggttacagcacagaaaaacaatgcagacgatcatggtgtattgtccgtttctagtataaaacagtctggacctaaccgtgacattgcaccaaagagtatagcttctgatgaccatgcagcaatggagctggatggcattcaaacaattctcgaaagtgaatgtgtggtgaacgacaaagtaaacaaagctggcaataataacaaagctaaacagttgtcatcaaatgacacaaatcatgatcgtttccttgttgggtgtggtgagatagctgctgaagtttcatctgcggaaacccctgatgccaatttaaaagttgttataaagccatgttattctagtgcatctacatatgatgagaaagagtcatgtgctgttcacgaaaaggctgatgatggacacctggatgaatgtatggcccatatccgtgaaggggaacttggtcacagcaggacacttccttgtgttgtagaagcttctacttcacacaatgatgtagtgggcccatcttgtgaaggcactgtgaatattgttgatgaacatgcagatggggacatcaatactgttgcagggaagattgattctcatgaagacctagatagtagtagacattctaacatgattctcaaggtaagtggcacatcgatagatttcagcaggcctgcttctttgaaggaaagttctgatcttgtacgacctgaagccagtaatatttctcatgtgaaagatgaaattgaagtttgtaacagtgcaatagttgcacagaaagacacagagtgcttgtcttctggccgcagcatgaacattgaggaaagtccagtttcggttaggaaaaatagctatgttgggaattcaaactctgcacatcctatatccgtaggcatcgatttgtctgatgccttgtctccaccaaaaaatgatgaatctaacgtggagagtgagattaaaaaatatgagaacctgaataagatggaaaagaaggcctatgaagattctattcttaaaaatgctcgcgttatagaggcaaatattaaaaaggctggtcaacgatctccctgtaacattgctttagagaagaggagaaagagtcactgggattttgtccttgaggagatgacttggatggctaatgatttcatgcaggaacgactttggaaaagtgtggctgcagctcaggtgtgccattggattgcctctgatgcccacgccaagtttgaaaaagcaagcattctgaaaaagcagaaagctgttataaagatcattgcaaagggtatcatgagtttctggcgttcagctgaggctttacagactgctgacaggacagctaaagtgatgccacacaattcaactatgctggaggagatagatccttcgggagtcaaagcaggaaaagaacagggtcacaattcactggaagcgaaagaatccagccagcaacggtcacagattcatgattatgcagttcgatttcttgaatataatagaacagctgatttgcacgtgttgcctgaagctccaccaactcctgacaggctgaatgactttggagtcttgaaagtgtctgatcatctctcagaagaaagtctcttttatacagtagcagcacctggtgcagtgctggcatacagggactctctggaatctcttttcatgtatcacaaggaagatggcaatgctgagctcaacgatgactatgaggcatctgcgtgtgattctgttgcagtttgttcagatttgccccaggagaatgcatacgaggaggatgaaggcgagacatgtacttttctttctcctaaagcatatgttggtggttccatatcgaatatggttcacaagaagaaacatgtaatgccacaaaggattagccttgctaggccatatgaaattggtacctatgtgccttatcaaccatgcatggaaagcaagtcaaggaaccaaccattgttatcaaatggcaaaagacctacttctttccttgcaattcctccaaagcgcacacgcacagctgcaaggcaacaagttgtaagcccgtttcatgctggtgctagtgtaccgccccaagatttctcaagtggcaacacaaactcctaccaagatgatcaaagttcattgcatagtgagtctttgccgtggaggaacatggattttgaatctacagttgattctgatagacaactgccttatgatgctggtgaaatgtgcactaaagtcaacaacaagaaaaaactgaagaactcaggatacaaaattgctcaaaatgcagccaatttgtatgtgccaacttctgcaaagtttcagggccatatttatgatccaagaaagcaaatgcaagttgacttggttaataaatatgagcaggaatatctcaagaagagaacagatgtgcaccaatatggttcaaatggaaacaaagttgcatatggtggtcaacatgcttctaagaagcttaaaatggggaagcaagggatagatatttcacaagaaacttctgttgcatcacagatgagcaacatggcacatcctgctagatttataaagatcattgctaatagggatcgtgggagaaaatgcaaagcactaaagataacacgcatactgggttga

SEQ ID NO: 76254 - DNA, 3587 bp, Zea Mays
cccccgcacccgccccggacaacagcgcgcaggcctgtgaattgcttccctctccacgcgcaccttcccgcctccgcgcccagcccaaccccaccgttgccacgcccacctccggcgtccacctcgcggttctccgctgcacaatcctccggaagacttccccagtgcccctgcgacccgtctgcacacctccgcggctgctcgccctcctctacccaaaccctaaccctaggtccgcgcgccggtgagtccttcgcgctggaaggatacatctgtttgctggtgccatcagaatgaactgccgctttcagtgacatgcatgcgatgcatgcttttgcttttcttcaatggtgaatgctgagccatgctcgatgggtggaattatggattacggtgttggtgtgggcaccaaatcttcaccacgcagtatggccattgagaaagctcaggaggagctcaggcaggagtctgatgttcgcgatgaatggaggagagaattggaatttctagagaaaggaggcaacccattggatttcaattttgcacatctggaaacggtcggtgtacactctgcttctctcacaaatcaagtagaagcacaaactgtgataagtgacgcgaaaggtagtttttctgcatcacctcttggagattcggtcgagagtaccgacaaaccaggaggttccatgtgccgcgaaaccaacacagcagacaatcttatgcttttgggtggaggtaaaaatgacattgcagaagaaaaggttgtaaaaagaggaaccaaaagattaaatgcagcacaacccaaacattcattgcccagtgacggtcacaaaaacacaaaaaagcctgctgcttctggtttgtcacacctcggtgtcaaaagccaggcatatgttcggcgcaacaggtcaaagccaagtagggagagcgggaatgtcacatctattagatcttctatgatccctgctaaagtctatgagccaaatgatgaaaaggttacagcacagaaaaacaatgcagacgatcatggtgtattgtccgtttctagtataaaacagtctggacctaaccgtgacattgcaccaaagagtatagcttctgatgaccatgcagcaatggagctggatggcattcaaacaattctcgaaagtgaatgtgtggtgaacgacaaagtaaacaaagctggcaataataacaaagctaaacagttgtcatcaaatgacacaaatcatgatcgtttccttgttgggtgtggtgagatagctgctgaagtttcatctgcggaaacccctgatgccaatttaaaagttgttataaagccatgttattctagtgcatctacatatgatgagaaagagtcatgtgctgttcacgaaaaggctgatgatggacacctggatgaatgtatggcccatatccgtgaaggggaacttggtcacagcaggacacttccttgtgttgtagaagcttctacttcacacaatgatgtagtgggcccatcttgtgaaggcactgtgaatattgttgatgaacatgcagatggggacatcaatactgttgcagggaagattgattctcatgaagacctagatagtagtagacattctaacatgattctcaaggtaagtggcacatcgatagatttcagcaggcctgcttctttgaaggaaagttctgatcttgtacgacctgaagccagtaatatttctcatgtgaaagatgaaattgaagtttgtaacagtgcaatagttgcacagaaagacacagagtgcttgtcttctggccgcagcatgaacattgaggaaagtccagtttcggttaggaaaaatagctatgttgggaattcaaactctgcacatcctatatccgtaggcatcgatttgtctgatgccttgtctccaccaaaaaatgatgaatctaacgtggagagtgagattaaaaaatatgagaacctgaataagatggaaaagaaggcctatgaagattctattcttaaaaatgctcgcgttatagaggcaaatattaaaaaggctggtcaacgatctccctgtaacattgctttagagaagaggagaaagagtcactgggattttgtccttgaggagatgacttggatggctaatgatttcatgcaggaacgactttggaaaagtgtggctgcagctcaggtgtgccattggattgcctctgatgcccacgccaagtttgaaaaagcaagcattctgaaaaagcagaaagctgttataaagatcattgcaaagggtatcatgagtttctggcgttcagctgaggctttacagactgctgacaggacagctaaagtgatgccacacaattcaactatgctggaggagatagatccttcgggagtcaaagcaggaaaagaacagggtcacaattcactggaagcgaaagaatccagccagcaacggtcacagattcatgattatgcagttcgatttcttgaatataatagaacagctgatttgcacgtgttgcctgaagctccaccaactcctgacaggctgaatgactttggagtcttgaaagtgtctgatcatctctcagaagaaagtctcttttatacagtagcagcacctggtgcagtgctggcatacagggactctctggaatctcttttcatgtatcacaaggaagatggcaatgctgagctcaacgatgactatgaggcatctgcgtgtgattctgttgcagatttgccccaggagaatgcatacgaggaggatgaaggcgagacatgtacttttctttctcctaaagcatatgttggtggttccatatcgaatatggttcacaagaagaaacatgtaatgccacaaaggattagccttgctaggccatatgaaattggtacctatgtgccttatcaaccatgcatggaaagcaagtcaaggaaccaaccattgttatcaaatggcaaaagacctacttctttccttgcaattcctccaaagcgcacacgcacagctgcaaggcaacaagttgtaagcccgtttcatgctggtgctagtgtaccgccccaagatttctcaagtggcaacacaaactcctaccaagatgatcaaagttcattgcatagtgagtctttgccgtggaggaacatggattttgaatctacagttgattctgatagacaactgccttatgatgctggtgaaatgtgcactaaagtcaacaacaagaaaaaactgaagaactcaggatacaaaattgctcaaaatgcagccaatttgtatgtgccaacttctgcaaagtttcagggccatatttatgatccaagaaagcaaatgcaagttgacttggttaataaatatgagcaggaatatctcaagaagagaacagatgtgcaccaatatggttcaaatggaaacaaagttgcatatggtggtcaacatgcttctaagaagcttaaaatggggaagcaagggatagatatttcacaagaaacttctgttgcatcacagatgagcaacatggcacatcctgctagatttataaagatcattgctaatagggatcgtgggagaaaatgcaaagcactaaagataacacgcatactgggttga

SEQ ID NO: 76255 - DNA, 3428 bp, Zea Mays
ccgcacccgccccggacaacagcgcgcaggcctgtgaattgcttccctctccacgcgcaccttcccgcctccgcgcccagcccaaccccaccgttgccacgcccacctccggcgtccacctcgcggttctccgctgcacaatcctccggaagacttccccagtgcccctgcgacccgtctgcacacctccgcggctgctcgccctcctctacccaaaccctaaccctaggtccgcgcgccggtgaggggaacctctggcttaggctggaggtgatgaccccgtgcttcatttttagtctcttcggtgtccatgggatgctccatctctcagctgcggtccttcgcgctggaaggatacatctgtttgctggtgccatcagaatgaactgccgctttcagtgacatgcatgcgatgcatgcttttgcttttcttcaatggtgaatgctgagccatgctcgatgggtggaattatggattacggtgttggtgtgggcaccaaatcttcaccacgcagtatggccattgagaaagctcaggaggagctcaggcaggagtctgatgttcgcgatgaatggaggagagaattggaatttctagagaaagtatgcccgcaccaggttatctcttagattatatttctgccttcactgtacctacttactcctatttattgcagggaggcaacccattggatttcaattttgcacatctggaaacggtcggtgtacactctgcttctctcacaaatcaagtagaagcacaaactgtgataagtgacgcgaaaggtagtttttctgcatcacctcttggagattcggtcgagagtaccgacaaaccaggaggttccatgtgccgcgaaaccaacacagcagacaatcttatgcttttgggtggaggtaaaaatgacattgcagaagaaaaggttgtaaaaagaggaaccaaaagattaaatgcagcacaacccaaacattcattgcccagtgacggtcacaaaaacacaaaaaagcctgctgcttctggtttgtcacacctcggtgtcaaaagccaggcatatgttcggcgcaacaggtcaaagccaagtagggagagcgggaatgtcacatctattagatcttctatgatccctgctaaagtctatgagccaaatgatgaaaaggttacagcacagaaaaacaatgcagacgatcatggtgtattgtccgtttctagtataaaacagtctggacctaaccgtgacattgcaccaaagagtatagcttctgatgaccatgcagcaatggagctggatggcattcaaacaattctcgaaagtgaatgtgtggtgaacgacaaagtaaacaaagctggcaataataacaaagctaaacagttgtcatcaaatgacacaaatcatgatcgtttccttgttgggtgtggtgagatagctgctgaagtttcatctgcggaaacccctgatgccaatttaaaagttgttataaagccatgttattctagtgcatctacatatgatgagaaagagtcatgtgctgttcacgaaaaggctgatgatggacacctggatgaatgtatggcccatatccgtgaaggggaacttggtcacagcaggacacttccttgtgttgtagaagcttctacttcacacaatgatgtagtgggcccatcttgtgaaggcactgtgaatattgttgatgaacatgcagatggggacatcaatactgttgcagggaagattgattctcatgaagacctagatagtagtagacattctaacatgattctcaaggtaagtggcacatcgatagatttcagcaggcctgcttctttgaaggaaagttctgatcttgtacgacctgaagccagtaatatttctcatgtgaaagatgaaattgaagtttgtaacagtgcaatagttgcacagaaagacacagagtgcttgtcttctggccgcagcatgaacattgaggaaagtccagtttcggttaggaaaaatagctatgttgggaattcaaactctgcacatcctatatccgtaggcatcgatttgtctgatgccttgtctccaccaaaaaatgatgaatctaacgtggagagtgagattaaaaaatatgagaacctgaataagatggaaaagaaggcctatgaagattctattcttaaaaatgctcgcgttatagaggcaaatattaaaaaggctggtcaacgatctccctgtaacattgctttagagaagaggagaaagagtcactgggattttgtccttgaggagatgacttggatggctaatgatttcatgcaggaacgactttggaaaagtgtggctgcagctcaggtgtgccattggattgcctctgatgcccacgccaagtttgaaaaagcaagcattctgaaaaagcagaaagctgttataaagatcattgcaaagggtatcatgagtttctggcgttcagctgaggctttacagactgctgacaggacagctaaagtgatgccacacaattcaactatgctggaggagatagatccttcgggagtcaaagcaggaaaagaacagggtcacaattcactggaagcgaaagaatccagccagcaacggtcacagattcatgattatgcagttcgatttcttgaatataatagaacagctgatttgcacgtgttgcctgaagctccaccaactcctgacaggctgaatgactttggagtcttgaaagtgtctgatcatctctcagaagaaagtctcttttatacagtagcagcacctggtgcagtgctggcatacagggactctctggaatctcttttcatgtatcacaaggaagatggcaatgctgagctcaacgatgactatgaggcatctgcgtgtgattctgttgcagtttgttcagatttgccccaggagaatgcatacgaggaggatgaaggcgagacatgtacttttctttctcctaaagcatatgttggtggttccatatcgaatatggttcacaagaagaaacatgtaatgccacaaaggattagccttgctaggccatatgaaattggtacctatgtgccttatcaaccatgcatggaaagcaagtcaaggaaccaaccattgttatcaaatggcaaaagacctacttctttccttgcaattcctccaaagcgcacacgcacagctgcaaggcaacaagttgtaagcccgtttcatgctggtgctagtgtaccgccccaagatttctcaagtggcaacacaaactcctaccaagatgatcaaagttcattgcatagtgagtctttgccgtggaggaacatggattttgaatctacagttgattctgatagacaactgccttatgatgctggtgaaatgtgcactaaagtcaacaacaagaaaaaactgaagaactcaggatacaaaattgctcaaaatgcagccaattttttc

SEQ ID NO: 76256 - DNA, 3823 bp, Zea Mays
ggacaacagcgcgcaggcctgtgaattgcttccctctccacgcgcaccttcccgcctccgcgcccagcccaaccccaccgttgccacgcccacctccggcgtccacctcgcggttctccgctgcacaatcctccggaagacttccccagtgcccctgcgacccgtctgcacacctccgcggctgctcgccctcctctacccaaaccctaaccctaggtccgcgcgccggtgagtccttcgcgctggaaggatacatctgtttgctggtgccatcagaatgaactgccgctttcagtgacatgcatgcgatgcatgcttttgcttttcttcaatggtgaatgctgagccatgctcgatgggtggaattatggattacggtgttggtgtgggcaccaaatcttcaccacgcagtatggccattgagaaagctcaggaggagctcaggcaggagtctgatgttcgcgatgaatggaggagagaattggaatttctagagaaaggaggcaacccattggatttcaattttgcacatctggaaacggtcggtgtacactctgcttctctcacaaatcaagtagaagcacaaactgtgataagtgacgcgaaaggtagtttttctgcatcacctcttggagattcggtcgagagtaccgacaaaccaggaggttccatgtgccgcgaaaccaacacagcagacaatcttatgcttttgggtggaggtaaaaatgacattgcagaagaaaaggttgtaaaaagaggaaccaaaagattaaatgcagcacaacccaaacattcattgcccagtgacggtcacaaaaacacaaaaaagcctgctgcttctggtttgtcacacctcggtgtcaaaagccaggcatatgttcggcgcaacaggtcaaagccaagtagggagagcgggaatgtcacatctattagatcttctatgatccctgctaaagtctatgagccaaatgatgaaaaggttacagcacagaaaaacaatgcagacgatcatggtgtattgtccgtttctagtataaaacagtctggacctaaccgtgacattgcaccaaagagtatagcttctgatgaccatgcagcaatggagctggatggcattcaaacaattctcgaaagtgaatgtgtggtgaacgacaaagtaaacaaagctggcaataataacaaagctaaacagttgtcatcaaatgacacaaatcatgatcgtttccttgttgggtgtggtgagatagctgctgaagtttcatctgcggaaacccctgatgccaatttaaaagttgttataaagccatgttattctagtgcatctacatatgatgagaaagagtcatgtgctgttcacgaaaaggctgatgatggacacctggatgaatgtatggcccatatccgtgaaggggaacttggtcacagcaggacacttccttgtgttgtagaagcttctacttcacacaatgatgtagtgggcccatcttgtgaaggcactgtgaatattgttgatgaacatgcagatggggacatcaatactgttgcagggaagattgattctcatgaagacctagatagtagtagacattctaacatgattctcaaggtaagtggcacatcgatagatttcagcaggcctgcttctttgaaggaaagttctgatcttgtacgacctgaagccagtaatatttctcatgtgaaagatgaaattgaagtttgtaacagtgcaatagttgcacagaaagacacagagtgcttgtcttctggccgcagcatgaacattgaggaaagtccagtttcggttaggaaaaatagctatgttgggaattcaaactctgcacatcctatatccgtaggcatcgatttgtctgatgccttgtctccaccaaaaaatgatgaatctaacgtggagagtgagattaaaaaatatgagaacctgaataagatggaaaagaaggcctatgaagattctattcttaaaaatgctcgcgttatagaggcaaatattaaaaaggctggtcaacgatctccctgtaacattgctttagagaagaggagaaagagtcactgggattttgtccttgaggagatgacttggatggctaatgatttcatgcaggaacgactttggaaaagtgtggctgcagctcaggtgtgccattggattgcctctgatgcccacgccaagtttgaaaaagcaagcattctgaaaaagcagaaagctgttataaagatcattgcaaagggtatcatgagtttctggcgttcagctgaggctttacagactgctgacaggacagctaaagtgatgccacacaattcaactatgctggaggagatagatccttcgggagtcaaagcaggaaaagaacagggtcacaattcactggaagcgaaagaatccagccagcaacggtcacagattcatgattatgcagttcgatttcttgaatataatagaacagctgatttgcacgtgttgcctgaagctccaccaactcctgacaggctgaatgactttggagtcttgaaagtgtctgatcatctctcagaagaaagtctcttttatacagtagcagcacctggtgcagtgctggcatacagggactctctggaatctcttttcatgtatcacaaggaagatggcaatgctgagctcaacgatgactatgaggcatctgcgtgtgattctgttgcagatttgccccaggagaatgcatacgaggaggatgaaggcgagacatgtacttttctttctcctaaagcatatgttggtggttccatatcgaatatggttcacaagaagaaacatgtaatgccacaaaggattagccttgctaggccatatgaaattggtacctatgtgccttatcaaccatgcatggaaagcaagtcaaggaaccaaccattgttatcaaatggcaaaagacctacttctttccttgcaattcctccaaagcgcacacgcacagctgcaaggcaacaagttgtaagcccgtttcatgctggtgctagtgtaccgccccaagatttctcaagtggcaacacaaactcctaccaagatgatcaaagttcattgcatagtgagtctttgccgtggaggaacatggattttgaatctacagttgattctgatagacaactgccttatgatgctggtgaaatgtgcactaaagtcaacaacaagaaaaaactgaagaactcaggatacaaaattgctcaaaatgcagccaatttgtatgtgccaacttctgcaaaggttcatttctcaagcttcattggcgctcctttgttactgctggaatatctcaagaagagaacagatgtgcaccaatatggttcaaatggaaacaaagttgcatatggtggtcaacatgcttctaagaagcttaaaatggggaagcaagggatagatatttcacaagaaacttctgttgcatcacagatgagcaacatggcacatcctgctagatttataaagatcattgctaatagggatcgtgggagaaaatgcaaagcactaaagataacacgcatactgggttgaacccttttgtccattgtgttttcgatttatttgatccctatgtgcaaatgtagggtctgtttggttggggctgtggctgcgaaaaaagttgctctggctctgagctgtaaaaaaagttgctgtgaactatgagctgtttttttttctcgaaagcgcaggggaactgcgccttaaattatattaagaagaggaaaaaaggtctgtagaagaccggattacaaatagaaaaaaacgctccttacggaggccaaaaacaagcataaagaaacaaatcca

SEQ ID NO: 76257 - DNA, 3456 bp, Zea Mays
ccgcacccgccccggacaacagcgcgcaggcctgtgaattgcttccctctccacgcgcaccttcccgcctccgcgcccagcccaaccccaccgttgccacgcccacctccggcgtccacctcgcggttctccgctgcacaatcctccggaagacttccccagtgcccctgcgacccgtctgcacacctccgcggctgctcgccctcctctacccaaaccctaaccctaggtccgcgcgccggtgaggggaacctctggcttaggctggaggtgatgaccccgtgcttcatttttagtctcttcggtgtccatgggatgctccatctctcagctgcggtccttcgcgctggaaggatacatctgtttgctggtgccatcagaatgaactgccgctttcagtgacatgcatgcgatgcatgcttttgcttttcttcaatggtgaatgctgagccatgctcgatgggtggaattatggattacggtgttggtgtgggcaccaaatcttcaccacgcagtatggccattgagaaagctcaggaggagctcaggcaggagtctgatgttcgcgatgaatggaggagagaattggaatttctagagaaaggaggcaacccattggatttcaattttgcacatctggaaacggtcggtgtacactctgcttctctcacaaatcaagtagaagcacaaactgtgataagtgacgcgaaaggtagtttttctgcatcacctcttggagattcggtcgagagtaccgacaaaccaggaggttccatgtgccgcgaaaccaacacagcagacaatcttatgcttttgggtggaggtaaaaatgacattgcagaagaaaaggttgtaaaaagaggaaccaaaagattaaatgcagcacaacccaaacattcattgcccagtgacggtcacaaaaacacaaaaaagcctgctgcttctggtttgtcacacctcggtgtcaaaagccaggcatatgttcggcgcaacaggtcaaagccaagtagggagagcgggaatgtcacatctattagatcttctatgatccctgctaaagtctatgagccaaatgatgaaaaggttacagcacagaaaaacaatgcagacgatcatggtgtattgtccgtttctagtataaaacagtctggacctaaccgtgacattgcaccaaagagtatagcttctgatgaccatgcagcaatggagctggatggcattcaaacaattctcgaaagtgaatgtgtggtgaacgacaaagtaaacaaagctggcaataataacaaagctaaacagttgtcatcaaatgacacaaatcatgatcgtttccttgttgggtgtggtgagatagctgctgaagtttcatctgcggaaacccctgatgccaatttaaaagttgttataaagccatgttattctagtgcatctacatatgatgagaaagagtcatgtgctgttcacgaaaaggctgatgatggacacctggatgaatgtatggcccatatccgtgaaggggaacttggtcacagcaggacacttccttgtgttgtagaagcttctacttcacacaatgatgtagtgggcccatcttgtgaaggcactgtgaatattgttgatgaacatgcagatggggacatcaatactgttgcagggaagattgattctcatgaagacctagatagtagtagacattctaacatgattctcaaggtaagtggcacatcgatagatttcagcaggcctgcttctttgaaggaaagttctgatcttgtacgacctgaagccagtaatatttctcatgtgaaagatgaaattgaagtttgtaacagtgcaatagttgcacagaaagacacagagtgcttgtcttctggccgcagcatgaacattgaggaaagtccagtttcggttaggaaaaatagctatgttgggaattcaaactctgcacatcctatatccgtaggcatcgatttgtctgatgccttgtctccaccaaaaaatgatgaatctaacgtggagagtgagattaaaaaatatgagaacctgaataagatggaaaagaaggcctatgaagattctattcttaaaaatgctcgcgttatagaggcaaatattaaaaaggctggtcaacgatctccctgtaacattgctttagagaagaggagaaagagtcactgggattttgtccttgaggagatgacttggatggctaatgatttcatgcaggaacgactttggaaaagtgtggctgcagctcaggtgtgccattggattgcctctgatgcccacgccaagtttgaaaaagcaagcattctgaaaaagcagaaagctgttataaagatcattgcaaagggtatcatgagtttctggcgttcagctgaggctttacagactgctgacaggacagctaaagtgatgccacacaattcaactatgctggaggagatagatccttcgggagtcaaagcaggaaaagaacagggtcacaattcactggaagcgaaagaatccagccagcaacggtcacagattcatgattatgcagttcgatttcttgaatataatagaacagctgatttgcacgtgttgcctgaagctccaccaactcctgacaggctgaatgactttggagtcttgaaagtgtctgatcatctctcagaagaaagtctcttttatacagtagcagcacctggtgcagtgctggcatacagggactctctggaatctcttttcatgtatcacaagtgcggcgttttctctatcggttgcctgggcatcgtgttcgcggcgctccctggtgtggaggcctgtcattcgcccccctctccctggagcgacttctgtcggtgtcatggtgggatcgtcggaaggagggtttgcgtcgcggaggtctgtgatgcactctccttgaagtttgacattcagactgatgtgctcgaccttcgacgagctgcaccaagcaccttcattgcctacctgcccaatgaagacttggctcgtcgcatctacaatggaggtcaacctcgttttgcccctcctctccgtctacatattcggtggtggtctcgtcaagccctggcatgcgattgtagagctttgtctcagctccttgaagttgaactgcgtggtatccctactcatctttgggcgattgagatggcagaacttctttttagtgaccattgtttgatccaaggtgtacacgctgactccaagtttggatccatcggcgttcaagttaagaggctggtgtttagatccggagagcattcctgtttcattggatctccatgttgaagagcctcctgttgctggtgatgatgtgttgctgggccctcggacgctgatctatcccatcttgatcaccgtttgtcctccaacgatctcttggcatctcccctgctcttctgagtgcctcggttgcagagctagcgacacctggctcctcgtcttccttag

SEQ ID NO: 76258 - DNA, 3366 bp, Zea Mays
cccgcacccgccccggacaacagcgcgcaggcctgtgaattgcttccctctccacgcgcaccttcccgcctccgcgcccagcccaaccccaccgttgccacgcccacctccggcgtccacctcgcggttctccgctgcacaatcctccggaagacttccccagtgcccctgcgacccgtctgcacacctccgcggctgctcgccctcctctacccaaaccctaaccctaggtccgcgcgccggtgagtccttcgcgctggaaggatacatctgtttgctggtgccatcagaatgaactgccgctttcagtgacatgcatgcgatgcatgcttttgcttttcttcaatggtgaatgctgagccatgctcgatgggtggaattatggattacggtgttggtgtgggcaccaaatcttcaccacgcagtatggccattgagaaagctcaggaggagctcaggcaggagtctgatgttcgcgatgaatggaggagagaattggaatttctagagaaaggaggcaacccattggatttcaattttgcacatctggaaacggtcggtgtacactctgcttctctcacaaatcaagtagaagcacaaactgtgataagtgacgcgaaaggtagtttttctgcatcacctcttggagattcggtcgagagtaccgacaaaccaggaggttccatgtgccgcgaaaccaacacagcagacaatcttatgcttttgggtggaggtaaaaatgacattgcagaagaaaaggttgtaaaaagaggaaccaaaagattaaatgcagcacaacccaaacattcattgcccagtgacggtcacaaaaacacaaaaaagcctgctgcttctggtttgtcacacctcggtgtcaaaagccaggcatatgttcggcgcaacaggtcaaagccaagtagggagagcgggaatgtcacatctattagatcttctatgatccctgctaaagtctatgagccaaatgatgaaaaggttacagcacagaaaaacaatgcagacgatcatggtgtattgtccgtttctagtataaaacagtctggacctaaccgtgacattgcaccaaagagtatagcttctgatgaccatgcagcaatggagctggatggcattcaaacaattctcgaaagtgaatgtgtggtgaacgacaaagtaaacaaagctggcaataataacaaagctaaacagttgtcatcaaatgacacaaatcatgatcgtttccttgttgggtgtggtgagatagctgctgaagtttcatctgcggaaacccctgatgccaatttaaaagttgttataaagccatgttattctagtgcatctacatatgatgagaaagagtcatgtgctgttcacgaaaaggctgatgatggacacctggatgaatgtatggcccatatccgtgaaggggaacttggtcacagcaggacacttccttgtgttgtagaagcttctacttcacacaatgatgtagtgggcccatcttgtgaaggcactgtgaatattgttgatgaacatgcagatggggacatcaatactgttgcagggaagattgattctcatgaagacctagatagtagtagacattctaacatgattctcaaggtaagtggcacatcgatagatttcagcaggcctgcttctttgaaggaaagttctgatcttgtacgacctgaagccagtaatatttctcatgtgaaagatgaaattgaagtttgtaacagtgcaatagttgcacagaaagacacagagtgcttgtcttctggccgcagcatgaacattgaggaaagtccagtttcggttaggaaaaatagctatgttgggaattcaaactctgcacatcctatatccgtaggcatcgatttgtctgatgccttgtctccaccaaaaaatgatgaatctaacgtggagagtgagattaaaaaatatgagaacctgaataagatggaaaagaaggcctatgaagattctattcttaaaaatgctcgcgttatagaggcaaatattaaaaaggctggtcaacgatctccctgtaacattgctttagagaagaggagaaagagtcactgggattttgtccttgaggagatgacttggatggctaatgatttcatgcaggaacgactttggaaaagtgtggctgcagctcaggtgtgccattggattgcctctgatgcccacgccaagtttgaaaaagcaagcattctgaaaaagcagaaagctgttataaagatcattgcaaagggtatcatgagtttctggcgttcagctgaggctttacagactgctgacaggacagctaaagtgatgccacacaattcaactatgctggaggagatagatccttcgggagtcaaagcaggaaaagaacagggtcacaattcactggaagcgaaagaatccagccagcaacggtcacagattcatgattatgcagttcgatttcttgaatataatagaacagctgatttgcacgtgttgcctgaagctccaccaactcctgacaggctgaatgactttggagtcttgaaagtgtctgatcatctctcagaagaaagtctcttttatacagtagcagcacctggtgcagtgctggcatacagggactctctggaatctcttttcatgtatcacaagtgcggcgttttctctatcggttgcctgggcatcgtgttcgcggcgctccctggtgtggaggcctgtcattcgcccccctctccctggagcgacttctgtcggtgtcatggtgggatcgtcggaaggagggtttgcgtcgcggaggtctgtgatgcactctccttgaagtttgacattcagactgatgtgctcgaccttcgacgagctgcaccaagcaccttcattgcctacctgcccaatgaagacttggctcgtcgcatctacaatggaggtcaacctcgttttgcccctcctctccgtctacatattcggtggtggtctcgtcaagccctggcatgcgattgtagagctttgtctcagctccttgaagttgaactgcgtggtatccctactcatctttgggcgattgagatggcagaacttctttttagtgaccattgtttgatccaaggtgtacacgctgactccaagtttggatccatcggcgttcaagttaagaggctggtgtttagatccggagagcattcctgtttcattggatctccatgttgaagagcctcctgttgctggtgatgatgtgttgctgggccctcggacgctgatctatcccatcttgatcaccgtttgtcctccaacgatctcttggcatctcccctgctcttctgagtgcctcggttgcagagctagcgacacctggctcctcgtcttccttag

SEQ ID NO: 76259 - DNA, 2426 bp, Zea Mays
gggatctcagctacccaagaaagagatgcttgttgctacgtttgtctcatgtggcatgcttagaaatttgcaggtgaggtaccgctcaagctacactggtagctttccacactggatacgggaactggactccccaagagaagcttctctgcttaaacagatctataaaagcgatccagaaagagttgtacaaatctttgaaaggcacccttcattgcattccaactctgctgctctttctgagtacataaaagctcttgccagtcttgacaggctggaggatagccccttgctcaaaacattgcagagaggatttgctacttcagcagctgaggaagaaagaagtactggtcttgctgctttcgggagtgtgggtcggcggacgaaagatggagctcttggtacagcgaatgcacctattcacatggttactgctggaaccggtcaatttaaggagcaactttggaagaccttccgaagcgttgcacttactttccttgtgatctccggcattggagctctccttgaagacaggggaattagtaaagggcttggattgaacgaagaggttcggcccaacatggattcgaagacaaagttcagtgatgtcaagggagttgacgaagctaaagctgaacttgaggaaattgttcactacctacgagatcctaagcgttttacatgccttggtggaaagcttcctaaaggtgttttgctggtgggaccacctggaactggaaaaactatgctggcaagggctatagctggggaagctggtgttcctttcttctcatgcagcggtagtgaatttgaggagatgtttgtgggtgtcggggctaaaagagtgagggacctgttcaatgcagcaaaaaaatgttctccttgtataatattcattgatgagattgacgcgattggtgggagcagaaatcccaaggatcaacaatacatgaagatgaccttgaatcagttgcttgttgaactagatggctttaagcagaatggcggggtcattgtcattgctgccactaacttccctcagtcacttgacaaggcgcttgttaggcctgggcgcttcgaccgtcatattgtggttcctaatccagatgttgagggccggcggcagatcctggaggctcatatgtcaaaggttttaagagctgatgatgtggatctgatgatcattgcaaggggaactcctggtttctcaggatcatgatgggcagtgagcgcaaatcagcagttatatctgatgaatccaggaagattactgcgtatcacgagggagggcatgcccttgttgcgatccacacagagggcgctcaccctgttcacaaggctacaattgttccgaggggagtttctcttggtatggttatacagctcccagagaaggaccagcatagcgtttcaagaaagcagatgctggcgaggctggatgtgtgcatgggaggaagagtggctgaggagcttatatttggggaaagcgaggtaaccaccggttcctcgtctgacctaaactacgcgactaggctggcaagagccatggtgaccaagtatggtatgagtaagcgtgtgggtcttgtttcctacagtgagaatagtgttagcggccaaacaagtgtgattgataaggaggtgaaggaaattctggagaaggcgtacaataacgcaaaggcaattctgacaactcacgataaggagcttcatatgctagcgaacgcccttcttgagcatgagacactgtctggagcgcagatcaagaaattactgccacaggtggacaatagtaacaataagcagaagaaggctgccaaggtgccgcagaagacaccggcagccagagccaagggagttgcacaagaggcggcagggaaagccaagggagttgcaggtacagcagcggtggcacaagaagcggcaacagcgaacaccgagggaggtgcaggtacagcagcggtgccacaagaagcggcaacgtcggtggcagcgaaagccaagggagttgccggtacagcggcggcggcacaagaagcggcaacagcaaacaccgagggaggtgcaggtacagcagcggcgccacaagaagcggcaacgtcggtggcagcgaaagccaagggagttgccggtacagcggcggtggcacaagaagcggcaacagcaaacaccgagggagttgcaggtgttggctcatagtggcattggggagaagcacaagtcagcgttttgtgcagccccaactagatgagcaccaagtgtgattagggcaacaatgtgtttggtttccaaccctagatgatcgcggaattgtactggaatggaacactaagcatcgagaatactaatcctttcgtccatgtttcacatgatatattctctgaaacaacgtttggaaactctcacagtgagtaggcagagtagcagat

SEQ ID NO: 76260 - DNA, 2665 bp, Zea Mays
caggcctcaatcctatatactgcaacgatgaacctcacgatacgccacatggctcaaatcaatatctttattcgttttttctacctacacccccaatccaggccgcacggcttcgatcggcaaatgccgtttgcagccagctggtggtttcttctcctttcagggcacctagaagcgacaatgctgcaggtggcatgcttagaaatttgcaggtgaggtaccgctcaagctacactggtagctttccacactggatacgggaactggactccccaagagaagcttctctgcttaaacagatctataaaagcgatccagaaagagttgtacaaatctttgaaaggcacccttcattgcattccaactctgctgctctttctgagtacataaaagctcttgccagtcttgacaggctggaggatagccccttgctcaaaacattgcagagaggatttgctacttcagcagctgaggaagaaagaagtactggtcttgctgctttcgggagtgtgggtcggcggacgaaagatggagctcttggtacagcgaatgcacctattcacatggttactgctggaaccggtcaatttaaggagcaactttggaagaccttccgaagcgttgcacttactttccttgtgatctccggcattggagctctccttgaagacaggggaattagtaaagggcttggattgaacgaagaggttcggcccaacatggattcgaagacaaagttcagtgatgtcaagggagttgacgaagctaaagctgaacttgaggaaattgttcactacctacgagatcctaagcgttttacatgccttggtggaaagcttcctaaaggtgttttgctggtgggaccacctggaactggaaaaactatgctggcaagggctatagctggggaagctggtgttcctttcttctcatgcagcggtagtgaatttgaggagatgtttgtgggtgtcggggctaaaagagtgagggacctgttcaatgcagcaaaaaaatgttctccttgtataatattcattgatgagattgacgcgattggtgggagcagaaatcccaaggatcaacaatacatgaagatgaccttgaatcagttgcttgttgaactagatggctttaagcagaatggcggggtcattgtcattgctgccactaacttccctcagtcacttgacaaggcgcttgttaggcctgggcgcttcgaccgtcatattgtggttcctaatccagatgttgagggccggcggcagatcctggaggctcatatgtcaaaggttttaagagctgatgatgtggatctgatgatcattgcaaggggaactcctggtttctcaggtgcagatcttgcgaacttggtgaatgtagctgctctgaaggccgctatggatgaagcaaaagctgttacgatgcaggaccttgaatatgcgaaggacaggatcatgatgggcagtgagcgcaaatcagcagttatatctgatgaatccaggaagattactgcgtatcacgagggagggcatgcccttgttgcgatccacacagagggcgctcaccctgttcacaaggctacaattgttccgaggggagtttctcttggtatggttatacagctcccagagaaggaccagcatagcgtttcaagaaagcagatgctggcgaggctggatgtgtgcatgggaggaagagtggctgaggagcttatatttggggaaagcgaggtaaccaccggttcctcgtctgacctaaactacgcgactaggctggcaagagccatggtgaccaagtatggtatgagtaagcgtgtgggtcttgtttcctacagtgagaatagtgttagcggccaaacaagtgtgattgataaggaggtgaaggaaattctggagaaggcgtacaataacgcaaaggcaattctgacaactcacgataaggagcttcatatgctagcgaacgcccttcttgagcatgagacactgtctggagcgcagatcaagaaattactgccacaggtggacaatagtaacaataagcagaagaaggctgccaaggtgccgcagaagacaccggcagccagagccaagggagttgcacaagaggcggcagggaaagccaagggagttgcaggtacagcagcggtggcacaagaagcggcaacagcgaacaccgagggaggtgcaggtacagcagcggtgccacaagaagcggcaacgtcggtggcagcgaaagccaagggagttgccggtacagcggcggcggcacaagaagcggcaacagcaaacaccgagggaggtgcaggtacagcagcggcgccacaagaagcggcaacgtcggtggcagcgaaagccaagggagttgccggtacagcggcggtggcacaagaagcggcaacagcaaacaccgagggagttgcaggtgttggctcatagtggcattggggagaagcacaagtcagcgttttgtgcagccccaactagatgagcaccaagtgtgattagggcaacaatgtgtttggtttccaaccctagatgatcgcggaattgtactggaatggaacactaagcatcgagaatactaatcctttcgtccatgtttcacatgatatattctctgaaacaacgtttggaaactctcacagtgagtaggcagagtagcagat

SEQ ID NO: 76261 - DNA, 2931 bp, Zea Mays
atggccacggccgcgccggcgtccgtcgaggggtttaactgcaccaccaaccgcacgtacccatgccaggtgtacacgctctaccgcgccggcttcgcaggcgtgccgctcaatctcgcggccatcggtgacctcttcgccgtcagtcgcttcatggtcgcgcacgccaacaacctctccacgacggccgcgctggccaacgggcagccactgctcgtgccgctccagtgcggctgcccctcccgatggttaagatgcaaaaagttcagacgcgggcacggacatggacaccttcgtttcactctaaagcccctgcaaagggtaatctccccactcgctccgtgcgggttcgggtctccgcgctgggactccgatcacccccgccgcctgcccgcccgccttccctccctcaccgcgtctctcttggatctccgctcgccgaccgctcgccgctctcatggcctggctcgtcgccatctccaaggccgcacggcttcgatcggcaaatgccgtttgcagccagctggtggtttcttctcctttcagggcacctagaagcgacaatgctgcaggtggcatgcttagaaatttgcaggtgaggtaccgctcaagctacactggtagctttccacactggatacgggaactggactccccaagagaagcttctctgcttaaacagatctataaaagcgatccagaaagagttgtacaaatctttgaaaggcacccttcattgcattccaactctgctgctctttctgagtacataaaagctcttgccagtcttgacaggctggaggatagccccttgctcaaaacattgcagagaggatttgctacttcagcagctgaggaagaaagaagtactggtcttgctgctttcgggagtgtgggtcggcggacgaaagatggagctcttggtacagcgaatgcacctattcacatggttactgctggaaccggtcaatttaaggagcaactttggaagaccttccgaagcgttgcacttactttccttgtgatctccggcattggagctctccttgaagacaggggaattagtaaagggcttggattgaacgaagaggttcggcccaacatggattcgaagacaaagttcagtgatgtcaagggagttgacgaagctaaagctgaacttgaggaaattgttcactacctacgagatcctaagcgttttacatgccttggtggaaagcttcctaaaggtgttttgctggtgggaccacctggaactggaaaaactatgctggcaagggctatagctggggaagctggtgttcctttcttctcatgcagcggtagtgaatttgaggagatgtttgtgggtgtcggggctaaaagagtgagggacctgttcaatgcagcaaaaaaatgttctccttgtataatattcattgatgagattgacgcgattggtgggagcagaaatcccaaggatcaacaatacatgaagatgaccttgaatcagttgcttgttgaactagatggctttaagcagaatggcggggtcattgtcattgctgccactaacttccctcagtcacttgacaaggcgcttgttaggcctgggcgcttcgaccgtcatattgtggttcctaatccagatgttgagggccggcggcagatcctggaggctcatatgtcaaaggttttaagagctgatgatgtggatctgatgatcattgcaaggggaactcctggtttctcaggtgcagatcttgcgaacttggtgaatgtagctgctctgaaggccgctatggatgaagcaaaagctgttacgatgcaggaccttgaatatgcgaaggacaggatcatgatgggcagtgagcgcaaatcagcagttatatctgatgaatccaggaagattactgcgtatcacgagggagggcatgcccttgttgcgatccacacagagggcgctcaccctgttcacaaggctacaattgttccgaggggagtttctcttggtatggttatacagctcccagagaaggaccagcatagcgtttcaagaaagcagatgctggcgaggctggatgtgtgcatgggaggaagagtggctgaggagcttatatttggggaaagcgaggtaaccaccggttcctcgtctgacctaaactacgcgactaggctggcaagagccatggtgaccaagtatggtatgagtaagcgtgtgggtcttgtttcctacagtgagaatagtgttagcggccaaacaagtgtgattgataaggaggtgaaggaaattctggagaaggcgtacaataacgcaaaggcaattctgacaactcacgataaggagcttcatatgctagcgaacgcccttcttgagcatgagacactgtctggagcgcagatcaagaaattactgccacaggtggacaatagtaacaataagcagaagaaggctgccaaggtgccgcagaagacaccggcagccagagccaagggagttgcacaagaggcggcagggaaagccaagggagttgcaggtacagcagcggtggcacaagaagcggcaacagcgaacaccgagggaggtgcaggtacagcagcggcgccacaagaagcggcaacgtcggtggcagcgaaagccaagggagttgccggtacagcggcggtggcacaagaagcggcaacagcaaacaccgagggagttgcaggtgttggctcatagtggcattggggagaagcacaagtcagcgttttgtgcagccccaactagatgagcaccaagtgtgattagggcaacaatgtgtttggtttccaaccctagatgatcgcggaattgtactggaatggaacactaagcatcgagaatactaatcctttcgtccatgtttcacatgatatattctctgaaacaacgtttggaaactctcacagtgagtaggcagagtagcagat

SEQ ID NO: 76262 - DNA, 2787 bp, Zea Mays
atggccacggccgcgccggcgtccgtcgaggggtttaactgcaccaccaaccgcacgtacccatgccaggtgtacacgctctaccgcgccggcttcgcaggcgtgccgctcaatctcgcggccatcggtgacctcttcgccgtcagtcgcttcatggtcgcgcacgccaacaacctctccacgacggccgcgctggccaacgggcagccactgctcgtgccgctccagtgcggctgcccctcccgatggttaagatgcaaaaagttcagacgcgggcacggacatggacaccttcgtttcactctaaagcccctgcaaagggtaatctccccactcgctccgtgcgggttcgggtctccgcgctgggactccgatcacccccgccgcctgcccgcccgccttccctccctcaccgcgtctctcttggatctccgctcgccgaccgctcgccgctctcatggcctggctcgtcgccatctccaaggccgcacggcttcgatcggcaaatgccgtttgcagccagctggtggtttcttctcctttcagggcacctagaagcgacaatgctgcaggatttgctacttcagcagctgaggaagaaagaagtactggtcttgctgctttcgggagtgtgggtcggcggacgaaagatggagctcttggtacagcgaatgcacctattcacatggttactgctggaaccggtcaatttaaggagcaactttggaagaccttccgaagcgttgcacttactttccttgtgatctccggcattggagctctccttgaagacaggggaattagtaaagggcttggattgaacgaagaggttcggcccaacatggattcgaagacaaagttcagtgatgtcaagggagttgacgaagctaaagctgaacttgaggaaattgttcactacctacgagatcctaagcgttttacatgccttggtggaaagcttcctaaaggtgttttgctggtgggaccacctggaactggaaaaactatgctggcaagggctatagctggggaagctggtgttcctttcttctcatgcagcggtagtgaatttgaggagatgtttgtgggtgtcggggctaaaagagtgagggacctgttcaatgcagcaaaaaaatgttctccttgtataatattcattgatgagattgacgcgattggtgggagcagaaatcccaaggatcaacaatacatgaagatgaccttgaatcagttgcttgttgaactagatggctttaagcagaatggcggggtcattgtcattgctgccactaacttccctcagtcacttgacaaggcgcttgttaggcctgggcgcttcgaccgtcatattgtggttcctaatccagatgttgagggccggcggcagatcctggaggctcatatgtcaaaggttttaagagctgatgatgtggatctgatgatcattgcaaggggaactcctggtttctcaggtgcagatcttgcgaacttggtgaatgtagctgctctgaaggccgctatggatgaagcaaaagctgttacgatgcaggaccttgaatatgcgaaggacaggatcatgatgggcagtgagcgcaaatcagcagttatatctgatgaatccaggaagattactgcgtatcacgagggagggcatgcccttgttgcgatccacacagagggcgctcaccctgttcacaaggctacaattgttccgaggggagtttctcttggtatggttatacagctcccagagaaggaccagcatagcgtttcaagaaagcagatgctggcgaggctggatgtgtgcatgggaggaagagtggctgaggagcttatatttggggaaagcgaggtaaccaccggttcctcgtctgacctaaactacgcgactaggctggcaagagccatggtgaccaagtatggtatgagtaagcgtgtgggtcttgtttcctacagtgagaatagtgttagcggccaaacaagtgtgattgataaggaggtgaaggaaattctggagaaggcgtacaataacgcaaaggcaattctgacaactcacgataaggagcttcatatgctagcgaacgcccttcttgagcatgagacactgtctggagcgcagatcaagaaattactgccacaggtggacaatagtaacaataagcagaagaaggctgccaaggtgccgcagaagacaccggcagccagagccaagggagttgcacaagaggcggcagggaaagccaagggagttgcaggtacagcagcggtggcacaagaagcggcaacagcgaacaccgagggaggtgcaggtacagcagcggtgccacaagaagcggcaacgtcggtggcagcgaaagccaagggagttgccggtacagcggcggcggcacaagaagcggcaacagcaaacaccgagggaggtgcaggtacagcagcggcgccacaagaagcggcaacgtcggtggcagcgaaagccaagggagttgccggtacagcggcggtggcacaagaagcggcaacagcaaacaccgagggagttgcaggtgttggctcatagtggcattggggagaagcacaagtcagcgttttgtgcagccccaactagatgagcaccaagtgtgattagggcaacaatgtgtttggtttccaaccctagatgatcgcggaattgtactggaatggaacactaagcatcgagaatactaatcctttcgtccatgtttcacatgatatattctctgaaacaacgtttggaaactctcacagtgagtaggcagagtagcagat

SEQ ID NO: 76263 - DNA, 1608 bp, Zea Mays
aaactcgggaaaaaaaacccagcaaaaaaacccagctcggtacagagaaatcaggatcatttgcatagatatcaaccttgtggattggcaaagaatcctacctggaaacccaataagcaaactaatgacgcccgcaaagctgagaaacatgcacgcaaaaatatgaagatgagaaccataagctctgttgatcaggagaacaagaacaggacaagagattctaatgatcatgaccaccacaaaccaaagacaggaaagcacaaatcaccaagagatggggttgtccttttggagaaaaggcaggagaagcgttctttggacaagaacaagcccgctgaacatgatattaaaatgcatattgccgtagttcctagtggtatggattgtgttggcgcctttcagcagcagcgctttaaaagcaggtgtgatcctgaagagtcattggaaagcttaagcaaccattcaaactgtgagagtggctcggtatcatcgctggtgtttgagaagccactgcaggcattgccgcccggaaagaatctgctgggttatgaaatatgtcatgcagcgaagccaatcaagacactgcatttgaatcctgccctgtatgatgtggagttgagcgtgttggggagcagcaacacggggcgccgtgtgccccttgtttctctaatgagtaggtggaattgtaaagccgtcgtggggtatcctgtctccgtggaggtcagcgatgatgtgtttggctgtccttctccttcatcagagaaagatatccagcaggctgctacaaacagtgtgaatgggatagtattgaagaaggatgaaactgagggtttggaacgtgttgttgtgccaccatcagcgcagacatcccggccaagatgcaaaagccgcagcaggagggcatcagagaaagcagtggacaagttatggcagccacataccaaatggccagcatcctcgtcgagaaagatgcggaggctttcctcttttggtccaggccagagagatgggaagtcagcggtgaggaaagtgtccggggcaaccgtcgcgtgcatcccgctccgagttgttttcagcaggatcaacgaggcgctgagcttctcagttaatgagaatgccctagctgggtgtgggactgcttcccggctgaggaatacttggtagctaggttttgctgtttgttgttcaccgcttgctttttttgtagccatgccataatagcattggtaaatgtttagtgtggcctatcacttggagcatggtaataggtgatgatgtatcgtcatcttggttgtgagccacatcacacttcactcacagtagaggcagtagaaggaagaactgtgctgatgcacccctctttattaaaaaaaagaacatttgatgggtctgtggagcacatggtctgatggtggaagcaaataaattagcgtaggatgatggttacttgctgggagtctgttttggtattagtgatgcatcgctgctgtaatgtaacttcctgtgttgccatcctaagctaattgtaatcggaagtgtcagcttctgcttgccttttttttttttggttacttcctccatccttcccagattacaagtatcattagc

SEQ ID NO: 76264 - DNA, 2810 bp, Zea Mays
ctcttctccccttcccctacccccgcctaccccactgctccgcttctcctcacgccaccacagggggagcggagcccgcggcctgtgccctccgcgccgccgcagtccatcctcctggccaggcggggagatcagattggcgaagaggaagaggaggaggaagagcgccagtgccgccacagatggggggtctgcccaaggagggggccccggcggtggatgtctccgtggaggggaccctggtctggttgcgccgccccaacggctcctggtggcccagcatcgtcatctcgccgcaagacgtccccgaaggctgcgccccgccgccgcgctgccccgccacacccatcatgctcctcggccgccgccccgacggaccaacctacgtgtgcaagcgcgtcaagcccttccgctgcggggagctcgacttggaacagcgcattgccaacgccctcaccctcgccgccaccagcgacaggtccacctggagctacaacaagggaaggtacgcccgcatggaggacgccattctccaggccctcgacatagagaaggagctcgctctcggcccggcaaccaaggcctacctccatgcccgcagctgctcgcccaggcccaaagttgaaatgcccaacggacaagtcaaagatactgcagcaaaggatcatgctccaaccatccagccaccgctgccgccgcccaagaggaagcgcaagacgccttatgactccgaggacgatgtgcccgaagtgtcccgtcgcatgagggacctcagggacatcggatccaaggcggtcgtcccaatggacttggccaatgctgctgcagtctctgctcccaagtacgatgatctaactaatgctgggcaggccaaaagaattgtgcactctcaggccaccgcaaagaggaagcatgctggtctgcatcaggaccaaccttgtgggatccccaggaagaaggataggtctcgtccgctctcggagctctgtaatggagacatgtggggtggttccagaccaaatggccagaaggccgatgaacatttgttgggtgtggctacatgttcaagcagctcctctggcacttcaaccttggacactccattggacatgaacaactgtcatcgcagcatggcattcaaaacagatcaagcaaagggcacagaaatatcctgcatgacaaggctactgagtgatgattcccggcatggaaatgattttgtcggaactcctgctgcacaaaatattgtggaaccagatcatttgcatagatatcaaccttgtggattggcaaagaatcctacctggaaacccaataagcaaactaatgacgcccgcaaagctgagaaacatgcacgcaaaaatatgaagatgagaaccataagctctgttgatcaggagaacaagaacaggacaagagattctaatgatcatgaccaccacaaaccaaagacaggaaagcacaaatcaccaagagatggggttgtccttttggagaaaaggcaggagaagcgttctttggacaagaacaagcccgctgaacatgatattaaaatgcatattgccgtagttcctagtggtatggattgtgttggcgcctttcagcagcagcgctttaaaagcaggtgtgatcctgaagagtcattggaaagcttaagcaaccattcaaactgtgagagtggctcggtatcatcgctggtgtttgagaagccactgcaggcattgccgcccggaaagaatctgctgggttatgaaatatgtcatgcagcgaagccaatcaagacactgcatttgaatcctgccctgtatgatgtggagttgagcgtgttggggagcagcaacacggggcgccgtgtgccccttgtttctctaatgagtaggtggaattgtaaagccgtcgtggggtatcctgtctccgtggaggtcagcgatgatgtgtttggctgtccttctccttcatcagagaaagatatccagcaggctgctacaaacagtgtgaatgggatagtattgaagaaggatgaaactgagggtttggaacgtgttgttgtgccaccatcagcgcagacatcccggccaagatgcaaaagccgcagcaggagggcatcagagaaagcagtggacaagttatggcagccacataccaaatggccagcatcctcgtcgagaaagatgcggaggctttcctcttttggtccaggccagagagatgggaagtcagcggtgaggaaagtgtccggggcaaccgtcgcgtgcatcccgctccgagttgttttcagcaggatcaacgaggcgctgagcttctcagttaatgagaatgccctagctgggtgtgggactgcttcccggctgaggaatacttggtagctaggttttgctgtttgttgttcaccgcttgctttttttgtagccatgccataatagcattggtaaatgtttagtgtggcctatcacttggagcatggtaataggtgatgatgtatcgtcatcttggttgtgagccacatcacacttcactcacagtagaggcagtagaaggaagaactgtgctgatgcacccctctttattaaaaaaaagaacatttgatgggtctgtggagcacatggtctgatggtggaagcaaataaattagcgtaggatgatggttacttgctgggagtctgttttggtattagtgatgcatcgctgctgtaatgtaacttcctgtgttgccatcctaagctaattgtaatcggaagtgtcagcttctgcttgccttttttttttttggttacttcctccatccttcccagattacaagtatcattagc

SEQ ID NO: 76265 - DNA, 2621 bp, Zea Mays
aatggcgacctcacatagccccatacgcctgtctcgaagccggagaatgaagagatagcctatcaacgaagcagcaatatggcacctggatcgatcatgccgccgggacgctctgtggcctccgtcctcctccatggcctcctctgcctgcagctggttgccttggccgagatcgagatggagggcggcagctgcatgcatttcagtgtctccccgccggctgctccgcccgaggacgccgatgagcgtcgcaactatttccgcgccatggaggccaaggacctgttccggcaccagcagatgatcaagatgatggggaacggcagtggcactggcagcggcagcagcaggaggcggcaggccaaggagtcgtccaagctgccggaggtgatgtccgccacgtccatgttcgagctacccatgcggagcgcgctcaacatcgcgcacgtgggcatgtacctggtgtcggtgcgcttcggcacgccggcgctgccgtacaacctggtgctggacaccgccaacgacctgacgtggatcaactgccggctgcggcgccgcaagggcaagcactacgggcggaccatgtcggtgggcgccggggacgatggcgcggcggccaaggaggcgaggaggaagaactggtaccggccggccaagtcgtcgtcgtggcgcaggatccggtgctcgcagaaggagtgcgcgctgctgccctacaacacgtgccagagccccagcaaggcggagtcgtgcagctactaccagcagatgcaggacggcacgttgacgatgggcatctacggcaaggagaaggcgacggtgacggtgtcggacgggcggatggccaagctccctggcctcatcctgggctgctccgtcctggaggccggcggcagcgtggacgcccacgacggcgtgctctcgctggggaacggcgagatgtccttcgccgtccacgccgccaagcgcttcggccagcgcttctccttctgcctcctcagcgccaatagctcccgcgacgcctcgagctacctcaccttcggtcccaacccggcggtgatggggccgggcaccatggagacggacatcgtgtacaacgtggacgtgaagccggcgtacgggcccttggtgacgggcatcttcgtgggcggggagcgcctggacatcccgcaggagatctgggatgccgagaaggtggtcggcggcggcgtcatcctggacacgagcacgtcggtgacgtcgctggtgccggaggcgtacgcggcggtgacgagcgcattggacaggcacctgtcccacctgccgcgggtgtacgagctggacggcttcgagtactgctacaggtggaccttcgccggcgacggcgtggacctggcgcacaacgtgacggtgcccaggttgacggtggagatggccggtggcgcgaggctagagccggaagccaagagcgtggtgatgccggaggtagtgcccggggtggcgtgcctggcctttaggaagctgccgcggggagggcccgggatcttgggcaacgtgctcatgcaggagtacatctgggagatcgaccacggaaaggggaagatgaggttcaggaaggacaagtgcaacacccatcatctccacaacagcaaaggcggagaggtctataataataataatggcaattcctcctctactgtcgtgcatcgcgtcaattaattcgttctctcttctctatctctacaaaattaaaggaccagaccatgcatgcacttcgctgtatgtaacaaaagaagcaggtagctcagctgccttgcctgtgttatgtttatttcacttcttcatttgctgattatcttggagtatatacccactctgtaagaggattacattcataatgagagagaagcgggggttacatgtttaagacactgtttggaaacaacccagtttatcttttagatcttttagctaggaggggtcagtttattggttttttaagaaaccgagaatctaatttctataataaactgatatgtttggaactaccttaatttctataaaccagtttcttaaaaattagatgcttccaaacaggtcttgaaccgctggaggtagttccatacatgttgtggcatcacccttgcattccccaagcagaatacatttgtagacaaattaaattctgcacatacatagtattacaattcaatacaacagcataaacttgcaaacctcagtatatctattcaagatgcatgcgggtacagttgcagggtttaattaattaggaccagtttattggttttttaagaaactgataatctaatttctataataaactgatatgcttggaaccatcttaatttctataaaccagttttttaaaaattgggatgcttccaaacaggtcctaaaccgctgtaggtagttccatacatgctgtgggcatcacccttgcattccccaagcagaatacatttgtagacaaattaaattctgcacatacatagtattacaattcaattcaacagcataacttgcaaacctcagtatatctattcaagatgcatgcgggtacagttgcagggtttaattagttaggaccctagcttatataaagcatgtcttttggtatctgtact

SEQ ID NO: 76266 - DNA, 707 bp, Zea Mays
ttcctgttatgtatgggtcctctctgcaaaatgcaggggaggttttgtttttcgaggaaggcgagcctaagattgatggcgaaccaggcgatttgaagttcaggatccgaacagcattacacagccacttcaaacgagaaggcaatgacctgcatgcaacagttacaatatccctgctgcaagctctggttggtttcgagaagacaatcaagcatcttgacaaccatctggtagaaattggcaccaagggcatcaccaaaccgaaggagatcaggaagttcaaaggtgaaggcatgccactataccaaagcaacaagaaaggtgacctgtatgtgacattcgaggtgttattcccgaaaaccctaaccgctgaccagaaggccaagcttaaggatgttctcgtgtagaccattgttttccacttgtatgctactgagtttgaggcagagcgccttgaggaaaattttcggagtagcttgcataggaagcagcagctgcttcctttttatgtgattttccattgcaaatcctagcagcatggtcttctttttctttcccttgcgttttgttatgcgcccttaacagctcggtgtaggtttagaaggcacaacaaaactgtaccagaatatttgtacctttggaattctgaatacatagattgaacacctcgggtgcttgcttattctatgctcactggccacttctcg

SEQ ID NO: 76267 - DNA, 717 bp, Zea Mays
ggccgtcacacttctcgtgggaggtcagaggtggctgaacacgtacgtacgaggaggttttgtttttcgaggaaggcgagcctaagattgatggcgaaccaggcgatttgaaggatccgaacagcattacacagccacttcaaacgagaaggcaatgacctgcatgcaacagttacaatatccctgctgcaagctctggttggtttcgagaagacaatcaagcatcttgacaaccatctggtagaaattggcaccaagggcatcaccaaaccgaaggagatcaggaagttcaaaggtgaaggcatgccactataccaaagcaacaagaaaggtgacctgtatgtgacattcgaggtgttattcccgaaaaccctaaccgctgaccagaaggccaagcttaaggatgttctcgtgtagaccattgttttccacttgtatgctactgagtttgaggcagagcgccttgaggaaaattttcggagtagcttgcataggaagcagcagctgcttcctttttatgtgattttccattgcaaatcctagcagcatggtcttctttttctttcccttgcgttttgttatgcgcccttaacagctcggtgtaggtttagaaggcacaacaaaactgtaccagaatatttgtacctttggaattctgaatacatagattgaacacctcgggtgcttgcttattctatgctcactggccacttctcg

SEQ ID NO: 76268 - DNA, 1070 bp, Zea Mays
caatttttgtaatttacttacaaaaggtggaagacaaaaggacaacaacaaagcttcactccatagctgagtttggtttttttggtggtggtggtggtgggatggaagaggaggaacaacaaattttaaaaggtgatgaggtgattgttgaactggatgcttcattagaggacttgtacatgggcggttcattaaaggtttggagagagaaaaatgtcataaagccagcaccaggaaagaggcgctgcaactgtaggaacgaagtttaccatcgacaaataggtcctggaatgtatcaacagatgactgagcaggtctgcgaccaatgtccaaatgtgaaatttgtacgagaaggtgaattcttgactgttgatattgagaagggaatgaaagatggacaggaggttttgtttttcgaggaaggcgagcctaagattgatggcgaaccaggcgatttgaagttcaggatccgaacagcattacacagccacttcaaacgagaaggcaatgacctgcatgcaacagttacaatatccctgctgcaagctctggttggtttcgagaagacaatcaagcatcttgacaaccatctggtagaaattggcaccaagggcatcaccaaaccgaaggagatcaggaagttcaaaggtgaaggcatgccactataccaaagcaacaagaaaggtgacctgtatgtgacattcgaggtgttattcccgaaaaccctaaccgctgaccagaaggccaagcttaaggatgttctcgtgtagaccattgttttccacttgtatgctactgagtttgaggcagagcgccttgaggaaaattttcggagtagcttgcataggaagcagcagctgcttcctttttatgtgattttccattgcaaatcctagcagcatggtcttctttttctttcccttgcgttttgttatgcgcccttaacagctcggtgtaggtttagaaggcacaacaaaactgtaccagaatatttgtacctttggaattctgaatacatagattgaacacctcgggtgcttgcttattctatgctcactggccacttctcg

SEQ ID NO: 76269 - DNA, 1337 bp, Zea Mays
atccatttttcccatttgacagccttttttctactggttcatttactcttcatttgtcatgcgtcaggaagagctactacgacgtgctgcaagttcccaagggcgcgtccgaggatcagattaagaggtcgtaccgcaagctcgcgctcaagtatcatccggataagaaccccgacaacgaggaggccaacaagcgcttcgctgagatcaacaacgcgtatgaggtgttgacggaccaggagaagaagaagatctatgaccggtatggcgaggaggggttgaagcagttccaaggcgggagaggaagtggcggtggaatgaacattcaggacatctttagcagtttttttggtggtggtggtggtgggatggaagaggaggaacaacaaattttaaaaggtgatgaggtgattgttgaactggatgcttcattagaggacttgtacatgggcggttcattaaaggtttggagagagaaaaatgtcataaagccagcaccaggaaagaggcgctgcaactgtaggaacgaagtttaccatcgacaaataggtcctggaatgtatcaacagatgactgagcaggtctgcgaccaatgtccaaatgtgaaatttgtacgagaaggtgaattcttgactgttgatattgagaagggaatgaaagatggacaggaggttttgtttttcgaggaaggcgagcctaagattgatggcgaaccaggcgatttgaagttcaggatccgaacagcattacacagccacttcaaacgagaaggcaatgacctgcatgcaacagttacaatatccctgctgcaagctctggttggtttcgagaagacaatcaagcatcttgacaaccatctggtagaaattggcaccaagggcatcaccaaaccgaaggagatcaggaagttcaaaggtgaaggcatgccactataccaaagcaacaagaaaggtgacctgtatgtgacattcgaggtgttattcccgaaaaccctaaccgctgaccagaaggccaagcttaaggatgttctcgtgtagaccattgttttccacttgtatgctactgagtttgaggcagagcgccttgaggaaaattttcggagtagcttgcataggaagcagcagctgcttcctttttatgtgattttccattgcaaatcctagcagcatggtcttctttttctttcccttgcgttttgttatgcgcccttaacagctcggtgtaggtttagaaggcacaacaaaactgtaccagaatatttgtacctttggaattctgaatacatagattgaacacctcgggtgcttgcttattctatgctcactggccacttctcg

SEQ ID NO: 76270 - DNA, 1643 bp, Zea Mays
cttctagaaagttttaaaccgcaggaaccaaaaggccactgcagcagacggaggacggcgacggtggcggcggggaagagccgaagaggacgacgagggatagaacggcgagggagaagctgtctctcttcacgctcgggatcgttaaccgtagctgacaaccgtgcggaaacaccggattgtgagggccgaggagagaggtgcggcgaggcctctcgaggaggcgggggcgggatggcgacgccggggaagggaggggcagcgcggtttgcggccgcgctcttcgtcctcctgaatctcgctgtggccattgctgggaagagctactacgacgtgctgcaagttcccaagggcgcgtccgaggatcagattaagaggtcgtaccgcaagctcgcgctcaagtatcatccggataagaaccccgacaacgaggaggccaacaagcgcttcgctgagatcaacaacgcgtatgaggtgttgacggaccaggagaagaagaagatctatgaccggtatggcgaggaggggttgaagcagttccaaggcgggagaggaagtggcggtggaatgaacattcaggacatctttagcagtttttttggtggtggtggtggtgggatggaagaggaggaacaacaaattttaaaaggtgatgaggtgattgttgaactggatgcttcattagaggacttgtacatgggcggttcattaaaggtttggagagagaaaaatgtcataaagccagcaccaggaaagaggcgctgcaactgtaggaacgaagtttaccatcgacaaataggtcctggaatgtatcaacagatgactgagcaggtctgcgaccaatgtccaaatgtgaaatttgtacgagaaggtgaattcttgactgttgatattgagaagggaatgaaagatggacaggtgggccgtcacacttctcgtgggaggtcagaggtggctgaacacgtacgtacgaggaggttttgtttttcgaggaaggcgagcctaagattgatggcgaaccaggcgatttgaagttcaggatccgaacagcattacacagccacttcaaacgagaaggcaatgacctgcatgcaacagttacaatatccctgctgcaagctctggttggtttcgagaagacaatcaagcatcttgacaaccatctggtagaaattggcaccaagggcatcaccaaaccgaaggagatcaggaagttcaaaggtgaaggcatgccactataccaaagcaacaagaaaggtgacctgtatgtgacattcgaggtgttattcccgaaaaccctaaccgctgaccagaaggccaagcttaaggatgttctcgtgtagaccattgttttccacttgtatgctactgagtttgaggcagagcgccttgaggaaaattttcggagtagcttgcataggaagcagcagctgcttcctttttatgtgattttccattgcaaatcctagcagcatggtcttctttttctttcccttgcgttttgttatgcgcccttaacagctcggtgtaggtttagaaggcacaacaaaactgtaccagaatatttgtacctttggaattctgaatacatagattgaacacctcgggtgcttgcttattctatgctcactggccacttctcg

SEQ ID NO: 76271 - DNA, 603 bp, Zea Mays
aaaccgcaggaaccaaaaggccactgcagcagacggaggacggcgacggtggcggcggggaagagccgaagaggacgacgagggatagaacggcgagggagaagctgtctctcttcacgctcgggatcgttaaccgtagctgacaaccgtgcggaaacaccggattgtgagggccgaggagagaggtgcggcgaggcctctcgaggaggcgggggcgggatggcgacgccggggaagggaggggcagcgcggtttgcggccgcgctcttcgtcctcctgaatctcgctgtggccattgctgggaagagctactacgacgtgctgcaagttcccaagggcgcgtccgaggatcagattaagaggtcgtaccgcaagctcgcgctcaagtatcatccggataagaaccccgacaacgaggaggccaacaagcgcttcgctgagatcaacaacgcgtatgaggtgttgacggaccaggagaagaagaagatctatgaccggtatggcgaggaggggttgaagcagttccaaggcgggagaggaagtggcggtggaatgaacattcaggacatctttagcagcattggttgttacaatcatggaaac

SEQ ID NO: 76272 - DNA, 573 bp, Zea Mays
accatgtgatggaaaggaaaatgcatctgtggttaaactttagctagtgaggtctcatttatagattcttgggtattatcattgagtcctatgaggcgagcatttctgaaggcgatgaggaaatctaacaatccacggagacatgttgtgtatgctttcggggaccattatgacttccggaagaagcttcaaattataaaccttctcactggatacatatatctggttgatggcctgggaagaataagatggcaaggctctggatctgcaacacaagaagaactgtcgtcactaacagcgtgcacctccattttgttagatgaaaaatgagatggggtggctaatctttgctattttgtaacttctggtacaagatattttgcttttcactaagcaaatcgagtttttttcccgtgggtaataagtattggatggttagtttttttcactaaacaaccttgattttctggtggaaaatgattttggtatggtattatcgttgtatttaactgctatcctaacttcgtgctataataagactgaattagtttaaatctttccaaatggatggta

SEQ ID NO: 76273 - DNA, 653 bp, Zea Mays
attatcttgcacttcctcaacttgttcaactgctgcaattccactgctatgcgtgcttgaaaatggcagagtcatggagtttaccttacctggatgctttcggtgctgccaagaacatgcatgtttatgaggtctcatttatagattcttgggtattatcattgagtcctatgaggcgagcatttctgaaggcgatgaggaaatctaacaatccacggagacatgttgtgtatgctttcggggaccattatgacttccggaagaagcttcaaattataaaccttctcactggatacatatatctggttgatggcctgggaagaataagatggcaaggctctggatctgcaacacaagaagaactgtcgtcactaacagcgtgcacctccattttgttagatgaaaaatgagatggggtggctaatctttgctattttgtaacttctggtacaagatattttgcttttcactaagcaaatcgagtttttttcccgtgggtaataagtattggatggttagtttttttcactaaacaaccttgattttctggtggaaaatgattttggtatggtattatcgttgtatttaactgctatcctaacttcgtgctataataagactgaattagtttaaatctttccaaatggatggta

SEQ ID NO: 76274 - DNA, 797 bp, Zea Mays
atataattgcgacagcgagtaaggtcatcatcccagaggtagatgctgtgaagtttcctgatcttgatgtggattcccctgatggaggggcactgcatctgcctcttgttgcaccaactctgcaagctgatgatggtgaggctggagaccataagattcctggtgcttcattggtgtgcctttccttccgcgcaagctcgctgaaaatggcagagtcatggagtttaccttacctggatgctttcggtgctgccaagaacatgcatgtttatgaggtctcatttatagattcttgggtattatcattgagtcctatgaggcgagcatttctgaaggcgatgaggaaatctaacaatccacggagacatgttgtgtatgctttcggggaccattatgacttccggaagaagcttcaaattataaaccttctcactggatacatatatctggttgatggcctgggaagaataagatggcaaggctctggatctgcaacacaagaagaactgtcgtcactaacagcgtgcacctccattttgttagatgaaaaatgagatggggtggctaatctttgctattttgtaacttctggtacaagatattttgcttttcactaagcaaatcgagtttttttcccgtgggtaataagtattggatggttagtttttttcactaaacaaccttgattttctggtggaaaatgattttggtatggtattatcgttgtatttaactgctatcctaacttcgtgctataataagactgaattagtttaaatctttccaaatggatggta

SEQ ID NO: 76275 - DNA, 1137 bp, Zea Mays
actagtcactaccgcagctgtcagcccgctgaccagtctcgctctctcgcggcttccgaatcctagcgcgagtggatcggcgggcgggtggcggcgatgatggtgagggcgcgcgacgcggcgcgggcgctgctccgcctcgccggcgccagagctggcgtccatagggactatttccctccgctagcgcgcgccacgtttgctcgcgccttcctggatttccgcaagtgatcagacggggaacaaggaggccatcgagaaggataaggccaggcttgcagtaccgatgaactgagtagaggctacttccaagactttgccgagatccgcgagaacgctggcaagattgcgacagcgagtaaggtcatcatcccagaggtagatgctgtgaagtttcctgatcttgatgtggattcccctgatggaggggcactgcatctgcctcttgttgcaccaactctgcaagctgatgatggtgaggctggagaccataagattcctggtgcttcattggtgtgcctttccttccgcgcaagctcgctgaaaatggcagagtcatggagtttaccttacctggatgctttcggtgctgccaagaacatgcatgtttatgaggtctcatttatagattcttgggtattatcattgagtcctatgaggcgagcatttctgaaggcgatgaggaaatctaacaatccacggagacatgttgtgtatgctttcggggaccattatgacttccggaagaagcttcaaattataaaccttctcactggatacatatatctggttgatggcctgggaagaataagatggcaaggctctggatctgcaacacaagaagaactgtcgtcactaacagcgtgcacctccattttgttagatgaaaaatgagatggggtggctaatctttgctattttgtaacttctggtacaagatattttgcttttcactaagcaaatcgagtttttttcccgtgggtaataagtattggatggttagtttttttcactaaacaaccttgattttctggtggaaaatgattttggtatggtattatcgttgtatttaactgctatcctaacttcgtgctataataagactgaattagtttaaatctttccaaatggatggta

SEQ ID NO: 76276 - DNA, 1807 bp, Zea Mays
ggctatgcggcagccgcgaagaatcatagtctagattgattctttaccatttgtatcgccattcctccctgttcgttgggcgtggggtctcaacctaaaatcagtcccattccgcgctcctagtggagagtggattcgaacggaaacacctttttgtgccccaagatgcctgtttccgcttcgtttccacgccacaccttttgaatcctttgccgtcacctcgccttttgcagcactagttgtttgtcagccttcttggagtgtggaggggcagagagcgccgtcctgttgattcaggaaaacagtccgagccgatgggcaggaagagcgacggcgcgcggttgcaatgcgctgaggccaaactggcgacggattggacctgctgcttcctggccctgccaccggcagcaccatccgctgtggatggcgatggtggattcaacctctcgtggaacctccaccagtccttccacccgccggccggcctcttcgccagcgtgggccagcaggttggggttgggttcccagggccttcgtcccagtcgccggagacgccacgggacccatacatgaagtacgtctcgccggaggttgttgagacacctctgccgggggaaggtgtgggggggttgagggacaaggggaagaagaaagtcgtgaagctcaagattaaggttgggaatcatcacctcaagagactgatcagtggagcaatcgcaggcgcagtgtcaagaactgctgttgcacctttggagacgatcaggacgcatttgatggtgggaagtaatgggaattcgacgacggaggtgttccagtctatcatgaagcatgagggatggactgggttgttccgtggtaacgttgttaatgtcatccgggtagccccaagcaaggcaatcgagctttttgcctttgatacagctaataagttcttgacccccaaatatggggagaaaccgaagatcccagtccctccttcactagtggctggggcatttgccggtgttagctcaactctgtgtacatacccactggaattaattaagacacggctaactatacagagaggtgtgtatgacaatttccttgatgcatttgtcaaaatcatccgcgacgaagggcctactgagctctaccgaggcttaaccccaagcttgattggagtggtgccatatgctgcaacgaactacttcgcctatgacagcctgaagaaggtgtacaagaagatgttcaagacaaatgagattggcagtgttccaacactgttcatcgggtctgccgcaggagctatctcaagcacagcgacgttccctcttgaggtggcacggaagcacatgcaagttggagctgttggtggcaggaaggtttacaagaacatgcttcatgccttgttgagcattcttgaggatgaaggggttgggggcctttacagagggttggggccaagctgcatgaagttggtgcctgctgctgggatttcgttcatgtgctacgaggcttgcaagaaaattctgattgaggaagaggatgagtgaagtgtatgcagatcattagaactcagttttgtgacatcctgacagcaggcagcttgaggttactgctgtagtcggcataagttcttaacccctttttgcacccagttttatctgataaactcacctctttttttttccccagatttacttttacttttgggtacaacttgtgttgaaaacacgtctttcgaaagtcattactgggatgcatgaaaacgttgagttgccatcggcaatcataattcacaactgatttgtgttcttgtttctct

SEQ ID NO: 76277 - DNA, 597 bp, Zea Mays
cggactcggcgtagacggcccacgaggagctgctaatggcggaggctgagcgccgccatggatctgacacggtgtggaatggggaggagccgaagtggagattggatcaaagtggactaggcaggagccaagcaaatcgtgtccaggacgactgggttcgctatgctaagatgactgaagcaattggagagcaactgcatattgtcggtgatgaccttgtcactaatcccactgttagtacatttatttctttccttctaaaatagaagttaaaattccagtttggttgttgcaatacccttatgtcagctgcttttaatatagtagagatatgttctggtgtttgctaatcagcagatgtcatgctatgagttctgtcgtgaataactctctgggagcagtggcttggttttgtggtgggcgtttggacaaaatctttaggattaacaagacttcgtaggttgaattagaccttgcaaaattatgattgtcttagtggtgtcactaagcatttgccagtgaccagaaaattatgactttgtctttttatatcgacaccatgcatattccaatcaataacaggaatcatctataaaa

SEQ ID NO: 76278 - DNA, 1982 bp, Zea Mays
aaaacctaaatctctaaccccacgcatctctcttcctctcctttcccgcttcccaccagctcgcgcccgccgccggccgccgtctcgcgcaccccgctgccgccagctcgagcgccccgcgccgccactgcgcgccctgccgccgccaccccatgcgccccgctccgccagcccgcgcctccaccccgcgtgccgcccgctcgccagccccacgtcgcctggcctcctccgagcccgacgccgacaaggcggcgctgctggcgttcctctccggcgtgggtcacggcgccaccgcctgtccgcgctcgcgggcctccacctccaccacaacgccttctccggcgcgctccccgccgccctcgcggggctgaccacgctccaggatgtttccaaaaaggtgtctagatctgatggggtttccactgagagatctactagattgaggtttagccaggatcatgctgccaaatcaaaagcaaagctcaagggtgctttctctttacttggactgaacaatgacaccttcaaaggacctcatacctccaaaaggcttcagttgaaggacctgtcctggagatcaaaggatactactatcaatgtgaaagagaaccatgatcaagagacagtgcatgaggagaataccaagtcctgtgaacatgaatatgggagttactgcctctggtctactgaacacagggaagtaatgaaggatgccattgtcaagaagcttaaagatcaactttttatggcaagagctcattatcctagcattgcaaaattgaagcagcatgaagcatttacaagtgaactgaagcaaaacatccaagaacatgaacgcatgctaagtgacaccatcacagatgctgatcttccaccattttttgcaaagaagctggagaagatggagcacacaattgtgagagccaagtctagtgaagtaggatgctccaatgttgaacggaaacttaggcagctacttgatataactgaaaatgaagcttatttccatacaaggcagagtgcatttctatatcatcttggagtgcagactatgccgaaaactcaccattgcttgaacatgagattgacagtagaatattttaagtctggatcaagtcatgtggatcagttaaatgaccagaagcttgaaagtcctgccttacatcactatgtaatattttccaggaatgtacttgcagcttccaccactatcaattcaacggttatgaactcccaggtctctctctctcggacacttatattaaatagaaacgaaacgctccggatgtcgcttgccgcgcgcgcggcgtgcagttgtgatctctgccaggagtagagtgtgggatggggatgcataacgagcagtgctgcagcaggcagggattgtaagttgtaaccttgagcagcttgtggttcatggtgcccccgttctccagatgccggctgccacgcgccccgaggccggcgagctcctggtgctcgacctctccttcaacgccttcgaaggcgccgtccctagcgcgctcgccaacctcaaccgcctaatcctagacgattaggattgggggttaacagtaaataaaggcaatgcagaatcaaaaggctaccaagtgtggaaaaggattctggctctcatcaagtgactcctccccctcacgatgactttgcggacatatgtctcaattctagtggtggagctacgaacaacaatccgatgtcctgatcgagagcgatgaagctaatgtttgaacttgtgaactaaaaatatgaactatggatgtgaacttatgtgaatttgtgaacttgtatttggacttatgtgaatttgtgaacttatgtatttggacttgttgtgtgaatttgtgatatgaacatatatccatgtgtttgaaatctgtattgtatgtgatattctatgttgcatgtgatattatgtgtgtctaatttttcatttttgtattttttatttttttctggaaaag

SEQ ID NO: 76279 - DNA, 1990 bp, Zea Mays
cgaaaacctaaatctctaaccccacgcatctctcttcctctcctttcccgcttcccaccagctcgcgcccgccgccggccgccgtctcgcgcaccccgctgccgccagctcgagcgccccgcgccgccactgcgcgccctgccgccgccaccccatgcgccccgctccgccagcccgcgcctccaccccgcgtgccgcccgctcgccagccccacgtcgcctggcctcctccgagcccgacgccgacaaggcggcgctgctggcgttcctctccggcgtgggtcacggcgccaccgcctgtccgcgctcgcgggcctccacctccaccacaacgccttctccggcgcgctccccgccgccctcgcggggctgaccacgctccaggatgtttccaaaaaggtgtctagatctgatggggtttccactgagagatctactagattgaggtttagccaggatcatgctgccaaatcaaaagcaaagctcaagggtgctttctctttacttggactgaacaatgacaccttcaaaggtaaaggacctcatacctccaaaaggcttcagttgaaggacctgtcctggagatcaaaggatactactatcaatgtgaaagagaaccatgatcaagagacagtgcatgaggagaataccaagtcctgtgaacatgaatatgggagttactgcctctggtctactgaacacagggaagtaatgaaggatgccattgtcaagaagcttaaagatcaactttttatggcaagagctcattatcctagcattgcaaaattgaagcagcatgaagcatttacaagtgaactgaagcaaaacatccaagaacatgaacgcatgctaagtgacaccatcacagatgctgatcttccaccattttttgcaaagaagctggagaagatggagcacacaattgtgagagccaagtctagtgaagtaggatgctccaatgttgaacggaaacttaggcagctacttgatataactgaaaatgaagcttatttccatacaaggcagagtgcatttctatatcatcttggagtgcagactatgccgaaaactcaccattgcttgaacatgagattgacagtagaatattttaagtctggatcaagtcatgtggatcagttaaatgaccagaagcttgaaagtcctgccttacatcactatgtaatattttccaggaatgtacttgcagcttccaccactatcaattcaacggttatgaactcccaggtctctctctctcggacacttatattaaatagaaacgaaacgctccggatgtcgcttgccgcgcgcgcggcgtgcagttgtgatctctgccaggagtagagtgtgggatggggatgcataacgagcagtgctgcagcaggcagggattgtaagttgtaaccttgagcagcttgtggttcatggtgcccccgttctccagatgccggctgccacgcgccccgaggccggcgagctcctggtgctcgacctctccttcaacgccttcgaaggcgccgtccctagcgcgctcgccaacctcaaccgcctaatcctagacgattaggattgggggttaacagtaaataaaggcaatgcagaatcaaaaggctaccaagtgtggaaaaggattctggctctcatcaagtgactcctccccctcacgatgactttgcggacatatgtctcaattctagtggtggagctacgaacaacaatccgatgtcctgatcgagagcgatgaagctaatgtttgaacttgtgaactaaaaatatgaactatggatgtgaacttatgtgaatttgtgaacttgtatttggacttatgtgaatttgtgaacttatgtatttggacttgttgtgtgaatttgtgatatgaacatatatccatgtgtttgaaatctgtattgtatgtgatattctatgttgcatgtgatattatgtgtgtctaatttttcatttttgtattttttatttttttctggaaaag

SEQ ID NO: 76280 - DNA, 1694 bp, Zea Mays
ctcttcctctcctttcccgcttcccaccagctcgcgcccgccgccggccgccgtctcgcgcaccccgctgccgccagctcgagcgccccgcgccgccactgcgcgccctgccgccgccaccccatgcgccccgctccgccagcccgcgcctccaccccgcgtgccgcccgctcgccagccccacgtcgcctggcctcctccgagcccgacgccgacaaggcggcgctgctggcgttcctctccggcgtgggtcacggcgccaccgcctgtccgcgctcgcgggcctccacctccaccacaacgccttctccggcgcgctccccgccgccctcgcggggctgaccacgctccaggcggaggtggcaaaccagatgcgtttctctcgtcatgccttggctggcatgcccatccctcggttttctgttcttggagtaggatgtttccaaaaaggtgtctagatctgatggggtttccactgagagatctactagattgaggtttagccaggatcatgctgccaaatcaaaagcaaagctcaagggtgctttctctttacttggactgaacaatgacaccttcaaaggtaaaggacctcatacctccaaaaggcttcagttgaaggacctgtcctggagatcaaaggatactactatcaatgtgaaagagaaccatgatcaagagacagtgcatgaggagaataccaagtcctgtgaacatgaatatgggagttactgcctctggtctactgaacacagggaagtaatgaaggatgccattgtcaagaagcttaaagatcaactttttatggcaagagctcattatcctagcattgcaaaattgaagcagcatgaagcatttacaagtgaactgaagcaaaacatccaagaacatgaacgcatgctaagtgacaccatcacagatgctgatcttccaccattttttgcaaagaagctggagaagatggagcacacaattgtgagagccaagtctagtgaagtaggatgctccaatgttgaacggaaacttaggcagctacttgatataactgaaaatgaagcttatttccatacaaggcagagtgcatttctatatcatcttggagtgcagactatgccgaaaactcaccattgcttgaacatgagattgacagtagaatattttaagtctggatcaagtcatgtggatcagttaaatgaccagaagcttgaaagtcctgccttacatcactatgtaatattttccaggaatgtacttgcagcttccaccactatcaattcaacggttatgaactcccaggtctctctctctcggacacttatattaaatagaaacgaaacgctccggatgtcgcttgccgcgcgcgcggcgtgcagttgtgatctctgccaggagtagagtgtgggatggggatgcataacgagcagtgctgcagcaggcagggattgtaagttgtaaccttgagcagcttgtggttcatggtgcccccgttctccagatgccggctgccacgcgccccgaggccggcgagctcctggtgctcgacctctccttcaacgccttcgaaggcgccgtccctagcgcgctcgccaacctcaaccgcctaatcctagacgattaggattgggggttaacagtaaataaaggcaatgcagaatcaaaaggctaccaagtgtggaaaaggtccttgtttcttc

SEQ ID NO: 76281 - DNA, 1857 bp, Zea Mays
ctcttcctctcctttcccgcttcccaccagctcgcgcccgccgccggccgccgtctcgcgcaccccgctgccgccagctcgagcgccccgcgccgccactgcgcgccctgccgccgccaccccatgcgccccgctccgccagcccgcgcctccaccccgcgtgccgcccgctcgccagccccacgtcgcctggcctcctccgagcccgacgccgacaaggcggcgctgctggcgttcctctccggcgtgggtcacggcgccaccgcctgtccgcgctcgcgggcctccacctccaccacaacgccttctccggcgcgctccccgccgccctcgcggggctgaccacgctccaggtgctcgacctctccttgaacgccttcgacggcgtcgtgcctggcgcgctcgccaacctcacccgcctcgtcgtgctcgacctctccaacaactcgctgtccagtcgcgcggaggtggcaaaccagatgcgtttctctcgtcatgccttggctggcatgcccatccctcggttttctgttcttggagatgtttccaaaaaggtgtctagatctgatggggtttccactgagagatctactagattgaggtttagccaggatcatgctgccaaatcaaaagcaaagctcaagggtgctttctctttacttggactgaacaatgacaccttcaaaggtaaaggacctcatacctccaaaaggcttcagttgaaggacctgtcctggagatcaaaggatactactatcaatgtgaaagagaaccatgatcaagagacagtgcatgaggagaataccaagtcctgtgaacatgaatatgggagttactgcctctggtctactgaacacagggaagtaatgaaggatgccattgtcaagaagcttaaagatcaactttttatggcaagagctcattatcctagcattgcaaaattgaagcagcatgaagcatttacaagtgaactgaagcaaaacatccaagaacatgaacgcatgctaagtgacaccatcacagatgctgatcttccaccattttttgcaaagaagctggagaagatggagcacacaattgtgagagccaagtctagtgaagtaggatgctccaatgttgaacggaaacttaggcagctacttgatataactgaaaatgaagcttatttccatacaaggcagagtgcatttctatatcatcttggagtgcagactatgccgaaaactcaccattgcttgaacatgagattgacagtagaatattttaagtctggatcaagtcatgtggatcagttaaatgaccagaagcttgaaagtcctgccttacatcactatgtaatattttccaggaatgtacttgcagcttccaccactatcaattcaacggttatgaactcccaggtataccattatttttcaaataatctaaaacatcttgatcactaacgctctactcccaggtctctctctctcggacacttatattaaatagaaacgaaacgctccggatgtcgcttgccgcgcgcgcggcgtgcagttgtgatctctgccaggagtagagtgtgggatggggatgcataacgagcagtgctgcagcaggcagggattgtaagttgtaaccttgagcagcttgtggttcatggtgcccccgttctccagatgccggctgccacgcgccccgaggccggcgagctcctggtgctcgacctctccttcaacgccttcgaaggcgccgtccctagcgcgctcgccaacctcaaccgcctaatcctagacgattaggattgggggttaacagtaaataaaggcaatgcagaatcaaaaggctaccaagtgtggaaaaggtccttgtttcttc

SEQ ID NO: 76282 - DNA, 1792 bp, Zea Mays
ctcttcctctcctttcccgcttcccaccagctcgcgcccgccgccggccgccgtctcgcgcaccccgctgccgccagctcgagcgccccgcgccgccactgcgcgccctgccgccgccaccccatgcgccccgctccgccagcccgcgcctccaccccgcgtgccgcccgctcgccagccccacgtcgcctggcctcctccgagcccgacgccgacaaggcggcgctgctggcgttcctctccggcgtgggtcacggcgccaccgcctgtccgcgctcgcgggcctccacctccaccacaacgccttctccggcgcgctccccgccgccctcgcggggctgaccacgctccaggtgctcgacctctccttgaacgccttcgacggcgtcgtgcctggcgcgctcgccaacctcacccgcctcgtcgtgctcgacctctccaacaactcgctgtccagtcgcgcggaggtggcaaaccagatgcgtttctctcgtcatgccttggctggcatgcccatccctcggttttctgttcttggagatgtttccaaaaaggtgtctagatctgatggggtttccactgagagatctactagattgaggtttagccaggatcatgctgccaaatcaaaagcaaagctcaagggtgctttctctttacttggactgaacaatgacaccttcaaaggacctcatacctccaaaaggcttcagttgaaggacctgtcctggagatcaaaggatactactatcaatgtgaaagagaaccatgatcaagagacagtgcatgaggagaataccaagtcctgtgaacatgaatatgggagttactgcctctggtctactgaacacagggaagtaatgaaggatgccattgtcaagaagcttaaagatcaactttttatggcaagagctcattatcctagcattgcaaaattgaagcagcatgaagcatttacaagtgaactgaagcaaaacatccaagaacatgaacgcatgctaagtgacaccatcacagatgctgatcttccaccattttttgcaaagaagctggagaagatggagcacacaattgtgagagccaagtctagtgaagtaggatgctccaatgttgaacggaaacttaggcagctacttgatataactgaaaatgaagcttatttccatacaaggcagagtgcatttctatatcatcttggagtgcagactatgccgaaaactcaccattgcttgaacatgagattgacagtagaatattttaagtctggatcaagtcatgtggatcagttaaatgaccagaagcttgaaagtcctgccttacatcactatgtaatattttccaggaatgtacttgcagcttccaccactatcaattcaacggttatgaactcccaggtctctctctctcggacacttatattaaatagaaacgaaacgctccggatgtcgcttgccgcgcgcgcggcgtgcagttgtgatctctgccaggagtagagtgtgggatggggatgcataacgagcagtgctgcagcaggcagggattgtaagttgtaaccttgagcagcttgtggttcatggtgcccccgttctccagatgccggctgccacgcgccccgaggccggcgagctcctggtgctcgacctctccttcaacgccttcgaaggcgccgtccctagcgcgctcgccaacctcaaccgcctaatcctagacgattaggattgggggttaacagtaaataaaggcaatgcagaatcaaaaggctaccaagtgtggaaaaggtccttgtttcttc

SEQ ID NO: 76283 - DNA, 2117 bp, Zea Mays
ccactgcaaaatactagtaacaatgtctcagacaacatatatggcccctgtaggcactctcggcttctcgctgccgttgatcatcctcttggcttctctttcggcgctactagctactacacctaacgacgacatggaagcgctgctctgcctcaagcaccacctctcagcctcatcagaccctacggggacactaccttcatggaagaatgattccacgcagttctgcagttggtccggcgtgacatgcagcaagagacactcgtcccgtgttgttgcactggaccttgagtcactcgacctccatggccaaatacctccttgcatcggcaacctcacgttcctcacaaggatccacatgccaaacaaccagctgcagggtcagatcccggctgagcttggccagttaaaccggctgcggccatcgatctttcgaggaattccctcagcggaagcatccccgaaggtctggggagcctcctcggcaacctctcggatttacgcctttcaggaaaatgtggattggtgtataagggaagattttgggatgaggaacatgtagttgccatcaaagtattcaaacttgatcaactcggagcaccaaacagcttcctcgctgaatgtgaggccctgaggaatactagacaccgcaatctcgtgaaggtgatcactgcatgctcgacgattgattcagagggacatgatttcaaggccgtcattcttgagtacatgtctaacggcagcctggagaactggctctatccgaaattgaacaggtatggaattcgaaaaccgttaagtttgggctccagaatagaaatcgcagcggacatagcctgtgctctggattacctccataaccattgcgttcccgctatagtccattgtgacttgaaacccagcaacgtacttcttgatgatgccatggttgcacaccttggtgactttggattggctaagcttcttcacacttgtagctattcaattactcatagttcttctacaagcttgattggaccaagaggatcaatcggatacattgcaccagagtatggcttcgggagcaaactctctacacagggcgatgtctatagctatggaatcaccgtcttagaaatgctcacagggaagcgccccacagatgagatgttttctaagggtttgacccttcacaaatttgtgaaggaagcatttcctcaaaagattcatgaaattctcgatccttctatattcccggttacaagagatggtgataatcacacaacggatgaaataaccagaagcatcatgaaccttcttaagatcggtatctcgtgctctgcagatgcaccaacagaccgaccaacaatagatgatgtttatgctaaagtcatcacaatcaaagaaacatttttagatctatgccactaaggaatggaacaatcatttttactatttaaatcaggggggcattatgttttatttactctgtttgcttgggaagcttaggaatcaaataaattgtgggtcttgtcctttattttgtcattactcttatgtaatttgacgagtagagagctgacaagtctgtttgctaggtgtgaccgcagctccactgtggggcatacttgtaatattcttataactcaatgactctttagcaaacatccaaaccacaaagaccagttgtgccctgagtgaactcactgtattgttgggagatagatacaaaggattaagagtgatccaccaataaaaagagatttccgatcactatagttggctgtcaaaaaatagtggtccgaccatgttaactttcgatggctctgtgaggcgtcggaagttaataacttccaacaccaaccgtcaaaagttagataactttcgtatgcagttgaaatttactaacttccaatagttttagctaacttttgatggctttggcgatcataagtcaagttgtttttgtcgtgcagttaagctttttttctcccttataaattgtatatgatactagaacagagaagctttatagtggcggtcgtaaacctattttttgtggcgtttatcttaaccgtcagtgctaggaatcagtaaaaatcattatttttacaggcgagtaactgaagaccgccagt

SEQ ID NO: 76284 - DNA, 2135 bp, Zea Mays
ccactgcaaaatactagtaacaatgtctcagacaacatatatggcccctgtaggcactctcggcttctcgctgccgttgatcatcctcttggcttctctttcggcgctactagctactacacctaacgacgacatggaagcgctgctctgcctcaagcaccacctctcagcctcatcagaccctacggggacactaccttcatggaagaatgattccacgcagttctgcagttggtccggcgtgacatgcagcaagagacactcgtcccgtgttgttgcactggaccttgagtcactcgacctccatggccaaatacctccttgcatcggcaacctcacgttcctcacaaggatccacatgccaaacaaccagctgcagggtcagatcccggctgagcttggccagttaaaccggctgcggccatcgatctttcgaggaattccctcagcggaagcatccccgaaggtctggggagcctcctcggcaacctctcggatttacgcctttcagacaacttggtgggctcaggaaaatgtggattggtgtataagggaagattttgggatgaggaacatgtagttgccatcaaagtattcaaacttgatcaactcggagcaccaaacagcttcctcgctgaatgtgaggccctgaggaatactagacaccgcaatctcgtgaaggtgatcactgcatgctcgacgattgattcagagggacatgatttcaaggccgtcattcttgagtacatgtctaacggcagcctggagaactggctctatccgaaattgaacaggtatggaattcgaaaaccgttaagtttgggctccagaatagaaatcgcagcggacatagcctgtgctctggattacctccataaccattgcgttcccgctatagtccattgtgacttgaaacccagcaacgtacttcttgatgatgccatggttgcacaccttggtgactttggattggctaagcttcttcacacttgtagctattcaattactcatagttcttctacaagcttgattggaccaagaggatcaatcggatacattgcaccagagtatggcttcgggagcaaactctctacacagggcgatgtctatagctatggaatcaccgtcttagaaatgctcacagggaagcgccccacagatgagatgttttctaagggtttgacccttcacaaatttgtgaaggaagcatttcctcaaaagattcatgaaattctcgatccttctatattcccggttacaagagatggtgataatcacacaacggatgaaataaccagaagcatcatgaaccttcttaagatcggtatctcgtgctctgcagatgcaccaacagaccgaccaacaatagatgatgtttatgctaaagtcatcacaatcaaagaaacatttttagatctatgccactaaggaatggaacaatcatttttactatttaaatcaggggggcattatgttttatttactctgtttgcttgggaagcttaggaatcaaataaattgtgggtcttgtcctttattttgtcattactcttatgtaatttgacgagtagagagctgacaagtctgtttgctaggtgtgaccgcagctccactgtggggcatacttgtaatattcttataactcaatgactctttagcaaacatccaaaccacaaagaccagttgtgccctgagtgaactcactgtattgttgggagatagatacaaaggattaagagtgatccaccaataaaaagagatttccgatcactatagttggctgtcaaaaaatagtggtccgaccatgttaactttcgatggctctgtgaggcgtcggaagttaataacttccaacaccaaccgtcaaaagttagataactttcgtatgcagttgaaatttactaacttccaatagttttagctaacttttgatggctttggcgatcataagtcaagttgtttttgtcgtgcagttaagctttttttctcccttataaattgtatatgatactagaacagagaagctttatagtggcggtcgtaaacctattttttgtggcgtttatcttaaccgtcagtgctaggaatcagtaaaaatcattatttttacaggcgagtaactgaagaccgccagt

SEQ ID NO: 76285 - DNA, 4117 bp, Zea Mays
attgtttacagcaagctggccacacagttgtttacagcaatctggctgccttctataaatggagcatatccaccaccaaagaaacacacacacacacacgaccactgcaaaatactagtaacaatgtctcagacaacatatatggcccctgtaggcactctcggcttctcgctgccgttgatcatcctcttggcttctctttcggcgctactagctactacacctaacgacgacatggaagcgctgctctgcctcaagcaccacctctcagcctcatcagaccctacggggacactaccttcatggaagaatgattccacgcagttctgcagttggtccggcgtgacatgcagcaagagacactcgtcccgtgttgttgcactggaccttgagtcactcgacctccatggccaaatacctccttgcatcggcaacctcacgttcctcacaaggatccacatgccaaacaaccagctgcagggtcagatcccggctgagcttggccagttaaaccggctgcggccatcgatctttcgaggaattccctcagcggaagcatccccgaaggtctggggagcctcctcggcaacctctcggatttacgcctttcaggtaaccatctgacgggcagcattccagcttcacttggaagcagctcctcccttgtctccgttgttctcaacaacaacagcctcactggacccatcccgtcgctactagctaacagttcgtcgctccaacgactggggctaagaaacaaccgtctcagcggactcattccccagtcgctgtttaacagcacgtcgcttgagatgctagtgcttgcagggaacagctttgctgggcccatacctgctgtctcaaacaccgtcgttgactcgccgccgccgcccttgcagtatctgatactggactcgaacgatctaacagggcccttgccttccactctagggaacctcacttctctcctctggctcacgcttgggggtaacggttttcatggtagcatcccgacgagcctgggtgcactcgtgaacctgcaagtgctggacatgactaacaatgctttgtcggggactgttccggcctccatctacaacatgtcagcgctcacacacctcggcatgggcatgaacaatctcaccggggaaatcccagctaacgttgggtatagccttccgagaatcgtgaacctgatcatggctcgaaacaagttcactggccaaatccctgtttcgctgaccaaggccaccaatctccagatcattaatctctgggacaacgcacttactggtactgtccctttgttcggagccttgcccaacttagtcgagctggatctaacgaagaaccagctcgaagctggccgggactggtcgttcttgacatccttgacaaattgcacgcagctggtgactctgtacctggacagaaacactctcggaggagtcttgccgaaatccataggggacctgcccagtggactggaggtgttgtttttaagtgcgaatggaatatctggcaccatccccaatgagataggacgcctaaaaaacctcaagcttctttatctggacaggaacctccttgctggaagtattccctactccctagggcatcttccgaacatgttcgcgttaaacttagcgcagaacaaactctcagggcagattccagcctctctcggtaacctaagccagcttagcgagctctacttgcaagaaaaccacttgagtggcccgataccaggtgctttaggacgctgcaagaacttagacaagctgaacctctcttgtaacagctttggcggtggcataccggaggagctgtttactctttcttccctctctaacgaactggacttgtcgcacaaccaactctcaggagagataccactagagatcggcagcttcgtcaaccttggcctactaaatatttctaacaacatgctggccggacgaataccgtccactctaggtcagtgtgtgcatctcgagtccctccacatggaggggaacctacttgatggtaggatcccacaatcgctccaaggattacgaggcctcgttgagatggacatgtctcggaacaacttgtctggtgaaatcccggagttctttgaaacatttagctccatgaagcttctcaacctgtccttcaacgacctcgagggaccagttccaacaggtgggatatttcaggatgcacgggatgtgtttgttcaagggaacaaggacctatgttccagtacccacttgctacagctaccactttgcactacagatactacatctaaacggcataggcacacctcctcctatgttctgaagttagtaggatttacagctctttctttagtcttgctattatgctttgcggtcgtccttttaaagaagagaaagaaggttcagcaagtagaccatccatccagcatggatttgaagaagtttacgtacgctgggctagtcaaagcaactaacagtttttcctcagacaacttggtgggctcaggaaaatgtggattggtgtataagggaagattttgggatgaggaacatgtagttgccatcaaagtattcaaacttgatcaactcggagcaccaaacagcttcctcgctgaatgtgaggccctgaggaatactagacaccgcaatctcgtgaaggtgatcactgcatgctcgacgattgattcagagggacatgatttcaaggccgtcattcttgagtacatgtctaacggcagcctggagaactggctctatccgaaattgaacaggtatggaattcgaaaaccgttaagtttgggctccagaatagaaatcgcagcggacatagcctgtgctctggattacctccataaccattgcgttcccgctatagtccattgtgacttgaaacccagcaacgtacttcttgatgatgccatggttgcacaccttggtgactttggattggctaagcttcttcacacttgtagctattcaattactcatagttcttctacaagcttgattggaccaagaggatcaatcggatacattgcaccagagtatggcttcgggagcaaactctctacacagggcgatgtctatagctatggaatcaccgtcttagaaatgctcacagggaagcgccccacagatgagatgttttctaagggtttgacccttcacaaatttgtgaaggaagcatttcctcaaaagattcatgaaattctcgatccttctatattcccggttacaagagatggtgataatcacacaacggatgaaataaccagaagcatcatgaaccttcttaagatcggtatctcgtgctctgcagatgcaccaacagaccgaccaacaatagatgatgtttatgctaaagtcatcacaatcaaagaaacatttttagatctatgccactaaggaatggaacaatcatttttactatttaaatcaggggggcattatgttttatttactctgtttgcttgggaagcttaggaatcaaataaattgtgggtcttgtcctttattttgtcattactcttatgtaatttgacgagtagagagctgacaagtctgtttgctaggtgtgaccgcagctccactgtggggcatacttgtaatattcttataactcaatgactctttagcaaacatccaaaccacaaagaccagttgtgccctgagtgaactcactgtattgttgggagatagatacaaaggattaagagtgatccaccaataaaaagagatttccgatcactatagttggctgtcaaaaaatagtggtccgaccatgttaactttcgatggctctgtgaggcgtcggaagttaataacttccaacaccaaccgtcaaaagttagataactttcgtatgcagttgaaatttactaacttccaatagttttagctaacttttgatggctttggcgatcataagtcaagttgtttttgtcgtgcagttaagctttttttctcccttataaattgtatatgatactagaacagagaagctttatagtggcggtcgtaaacctattttttgtggcgtttatcttaaccgtcagtgctaggaatcagtaaaaatcattatttttacaggcgagtaactgaagaccgccagt

SEQ ID NO: 76286 - DNA, 3962 bp, Zea Mays
cactgtttggacatctatagtctaaagggctgacccgttccacacaattgtttacagcaagctggccacacagttgtttacagcaatctggctgccttctataaatggagcatatccaccaccaaagaaacacacacacacacacgaccactgcaaaatactagtaacaatgtctcagacaacatatatggcccctgtaggcactctcggcttctcgctgccgttgatcatcctcttggcttctctttcggcgctactagctactacacctaacgacgacatggaagcgctgctctgcctcaagcaccacctctcagcctcatcagaccctacggggacactaccttcatggaagaatgattccacgcagttctgcagttggtccggcgtgacatgcagcaagagacactcgtcccgtgttgttgcactggaccttgagtcactcgacctccatggccaaatacctccttgcatcggcaacctcacgttcctcacaaggatccacatgccaaacaaccagctgcagggtcagatcccggctgagcttggccagttaaaccggctgcggccatcgatctttcgaggaattccctcagcggaagcatccccgaaggtctggggagcctcctcggcaacctctcggatttacgcctttcaggtaaccatctgacgggcagcattccagcttcacttggaagcagctcctcccttgtctccgttgttctcaacaacaacagcctcactggacccatcccgtcgctactagctaacagttcgtcgctccaacgactggggctaagaaacaaccgtctcagcggactcattccccagtcgctgtttaacagcacgtcgcttgagatgctagtgcttgcagggaacagctttgctgggcccatacctgctgtctcaaacaccgtcgttgactcgccgccgccgcccttgcagtatctgatactggactcgaacgatctaacagggcccttgccttccactctagggaacctcacttctctcctctggctcacgcttgggggtaacggttttcatggtagcatcccgacgagcctgggtgcactcgtgaacctgcaagtgctggacatgactaacaatgctttgtcggggactgttccggcctccatctacaacatgtcagcgctcacacacctcggcatgggcatgaacaatctcaccggggaaatcccagctaacgttgggtatagccttccgagaatcgtgaacctgatcatggctcgaaacaagttcactggccaaatccctgtttcgctgaccaaggccaccaatctccagatcattaatctctgggacaacgcacttactggtactgtccctttgttcggagccttgcccaacttagtcgagctggatctaacgaagaaccagctcgaagctggccgggactggtcgttcttgacatccttgacaaattgcacgcagctggtgactctgtacctggacagaaacactctcggaggagtcttgccgaaatccataggggacctgcccagtggactggaggtgttgtttttaagtgcgaatggaatatctggcaccatccccaatgagataggacgcctaaaaaacctcaagcttctttatctggacaggaacctccttgctggaagtattccctactccctagggcatcttccgaacatgttcgcgttaaacttagcgcagaacaaactctcagggcagattccagcctctctcggtaacctaagccagcttagcgagctctacttgcaagaaaaccacttgagtggcccgataccaggtgctttaggacgctgcaagaacttagacaagctgaacctctcttgtaacagctttggcggtggcataccggaggagctgtttactctttcttccctctctaacgaactggacttgtcgcacaaccaactctcaggagagataccactagagatcggcagcttcgtcaaccttggcctactaaatatttctaacaacatgctggccggacgaataccgtccactctaggtcagtgtgtgcatctcgagtccctccacatggaggggaacctacttgatggtaggatcccacaatcgctccaaggattacgaggcctcgttgagatggacatgtctcggaacaacttgtctggtgaaatcccggagttctttgaaacatttagctccatgaagcttctcaacctgtccttcaacgacctcgagggaccagttccaacaggtgggatatttcaggatgcacgggatgtgtttgttcaagggaacaaggacctatgttccagtacccacttgctacagctaccactttgcactacagatactacatctaaacggcataggcacacctcctcctatgttctgaagttagtaggatttacagctctttctttagtcttgctattatgctttgcggtcgtccttttaaagaagagaaagaaggttcagcaagtagaccatccatccagcatggatttgaagaagtttacgtacgctgggctagtcaaagcaactaacagtttttcctcagacaacttggtgggctcaggaaaatgtggattggtgtataagggaagattttgggatgaggaacatgtagttgccatcaaagtattcaaacttgatcaactcggagcaccaaacagcttcctcgctgaatgtgaggccctgaggaatactagacaccgcaatctcgtgaaggtgatcactgcatgctcgacgattgattcagagggacatgatttcaaggccgtcattcttgagtacatgtctaacggcagcctggagaactggctctatccgaaattgaacagctattcaattactcatagttcttctacaagcttgattggaccaagaggatcaatcggatacattgcaccagagtatggcttcgggagcaaactctctacacagggcgatgtctatagctatggaatcaccgtcttagaaatgctcacagggaagcgccccacagatgagatgttttctaagggtttgacccttcacaaatttgtgaaggaagcatttcctcaaaagattcatgaaattctcgatccttctatattcccggttacaagagatggtgataatcacacaacggatgaaataaccagaagcatcatgaaccttcttaagatcggtatctcgtgctctgcagatgcaccaacagaccgaccaacaatagatgatgtttatgctaaagtcatcacaatcaaagaaacatttttagatctatgccactaaggaatggaacaatcatttttactatttaaatcaggggggcattatgttttatttactctgtttgcttgggaagcttaggaatcaaataaattgtgggtcttgtcctttattttgtcattactcttatgtaatttgacgagtagagagctgacaagtctgtttgctaggtgtgaccgcagctccactgtggggcatacttgtaatattcttataactcaatgactctttagcaaacatccaaaccacaaagaccagttgtgccctgagtgaactcactgtattgttgggagatagatacaaaggattaagagtgatccaccaataaaaagagatttccgatcactatagttggctgtcaaaaaatagtggtccgaccatgttaactttcgatggctctgtgaggcgtcggaagttaataacttccaacaccaaccgtcaaaagttagataactttcgtatgcagttgaaatttactaacttccaatagttttagctaacttttgatggctttggcgatcataagtcaagttgtttttgtcgtgcagttaagctttttttctcccttataaattgtatatgatactagaacagagaagctttatagtggcggtcgtaaacctattttttgtggcgtttatcttaaccgtcagtgctaggaatcagtaaaaatcattatttttacaggcgagtaactgaagaccgccagt

SEQ ID NO: 76287 - DNA, 510 bp, Zea Mays
aaaagactaatcctcctacctggatcagatttctcacaacctcccgggtcaagggttcagttgcagcagccggggcaacggctattaataggctctggaatctttatgattttaggcgtagcatagtcatccctagctctcggcgcctacaaggaaacatgcaaagatacggttacggtttcctgactcggcggctgctgcctcttctgatcttggtcatgtcattattgatttatggggttaccaacgatcccaataatcctggcgtacaggggagacctccttgctgtcaaattatcggatgttgttaatagacgcgctcctatgctctttttatttcgactttctatttcgcacaagcgctctagatgacacgttttttttaagtattcaacgaggtgtagtaaatagacagacccggcacccaaggacagagggacacctatctactatacgctagtaccttttcccgttaaacctatttaccctagatataaatatacaaagagc

SEQ ID NO: 76288 - DNA, 344 bp, Zea Mays
ggaagaaataagctgtacaaatacagtgaccatatatagggattaaacggaaagcaaacgaaaaatttggagagcggagatccagctgactcgttgcccacacacacacatgctgttggactcttccatgcgttgcacgatacgtctattaacagcagacatttttctgacagcaagaagggctcccctgtacgggaggatctgcgatggagacggcgagaaaataccaggccatgaacataatataatcagtgtgtaaacggatggtggtggtggtgggctacttaccaccgggacctccaggcgtaattgctgataagccaagatgaaccgttaacatgacc

SEQ ID NO: 76289 - DNA, 2287 bp, Zea Mays
tcggttgtgagctcttaatacgaattttaccgccgccaccaagaaaggaaagagagagccaccggcaagactccacggatacaccgccaataaggccccgataccgggcctgggtgcttcatgggatcacgccggcacgtctggggcattgtcgagcacaagaggaaactcgaactgcggatagcccctcaccggacttcgggagctgcacgccaccaaggccgggcccctacacgctatcatcttggataagagtacccatcatcactttgcttttctctccgctacatgtagctacttccggatcgaagcttggcacgttaggtcaaaggttcgagtagtccagtattagcgctgccgaggggctagcacgtcactgccgtgccgacatcgcggggtaggaggtgatgccgggatcattgatccaatgatatgtggcaaggattaaaagggaaaaataatagtttggtcggggtggtatgagccatcaatctggcatggagggatgaggatcaatcttggtcgtttaaaatccaggatgttggcattaaatctgacggtgtaaaactcataccgctttgggaagacgaggatctaatatgcgcccttatatttaaatccaactggtaggaatacacgatacctctttgcctcggtcgatttatagaagagaccctgaactttattagtatcaacccgccattccctatagctcaaagactataacagttaggtccatgtttttaatgaatagaccctaggtttctcgggttttattacccgctgtcattttcagcttaagtatataaaataaaatccaagaatttcataaaagcctttagtaaatgtgtttaagtgtaaaattaattcaataaatcttagaaaatgcataacttatttgttttagctcatattttagtgattcttgaacctacgatctcgcagcaaagcgtagaatatttttacacagtttgttctcatgtttttggtgtaattgtatcatatccattatttgtttatttgtatgtattactacgatagaagcgaggttacaatgaggaatctgaaaccgaactttggggaagcaccaggaatcacaagtaaaaggcatgttgtgtccgtgatcacattcttttactaataatttttatgataatcaccctgacatgcttagattaaattgatcaaacctaatacctagttttgtttaccctacaccttgcatacaaattaattattgggtagtcttgttattgctctacctagttttgggattaatgctatatatgaattatgatcatgctctaatattattgtcaatcgattatttactgttcatgataagattatttggttaattggaacatggagaatcacccggaaaaacagtgctaccacaagggtggaatgggatgcctttggccaagtaattaggaaagctagggagagattatcttacccaaaagaagcaagcaaagagtgcgtagttgcagagtatagggaggttctcgggtcgaactgtctgtgatagctttttggacgagagttcctatgctcccttcttcctcacactgtagcaggttttctcaaactagtggaactttggaaaagcctcgtagtgttacccttcctcgtcatctctatagatatgaatgggatttgagacccttggtaaatgggtaagacagcttgtgggtaaatatgtgcaatctttggagagtgtaaaattagcatatcagtcgtgctcacggtcaagagcggctcgaacactcacatgattaacttatggaattaaaacttaacctgtcatgcattgtattgtgtgatttattattaattgtcagcaattatttaagtgggttggtatacacttattcttagtaattgctaataaaattttgaaaaactttttaaaaagcaatactcagccttaaccattttctttggtaagccttacactacacatgagcccccactgtaagtgagcccgtgcacattattccccacacttgctgagcgataaatgtatgtgagctcactcttcctataatcacactaggttaagaataggtaatgctggaggaacatgaaggatgatgcgatgagttcggagaggtctaggtcgtcgtctccaagtcgactatggttgtagaggatcattgtcgtcatatgatgtatttcacttagctattttgtatggaattcttttatatattaaagatgtcacattgttctttgtaccatgagtcatcatatgtgtgagacttgatcaaagaacacatttgag

SEQ ID NO: 76290 - DNA, 1161 bp, Zea Mays
agaggatttaatgtcctctaatctctttctggattggtcacgggaatgggggatcggcgccattgccgtctctaccgaaaatccagacaaagcacgagctacgcacgcccccgctgcctcctttctgccgtcccaacgccgccggagtctgtcgccaccgtcgctgctctcccgccttcaccgcgcccaactctcgtccttgcctcccctgcgcgcttcagccgcttcactccccatcgttttcgcctggccaggatctactgggaccatggatcaagaaaaaaaactagaagtatctaataccagccatacttacaagcatcattgtagcgttggagttgacgtccacgagatctttgttaagaggagcagattgcgggttgttctgtcatacattggcattattttccttcttgtgaatgcctgccaaccattgctgacaaaggagagcctatctcttgggtctgtttggaatattacctttgctgttctggtcgccaaatgtttgcaatacaaacctgtgaagagagattctcaagccaatgataaatgagtgcgtgacaccggtgacctgttactggagcttggcgctgcttctgcgtgatgaagaggaacttctgctcgttttccagagatctcgtcctcctgtcaaaatgttggttccaatatggaaagctctctgcacgttgacaaactctcaacacccaagcccttctcaaattcctaaccatgacccttgaggaacatgagttagctggggcgttgtgtagatgtacgtatcatcagaagaggcacctgcagttgagccagattcagataggaactgttgatgccaccataggacgtaaccagtgctaggggcattgattgttagggagtgatttcggctggaagtgtatacggataaacactagcaatttgtgacactgaatactctcctttacttgcatgcttcattttgttggatatctgaatgaggtgctgaatataagcaaatttaagtgaaactttggtatgtacgtaaagatgcaaacttttgttaaacaatatcttgtctcgtgtgccacataagtacttgttgagttattcacattccatatggattggttgatattgaaaggaatcagaaagaattttgatttggtagggattcaaatatag

SEQ ID NO: 76291 - DNA, 1292 bp, Zea Mays
atccataagagatttgagagaattccctccgaagattgaagagatttaaatcccttcctagttatttttgactaagagaggatttaatgtcctctaatctctttctggattggtcacgggaatgggggatcggcgccattgccgtctctaccgaaaatccagacaaagcacgagctacgcacgcccccgctgcctcctttctgccgtcccaacgccgccggagtctgtcgccaccgtcgctgctctcccgccttcaccgcgcccaactctcgtccttgcctcccctgcgcgcttcagccgcttcactccccatcgttttcgcctggccaggatctactgggaccatggatcaagaaaaaaaactagaagtatctaataccagccatacttacaagcatcattgtagcgttggagttgacgtccacgagatctttgttaagaggagcagattgcgggttgttctgtcatacattggcattattttccttcttgtgaatgcctgccaaccattgctgacaaaggagagcctatctcttgggtctgtttggaatattacctttgctgttctggtcgccaaatgtttgcaatacaaacctgtgaagagagaatcagtagtgataatgccagcttttggaattcagctagaaatacatttttggagattctcaagccaatgataaatgagtgcgtgacaccggtgacctgttactggagcttggcgctgcttctgcgtgatgaagaggaacttctgctcgttttccagagatctcgtcctcctgtcaaaatgttggttccaatatggaaagctctctgcacgttgacaaactctcaacacccaagcccttctcaaattcctaaccatgacccttgaggaacatgagttagctggggcgttgtgtagatgtacgtatcatcagaagaggcacctgcagttgagccagattcagataggaactgttgatgccaccataggacgtaaccagtgctaggggcattgattgttagggagtgatttcggctggaagtgtatacggataaacactagcaatttgtgacactgaatactctcctttacttgcatgcttcattttgttggatatctgaatgaggtgctgaatataagcaaatttaagtgaaactttggtatgtacgtaaagatgcaaacttttgttaaacaatatcttgtctcgtgtgccacataagtacttgttgagttattcacattccatatggattggttgatattgaaaggaatcagaaagaattttgatttggtagggattcaaatatag

SEQ ID NO: 76292 - DNA, 1605 bp, Zea Mays
atttttatcatgatatattacaggaaaacattatcatatataagtttaacgggtccccgcggggaacggggaatgtttttccatctccgtccccgtttacccatcaggagaggattttttcccgtttacatcccgcgaggggagaaccttccccatacccatcccctaatagagaaattccttagggcttgttcggttacaccaatccataagagatttgagagaattccctccgaagattgaagagatttaaatcccttcctagttatttttgactaagagaggatttaatgtcctctaatctctttctggattggtcacgggaatgggggatcggcgccattgccgtctctaccgaaaatccagacaaagcacgagctacgcacgcccccgctgcctcctttctgccgtcccaacgccgccggagtctgtcgccaccgtcgctgctctcccgccttcaccgcgcccaactctcgtccttgcctcccctgcgcgcttcagccgcttcactccccatcgttttcgcctggccaggatctactgggaccatggatcaagaaaaaaaactagaagtatctaataccagccatacttacaagcatcattgtagcgttggagttgacgtccacgagatctttgttaagaggagcagattgcgggttgttctgtcatacattggcattattttccttcttgtgaatgcctgccaaccattgctgacaaaggagagcctatctcttgggtctgtttggaatattacctttgctgttctggtcgccaaatgtttgcaatacaaacctgtgaagagagaatcagtagtgataatgccagcttttggaattcagctagaaatacatttttggaggatataggctgtttgaaggttgttccgattgtcaattggtttatattaagaattttaaattgtggttcttagtggaagagttgatcatcgttttgtgcccgttggcaagattctcaagccaatgataaatgagtgcgtgacaccggtgacctgttactggagcttggcgctgcttctgcgtgatgaagaggaacttctgctcgttttccagagatctcgtcctcctgtcaaaatgttggttccaatatggaaagctctctgcacgttgacaaactctcaacacccaagcccttctcaaattcctaaccatgacccttgaggaacatgagttagctggggcgttgtgtagatgtacgtatcatcagaagaggcacctgcagttgagccagattcagataggaactgttgatgccaccataggacgtaaccagtgctaggggcattgattgttagggagtgatttcggctggaagtgtatacggataaacactagcaatttgtgacactgaatactctcctttacttgcatgcttcattttgttggatatctgaatgaggtgctgaatataagcaaatttaagtgaaactttggtatgtacgtaaagatgcaaacttttgttaaacaatatcttgtctcgtgtgccacataagtacttgttgagttattcacattccatatggattggttgatattgaaaggaatcagaaagaattttgatttggtagggattcaaatatag

SEQ ID NO: 76293 - DNA, 972 bp, Zea Mays
atcgaggcaagctagagcagagagagaataaaaaagaagtcggccctggcccattgaagatatgtacagtatacgtgtagtagtgaacatgctttgtggggggtgactggtgacatacctgcaaccatggcactatataacagagatggtctcctctccctgcgtcgtgaggccgtgccggactaagaagaccgacgactcactcacaaccaattagctcaagatcgagctatagagagaaaagctaagatcgaaacatataccaatgggcaacagccttaggtgctgcctggcctgcgtcctcccctgcggcgcgctggacctgatcaggatcgtccacctcaacggccgcatcgaggagtacggccggccggtggccgccggcgagatcctggccgccaacccgaaccacgtcctcagcaagccgtgctcccagggcgtcgccgtgcggaggatcctcatcgtgtcgccggactccgagctagagcgcggcgagatatacttcctcatcccggcctcgtcggtgccgccggagaagaagccgcagccgcagcgacagcagaagagcgtcgtcctggccggctcgcacggcaaccaggtggtggtcaacaagaagatatcgtcgtcgcaccggagacgacgcaccgccggctgcagaaccaccgtatggaagccacacctcgagtgcattgttgagggggacacttaggcagaggtggacgatgatccattcttttgctctctctttttttttggtttttgtggatcaagcggggggctaatggctaatgcaatgtaacaccactagcagcatggtgttttgcccactttgtgtggttagtcagcatttttaatcttttttcttgggtaattgtatatccatgtaatgttttcccccttcctacatatgatgggaatgcagaggaagggttgttgccagttctttcttcttcttcgtgttccgcggttgcc

SEQ ID NO: 76294 - DNA, 1792 bp, Zea Mays
caccttccctttttctgtcagggaaggagaatcatcacctccaattacattccatgacttcatgggacaacatgtgtttacggagcaagtagctgtatctgctgcaccagggacaactcatccttgcccatatgtggcatacttgcatcctcttccaccactgacatcgtcaagctcccatgtccctgagagaaccactgatcgtactgcataccatgatcattggaaccccatggttgggccatcagatgttaggcccatgcaaacaatgcaacctgctgatttccatcatagccattgggcacatgtgccccattcttatgctcaacccaacagcaacaatgagcagccaggaatcccttttggaacaagggctacacgggttgatggtgatagccaacgtcgaatatctgttgtttctccatcttacttcagcaatggacctcccagtgttcctcctctgatgcctcagttcatgagggcccatggcagcatcaatgaacaataccaacagaattcatcatctagcctatttgctggggcacataggtcaggaggcatgcgacctgcgccgacacctctaccagagaaccccaccttttccttgttcccaccgggttcatccggccatagttcgatggagactgatgacgctggaggaagccagttctatgcctgggagcgtgaccggttcgccccatttccgttgatgcctgtggactgcgagataagctggtggacctcacagcagcagtctcatagcacatcagagccttcatctgctccaaggaggctattcgggcaatggctcggcgtcggcaggtcgtcccctgaaaatagaccacccgagggctcttcgtatcggcaaatgatgcctgtggactgcgagacaagctggtggtcctcacagcatcagtctcatagcacatcggagcctacatctgctccaaggaggctattcgggcaatggctcggcgtcagcaggtcgtcccctgagaacagatcgcccgagggctcttcgtatcggcaaatgcactcgccacggatgtagaccatcgctgctggcaatccaatttaatttggaacccgagatgcttgtaagaaacgatgggaaacccattgtattatgttaggccaggctgggccgtaaaactttgggacgatgttcgaggggcgagaaacaggaaatcatccggctgagaggatattttgatttggtttatgtgaattctatctcgtacatatttgaaatcaagttgggatgttaggagtcatgctgcaattctgttgatcgacggctttcaaatgctattaaatttacgttgcaatggtacctgttgaaccgaagatggttttatgttcgtgtcgcatgtgaaggattacctttcatgcggttttcaatagggcaaaataaaatcttaattaaactcttaccattgacttgcagtgattggtattttgttagcactgtaaaatgttgaagtacgacacagaatatcggcactagggcagaaggttctttgtggaaggttcatattaataaaaaaaaggctgctgttttagtgtatttttagtggcggaagtgagaggggagacagcttatctgttagagctagtttgagagtctaaaaactggaggggttagagaggctaaaatcctcttcttatttaaaattgaataaggatgacattttagccccttcaattctctccggttttgtggctcctaaactaaccttaggtcaactttcatcctgcaacggataacttaatactggactgcaccgtcgtc

SEQ ID NO: 76295 - DNA, 3699 bp, Zea Mays
acccgagaacctccctataccgacaactcacctaccgcccttgtccctttcgggtaagatagtcctccactagctttcctaattagtcagccaagggcgtcccatagcacccttgtggtagcactgttttcctaggtggtcgctccatgttccaattaacataatgatcttgtcatgaacagtaaataactcattgacaataaaaggcatggttgtgaataatgtgtatcttaacacccaaaaccacataaagcaatagcatgtactacccaaaagttcagtggtaaacaaggtataaagatgaccaaactagggtgacctattgggtcccaacaaaattaacctatgcagatcataatgattaacaggaacattattgggtaaagaaaagtgatcaaggacacaacttgccttcaatgagctcctgctcagagttttccacctgcagagtaccgaggtcctcggtcacttgctcgtctactcgcagtaatacaaacaaacatggtatatgagaaattaacatcacactaatcatgagaacatattgcataataatgatctacgcatcgtaacgagatcgtaggttcgagaaccactaaaatcggagttacgattaagaagttatgattttctaaagatttagaagttagacataaaacaaattaagtgcatgcttttaaccataggttcaccctgaaataaggctactggatgataaacaatattaatacaaatttaatgcaactggaatggataaaaaaggagttaaaatgaatcacttatgaattaatcaagattctggaatgttttctatactagaaaacattttctgtattatattatccaatttattcacttcctgggctgcgggtctaaaattccgacagcacatgggctaaatctcaatttctggacttagattcaattactttataactgatgtggacgacaggtttatttcccaaaacagaagggttctttagcataattgtcactgcaaagggttatcgtgcaattacagccgtccgatctaccctagacggccacgattacaatctatctctaccgaactggtacgcgattgcagttgcccgatccaaattcaatggtccaaatttgaccacgcctcacccatcctagatccgcccactttccgatctacgacatagatttaaaatacgaaatagtaccctcctatctcatcacgaccgcacctaaccggatcaacggtccagcgtcctctaatccaatcgctacgtcggagccgatcagagccgcaaatcagggattcaacggctggcatgatctcgcacctctcccctgactccggctggcggcgctctccccgcacggcggtgcccttgccggggcatagcccggccccattttttcgcccgaaaccccgcaccggtggccgcataatgtagagtaggacatggcgaggcacgggaaggacatctcaccaaggttagacgcatgggcggccctggctgcgggggcttgcggtccgcggcggggtatcaccgtcagtgagctattcaggcggcgttggcgatgaatcccaagcggcacgggttcgtccacccacctagcctgaagaagccctaggacacaaccctgaggactcggtcaacggcgagccggagttcacccgcggtgactctcagagctcgctgccctctcatgctcccttgattttgttggcaacactgatccctaatgtttggttgtggcgcatggaagggcgaggtgacctgcgcaactcctgttttatggacgtcgcaaccttaccgcccccagctgaagattcgggtggcgtaaccaaccgcgctgatgccgcagggtcgggaagaggaacaatagttggtgaaggcccacgcaccagcgagacgctcgagtccgcgcgcgttgaaggagccagctgatgagcgggcccgtgaatcagtgagggaaggaagagtcaagcgtggtgcagtgtctgacgggcggggcccacgcgtcggcgccaaccgcagagatgggctgcgcgcgacatgtaggttaggtgggccgaattctagcctggtggcccaaaacagggaaggagaatcatcacctccaattacattccatgacttcatgggacaacatgtgtttacggagcaagtagctgtatctgctgcaccagggacaactcatccttgcccatatgtggcatacttgcatcctcttccaccactgacatcgtcaagctcccatgtccctgagagaaccactgatcgtactgcataccatgatcattggaaccccatggttgggccatcagatgttaggcccatgcaaacaatgcaacctgctgatttccatcatagccattgggcacatgtgccccattcttatgctcaacccaacagcaacaatgagcagccaggaatcccttttggaacaagggctacacgggttgatggtgatagccaacgtcgaatatctgttgtttctccatcttacttcagcaatggatctagacctcccagtgttcctcctctgatgcctcagttcatgagggcccatggcagcatcaatgaacaataccaacagaattcatcatctagcctatttgctggggcacataggtcaggaggcatgcgacctgcgccgacacctctaccagagaaccccaccttttccttgttcccaccgggttcatccggccatagttcgatggagactgatgacgctggaggaagccagttctatgcctgggagcgtgaccggttcgccccatttccgttgatgcctgtggactgcgagataagctggtggacctcacagcagcagtctcatagcacatcagagccttcatctgctccaaggaggctattcgggcaatggctcggcgtcggcagcagcaggtcgtcccctgagaacagatcgcccgagggctcttcgtatcggcaaatgcactcgccacggatgtagaccatcgctgctggcaatccaatttaatttggaacccgagatgcttgtaagaaacgatgggaaacccattgtattatgttaggccaggctgggccgtaaaactttgggacgatgttcgaggggcgagaaacaggaaatcatccggctgagaggatattttgatttggtttatgtgaattctatctcgtacatatttgaaatcaagttgggatgttaggagtcatgctgcaattctgttgatcgacggctttcaaatgctattaaatttacgttgcaatggtacctgttgaaccgaagatggttttatgttcgtgtcgcatgtgaaggattacctttcatgcggttttcaatagggcaaaataaaatcttaattaaactcttaccattgacttgcagtgattggtattttgttagcactgtaaaatgttgaagtacgacacagaatatcggcactagggcagaaggttctttgtggaaggttcatattaataaaaaaaaggctgctgttttagtgtatttttagtggcggaagtgagaggggagacagcttatctgttagagctagtttgagagtctaaaaactggaggggttagagaggctaaaatcctcttcttatttaaaattgaataaggatgacattttagccccttcaattctctccggttttgtggctcctaaactaaccttaggtcaactttcatcctgcaacggataacttaatactggactgcaccgtcgtc

SEQ ID NO: 76296 - DNA, 1105 bp, Zea Mays
atgcctatccaggcgcagaacacgccatttgtaaaccaatcctagccgtgcgtcttcaatccaacggaaagttcctccttgtcaatagcaaatcggaggcccaagcgctcccaatctctccgggtcctctctccgcattctccgtcatggctgagccgacgccgtcgcagtcgccagcgcagacgccgcccccgccgccgacgcagcagactcccgcggcgggtgggctcgaggacatgctggcgtgtgtggcggcgctggaggccgcgctgctgccgtgcctccccgcgcgcgagctccaggccgtcgaccgctccctccagtcctcccaccagaggtatctaagtgttgtagtctctactaaattgggcagttgatgttgagaggcacgcaagggatttcatggaggctgccaagaagctccagtcttatttcatcagcctgcagcgtgaggaaccgccatctgcagaagagatgcttcgaaaggagattacgacaatggaggaagagttgaagagcaagtctgagctcattgccaagcacaagaagttgattgaagggtggcaaaaggaactgaaggagcagctgagcaagcacatcacggagcttgaaagggtgtgaggagtgcgattctgcggtttaccttgtagtgatcatgaacctctaggtgaccaaatgttatgttatgccctataaaactgtgtacatgtgcttagaatctgacgccatggttagcaatcgccttttgttggtttcttaaggttggaagccacgaacaaagcccactttatctatgtttgattgtgtacctttacttgccccatggtctctgttgttgtgcaaaatgagtctctgccatcataaaacgacatagaatgctaacggcttcctgtctttatgggtaaactttgggtgaatttatgggtaaactttgggtgaactgttggagtcagcctagcgggttatgtgcctactctggatggccgccatgttcgcaagttcctttctatctttactccatttgtgcctggatcagctcgaacagaaccttctcctgacaaaaagccgagccaagtggcacagttgctacgttgaatacacgagc

SEQ ID NO: 76297 - DNA, 1953 bp, Zea Mays
gtcccccaatcgaagaggtgatcagcacaggagtggtgccgcgattcattgagtttcttacacgtgaggaccatccccaactccagtttgaggctgcatgggcactcaccaacattgcatcaggcacatcagagaacactaaggtggtggttgagagtggtgctgtgcccatctttgtcaagctactcaactccctcagcgaggatgttcgtgaacaggctgtatgggctttaggtaatgttgctggtgactccccaaagtgccgtgatctggtacttggtcatggtgggctataccctttgctgcagcagcttaatgagcatgctaagctttcgatgcttaggaatgctacatggactctctccaacttctgtcgggggaagccacaaccaaactttgatcaggatgaggaggtcctaactgatgcctgctgggcgctctcatacttgtctgatgggactaatgataaaatccaagctgttattgaatctggcgtgttccctcgccttgtggaacttctgatgcatccttcggcctctgtactcattccagctcttcgcacggtgggtaacattgtaactggggatgacatgcagactcagtgtgtcattgacaatcaagcacttccatgccttttgaatcttctgactaccaaccacaagaaaagcatcaagaaagaagcatgctggacgatctcaaacatcacagctggtaacaaggagcagattcaggctgtgatcaatgcaaatataattgcacctctggtgcaactcctgcaaactgctgaatttgacatcaagaaagaagcagcctgggcaatttcaaatgccacttctggtggcacacatgatcagatcaagtaccttgttgcccagggttgcattaagccactctgtgatctgcttgtttgcccggatcccagaatcgtaacagtttgcttggagggtctcgagaacatcctgaaggttggcgaggcagagaaaaaccttggtgcaggtgatgtcaatgtctatgcacagatgattgatgatgctgagggcctggacaagattgagaacctgcagagccatgacaacaccgagatatatgagaaggctgtgaagatgctggaatcctactggctggaggaggaagatgatgccatgccctcaggcgacaatccccagaatggcttcaactttgggaaccagccctctgttccatcaggtggattcaactttggctgaagatgcccatttggaatggccgctgtgccattatgccttggctagtgctctgggctagtcagaggtgtggggtagcggcgtcaaccaagtcatggttgagtcccattggtctggtctcagggagttgtcatgtcagtcccagtcagcagggtcagtccttgggctgcattaccagtggtgcagcttggtcggtggtcagtcttgaaggtcagccggttggatcatttgggctcttgctcccaccagcaccacctctggtgggaggcatcaggcatggagtcgcgggtgttgtcgggagttgggttttgcctcctatacagcataaatgaattatattgttttacctgttggtagaaagaaccttgaaagatagggaacgtgtcgttttttgtcaaagcggttcctgtgctgtataacatgttgcatgagtattggcgcaacttataagacaatgtcaaatgggtttttgggagtcccattctggtttcttgagtcttcttcattggtctattgtgtaacatgtacacaggtttgtggttcgtcttgtcttgtctgttgtatttgccaccgttgtctggaagttgttgcatgcttatctagaacagcagtataccagggttaattctgtgacatttatggttcctaacttggtgggatcagattaaaaagttgtatggccatgacgatatcaaagaaataattcggtgcatttttgctccgttttatc

SEQ ID NO: 76298 - DNA, 2000 bp, Zea Mays
tagtcccccaatcgaagaggtgatcagcacaggagtggtgccgcgattcattgagtttcttacacgtgaggaccatccccaactccagtttgaggctgcatgggcactcaccaacattgcatcaggcacatcagagaacactaaggtggtggttgagagtggtgctgtgcccatctttgtcaagctactcaactccctcagcgaggatgttcgtgaacaggctgtatgggctttaggtaatgttgctggtgactccccaaagtgccgtgatctggtacttggtcatggtgggctataccctttgctgcagcagcttaatgagcatgctaagctttcgatgcttaggaatgctacatggactctctccaacttctgtcgggggaagccacaaccaaactttgatcaggtcaaaccagcattgccagcactacagcaccttattcactctcaggatgaggaggtcctaactgatgcctgctgggcgctctcatacttgtctgatgggactaatgataaaatccaagctgttattgaatctggcgtgttccctcgccttgtggaacttctgatgcatccttcggcctctgtactcattccagctcttcgcacggtgggtaacattgtaactggggatgacatgcagactcagtgtgtcattgacaatcaagcacttccatgccttttgaatcttctgactaccaaccacaagaaaagcatcaagaaagaagcatgctggacgatctcaaacatcacagctggtaacaaggagcagattcaggctgtgatcaatgcaaatataattgcacctctggtgcaactcctgcaaactgctgaatttgacatcaagaaagaagcagcctgggcaatttcaaatgccacttctggtggcacacatgatcagatcaagtaccttgttgcccagggttgcattaagccactctgtgatctgcttgtttgcccggatcccagaatcgtaacagtttgcttggagggtctcgagaacatcctgaaggttggcgaggcagagaaaaaccttggtgcaggtgatgtcaatgtctatgcacagatgattgatgatgctgagggcctggacaagattgagaacctgcagagccatgacaacaccgagatatatgagaaggctgtgaagatgctggaatcctactggctggaggaggaagatgatgccatgccctcaggcgacaatccccagaatggcttcaactttgggaaccagccctctgttccatcaggtggattcaactttggctgaagatgcccatttggaatggccgctgtgccattatgccttggctagtgctctgggctagtcagaggtgtggggtagcggcgtcaaccaagtcatggttgagtcccattggtctggtctcagggagttgtcatgtcagtcccagtcagcagggtcagtccttgggctgcattaccagtggtgcagcttggtcggtggtcagtcttgaaggtcagccggttggatcatttgggctcttgctcccaccagcaccacctctggtgggaggcatcaggcatggagtcgcgggtgttgtcgggagttgggttttgcctcctatacagcataaatgaattatattgttttacctgttggtagaaagaaccttgaaagatagggaacgtgtcgttttttgtcaaagcggttcctgtgctgtataacatgttgcatgagtattggcgcaacttataagacaatgtcaaatgggtttttgggagtcccattctggtttcttgagtcttcttcattggtctattgtgtaacatgtacacaggtttgtggttcgtcttgtcttgtctgttgtatttgccaccgttgtctggaagttgttgcatgcttatctagaacagcagtataccagggttaattctgtgacatttatggttcctaacttggtgggatcagattaaaaagttgtatggccatgacgatatcaaagaaataattcggtgcatttttgctccgttttatc

SEQ ID NO: 76299 - DNA, 2076 bp, Zea Mays
aggccgtccactccaacgacccctccgtgcagcttgaggccaccacacagttcaggaagctgctttctatagagcgtagtcccccaatcgaagaggtgatcagcacaggagtggtgccgcgattcattgagtttcttacacgtgaggaccatccccaactccagtttgaggctgcatgggcactcaccaacattgcatcaggcacatcagagaacactaaggtggtggttgagagtggtgctgtgcccatctttgtcaagctactcaactccctcagcgaggatgttcgtgaacaggctgtatgggctttaggtaatgttgctggtgactccccaaagtgccgtgatctggtacttggtcatggtgggctataccctttgctgcagcagcttaatgagcatgctaagctttcgatgcttaggaatgctacatggactctctccaacttctgtcgggggaagccacaaccaaactttgatcaggtcaaaccagcattgccagcactacagcaccttattcactctcaggatgaggaggtcctaactgatgcctgctgggcgctctcatacttgtctgatgggactaatgataaaatccaagctgttattgaatctggcgtgttccctcgccttgtggaacttctgatgcatccttcggcctctgtactcattccagctcttcgcacggtgggtaacattgtaactggggatgacatgcagactcagtgtgtcattgacaatcaagcacttccatgccttttgaatcttctgactaccaaccacaagaaaagcatcaagaaagaagcatgctggacgatctcaaacatcacagctggtaacaaggagcagattcaggctgtgatcaatgcaaatataattgcacctctggtgcaactcctgcaaactgctgaatttgacatcaagaaagaagcagcctgggcaatttcaaatgccacttctggtggcacacatgatcagatcaagtaccttgttgcccagggttgcattaagccactctgtgatctgcttgtttgcccggatcccagaatcgtaacagtttgcttggagggtctcgagaacatcctgaaggttggcgaggcagagaaaaaccttggtgcaggtgatgtcaatgtctatgcacagatgattgatgatgctgagggcctggacaagattgagaacctgcagagccatgacaacaccgagatatatgagaaggctgtgaagatgctggaatcctactggctggaggaggaagatgatgccatgccctcaggcgacaatccccagaatggcttcaactttgggaaccagccctctgttccatcaggtggattcaactttggctgaagatgcccatttggaatggccgctgtgccattatgccttggctagtgctctgggctagtcagaggtgtggggtagcggcgtcaaccaagtcatggttgagtcccattggtctggtctcagggagttgtcatgtcagtcccagtcagcagggtcagtccttgggctgcattaccagtggtgcagcttggtcggtggtcagtcttgaaggtcagccggttggatcatttgggctcttgctcccaccagcaccacctctggtgggaggcatcaggcatggagtcgcgggtgttgtcgggagttgggttttgcctcctatacagcataaatgaattatattgttttacctgttggtagaaagaaccttgaaagatagggaacgtgtcgttttttgtcaaagcggttcctgtgctgtataacatgttgcatgagtattggcgcaacttataagacaatgtcaaatgggtttttgggagtcccattctggtttcttgagtcttcttcattggtctattgtgtaacatgtacacaggtttgtggttcgtcttgtcttgtctgttgtatttgccaccgttgtctggaagttgttgcatgcttatctagaacagcagtataccagggttaattctgtgacatttatggttcctaacttggtgggatcagattaaaaagttgtatggccatgacgatatcaaagaaataattcggtgcatttttgctccgttttatc

SEQ ID NO: 76300 - DNA, 2413 bp, Zea Mays
cgtatctcccttccgttccccaattcgaaatcgaatcgggtccgacgggtcggtcttgccgtgcgtgcgtggctgcgcgagcgactcgactgcacccccgctcctcccagtccccacacactgcgcgccgccgccgggtcctcctagggtttcgccgcgatgtcgctccggccgagcgagcgggagcagatgcggaagggcaactacaagcagacggtagacgcggaggagagccgccgccgccgcgagggccagatggtggacatccgcaaggccaagcgcgaggaaagcctccagaagaagcgccgcgatgggtttcccgcctccgccgccggtgtgccgccgatgggccactccaccgcgctccagcagaagctcgatggcttgccggcgatggtgcaggccgtccactccaacgacccctccgtgcagcttgaggccaccacacagttcaggaagctgctttctatagagcgtagtcccccaatcgaagaggtgatcagcacaggagtggtgccgcgattcattgagtttcttacacgtgaggaccatccccaactccagtttgaggctgcatgggcactcaccaacattgcatcaggcacatcagagaacactaaggtggtggttgagagtggtgctgtgcccatctttgtcaagctactcaactccctcagcgaggatgttcgtgaacaggctgtatgggctttaggtaatgttgctggtgactccccaaagtgccgtgatctggtacttggtcatggtgggctataccctttgctgcagcagcttaatgagcatgctaagctttcgatgcttaggaatgctacatggactctctccaacttctgtcgggggaagccacaaccaaactttgatcaggtcaaaccagcattgccagcactacagcaccttattcactctcaggatgaggaggtcctaactgatgcctgctgggcgctctcatacttgtctgatgggactaatgataaaatccaagctgttattgaatctggcgtgttccctcgccttgtggaacttctgatgcatccttcggcctctgtactcattccagctcttcgcacggtgggtaacattgtaactggggatgacatgcagactcagtgtgtcattgacaatcaagcacttccatgccttttgaatcttctgactaccaaccacaagaaaagcatcaagaaagaagcatgctggacgatctcaaacatcacagctggtaacaaggagcagattcaggctgtgatcaatgcaaatataattgcacctctggtgcaactcctgcaaactgctgaatttgacatcaagaaagaagcagcctgggcaatttcaaatgccacttctggtggcacacatgatcagatcaagtaccttgttgcccagggttgcattaagccactctgtgatctgcttgtttgcccggatcccagaatcgtaacagtttgcttggagggtctcgagaacatcctgaaggttggcgaggcagagaaaaaccttggtgcaggtgatgtcaatgtctatgcacagatgattgatgatgctgtgaagatgctggaatcctactggctggaggaggaagatgatgccatgccctcaggcgacaatccccagaatggcttcaactttgggaaccagccctctgttccatcaggtggattcaactttggctgaagatgcccatttggaatggccgctgtgccattatgccttggctagtgctctgggctagtcagaggtgtggggtagcggcgtcaaccaagtcatggttgagtcccattggtctggtctcagggagttgtcatgtcagtcccagtcagcagggtcagtccttgggctgcattaccagtggtgcagcttggtcggtggtcagtcttgaaggtcagccggttggatcatttgggctcttgctcccaccagcaccacctctggtgggaggcatcaggcatggagtcgcgggtgttgtcgggagttgggttttgcctcctatacagcataaatgaattatattgttttacctgttggtagaaagaaccttgaaagatagggaacgtgtcgttttttgtcaaagcggttcctgtgctgtataacatgttgcatgagtattggcgcaacttataagacaatgtcaaatgggtttttgggagtcccattctggtttcttgagtcttcttcattggtctattgtgtaacatgtacacaggtttgtggttcgtcttgtcttgtctgttgtatttgccaccgttgtctggaagttgttgcatgcttatctagaacagcagtataccagggttaattctgtgacatttatggttcctaacttggtgggatcagattaaaaagttgtatggccatgacgatatcaaagaaataattcggtgcatttttgctccgttttatc

SEQ ID NO: 76301 - DNA, 2453 bp, Zea Mays
cgtatctcccttccgttccccaattcgaaatcgaatcgggtccgacgggtcggtcttgccgtgcgtgcgtggctgcgcgagcgactcgactgcacccccgctcctcccagtccccacacactgcgcgccgccgccgggtcctcctagggtttcgccgcgatgtcgctccggccgagcgagcgggagcagatgcggaagggcaactacaagcagacggtagacgcggaggagagccgccgccgccgcgagggccagatggtggacatccgcaaggccaagcgcgaggaaagcctccagaagaagcgccgcgatgggtttcccgcctccgccgccggtgtgccgccgatgggccactccaccgcgctccagcagaagctcgatggcttgccggcgatggtgcaggccgtccactccaacgacccctccgtgcagcttgaggccaccacacagttcaggaagctgctttctatagagcgtagtcccccaatcgaagaggtgatcagcacaggagtggtgccgcgattcattgagtttcttacactttgaggctgcatgggcactcaccaacattgcatcaggcacatcagagaacactaaggtggtggttgagagtggtgctgtgcccatctttgtcaagctactcaactccctcagcgaggatgttcgtgaacaggctgtatgggctttaggtaatgttgctggtgactccccaaagtgccgtgatctggtacttggtcatggtgggctataccctttgctgcagcagcttaatgagcatgctaagctttcgatgcttaggaatgctacatggactctctccaacttctgtcgggggaagccacaaccaaactttgatcaggtcaaaccagcattgccagcactacagcaccttattcactctcaggatgaggaggtcctaactgatgcctgctgggcgctctcatacttgtctgatgggactaatgataaaatccaagctgttattgaatctggcgtgttccctcgccttgtggaacttctgatgcatccttcggcctctgtactcattccagctcttcgcacggtgggtaacattgtaactggggatgacatgcagactcagtgtgtcattgacaatcaagcacttccatgccttttgaatcttctgactaccaaccacaagaaaagcatcaagaaagaagcatgctggacgatctcaaacatcacagctggtaacaaggagcagattcaggctgtgatcaatgcaaatataattgcacctctggtgcaactcctgcaaactgctgaatttgacatcaagaaagaagcagcctgggcaatttcaaatgccacttctggtggcacacatgatcagatcaagtaccttgttgcccagggttgcattaagccactctgtgatctgcttgtttgcccggatcccagaatcgtaacagtttgcttggagggtctcgagaacatcctgaaggttggcgaggcagagaaaaaccttggtgcaggtgatgtcaatgtctatgcacagatgattgatgatgctgagggcctggacaagattgagaacctgcagagccatgacaacaccgagatatatgagaaggctgtgaagatgctggaatcctactggctggaggaggaagatgatgccatgccctcaggcgacaatccccagaatggcttcaactttgggaaccagccctctgttccatcaggtggattcaactttggctgaagatgcccatttggaatggccgctgtgccattatgccttggctagtgctctgggctagtcagaggtgtggggtagcggcgtcaaccaagtcatggttgagtcccattggtctggtctcagggagttgtcatgtcagtcccagtcagcagggtcagtccttgggctgcattaccagtggtgcagcttggtcggtggtcagtcttgaaggtcagccggttggatcatttgggctcttgctcccaccagcaccacctctggtgggaggcatcaggcatggagtcgcgggtgttgtcgggagttgggttttgcctcctatacagcataaatgaattatattgttttacctgttggtagaaagaaccttgaaagatagggaacgtgtcgttttttgtcaaagcggttcctgtgctgtataacatgttgcatgagtattggcgcaacttataagacaatgtcaaatgggtttttgggagtcccattctggtttcttgagtcttcttcattggtctattgtgtaacatgtacacaggtttgtggttcgtcttgtcttgtctgttgtatttgccaccgttgtctggaagttgttgcatgcttatctagaacagcagtataccagggttaattctgtgacatttatggttcctaacttggtgggatcagattaaaaagttgtatggccatgacgatatcaaagaaataattcggtgcatttttgctccgttttatc

SEQ ID NO: 76302 - DNA, 900 bp, Zea Mays
ctacacaaacaaatagcactgcaatatcggaagatataataatataagcgatcgagacgacgctgtggtcgatcgagtggggcatcgccgagctggtgaaccacccggccatccagcacaagctccgggaggagctcgcctcggtgctgggcgccggcgtgcctgtgacggagccggacctcgagcgcctcccctaccttcaggccatcgtcaaggagacgctccgcctgcgcatggccatcccgctgctggtcccccacatgaacctcaacgacggcaagctcgccggcttcgacatccccgccgagtccaagatcctcgtcaatgcctggttcctcgccaacgaccccaagaggtgggtgcgccccgacgagttccggcccgagcgcttcctggaggaggagaagtccgtggaggcccacggcaacgacttccgattcgtgccctttggggtcggccgccggagctgccctgggatcatcctcgcgctgcctatcatcggcatcaccctgggccggctggtgcagaacttccagctgctgccgccgccggggctggacaagatcgacaccacggagaagcccggccagttcagcaaccagatcgccaagcatgccaccatcgtctgcaagcccctcgaggcctagaaatcaatgcgtgtttcctgcacgcgcccccgcagatgaagcactatgtattttctcttttttttgtgtgttgtgttttttttactaagaggagatgtatttcttgttcgtaaaatgcacttagtcaaatggatcgagattatgttgatcattaaacaccaaaatcacttagtcaaacgggtcgggatccattttcctcacaatgtcaacctttgactgatgacaatataatcaaagcaagcaaatattaaat

SEQ ID NO: 76303 - DNA, 1083 bp, Zea Mays
caataatgtagtagaagactagtttatttgtcacctactaggcagagagtgcggtggttccatgaaccaaccattcgtgcgtgcgtgcccaccgcacgaccacgagggggaaggtgatggctcagactggtgagatccggtgcgccatggatcacatcctcgaggccgagaggaagggcgagatcaaccacgacaacgtcctctacatcgtcgagaacatcaacgtcgcagcgatcgagacgacgctgtggtcgatcgagtggggcatcgccgagctggtgaaccacccggccatccagcacaagctccgggaggagctcgcctcggtgctgggcgccggcgtgcctgtgacggagccggacctcgagcgcctcccctaccttcaggccatcgtcaaggagacgctccgcctgcgcatggccatcccgctgctggtcccccacatgaacctcaacgacggcaagctcgccggcttcgacatccccgccgagtccaagatcctcgtcaatgcctggttcctcgccaacgaccccaagaggtgggtgcgccccgacgagttccggcccgagcgcttcctggaggaggagaagtccgtggaggcccacggcaacgacttccgattcgtgccctttggggtcggccgccggagctgccctgggatcatcctcgcgctgcctatcatcggcatcaccctgggccggctggtgcagaacttccagctgctgccgccgccggggctggacaagatcgacaccacggagaagcccggccagttcagcaaccagatcgccaagcatgccaccatcgtctgcaagcccctcgaggcctagaaatcaatgcgtgtttcctgcacgcgcccccgcagatgaagcactatgtattttctcttttttttgtgtgttgtgttttttttactaagaggagatgtatttcttgttcgtaaaatgcacttagtcaaatggatcgagattatgttgatcattaaacaccaaaatcacttagtcaaacgggtcgggatccattttcctcacaatgtcaacctttgactgatgacaatataatcaaagcaagcaaatattaaat

SEQ ID NO: 76304 - DNA, 1008 bp, Zea Mays
gtccacaacaggttaacagatcaaagaaggataggaaggtgatggctcagactggtgagatccggtgcgccatggatcacatcctcgaggccgagaggaagggcgagatcaaccacgacaacgtcctctacatcgtcgagaacatcaacgtcgcagcgatcgagacgacgctgtggtcgatcgagtggggcatcgccgagctggtgaaccacccggccatccagcacaagctccgggaggagctcgcctcggtgctgggcgccggcgtgcctgtgacggagccggacctcgagcgcctcccctaccttcaggccatcgtcaaggagacgctccgcctgcgcatggccatcccgctgctggtcccccacatgaacctcaacgacggcaagctcgccggcttcgacatccccgccgagtccaagatcctcgtcaatgcctggttcctcgccaacgaccccaagaggtgggtgcgccccgacgagttccggcccgagcgcttcctggaggaggagaagtccgtggaggcccacggcaacgacttccgattcgtgccctttggggtcggccgccggagctgccctgggatcatcctcgcgctgcctatcatcggcatcaccctgggccggctggtgcagaacttccagctgctgccgccgccggggctggacaagatcgacaccacggagaagcccggccagttcagcaaccagatcgccaagcatgccaccatcgtctgcaagcccctcgaggcctagaaatcaatgcgtgtttcctgcacgcgcccccgcagatgaagcactatgtattttctcttttttttgtgtgttgtgttttttttactaagaggagatgtatttcttgttcgtaaaatgcacttagtcaaatggatcgagattatgttgatcattaaacaccaaaatcacttagtcaaacgggtcgggatccattttcctcacaatgtcaacctttgactgatgacaatataatcaaagcaagcaaatattaaat

SEQ ID NO: 76305 - DNA, 674 bp, Zea Mays
cacatagatccccgacgccgccaagcaggacactcctgtcgaccccttcgctcaccttactgaacctgaacagaaatcatacacctgggatgctgcaacggccgccgggaaactcagggtcaaaaccggttgtgcgccccggtctccaggctataaaaatagggtcccacgaccctcctacatcccatcggcatcacaaataaatcacgcctaggagcaccatcatggcgaggaggaggataatagggaaagccgtcgcacctggaaatcctttgcattagctttcagcctcggggaattggtcctggtgattcatcaggtcacgctcaagcaattgaccccttgctgtgcatgtctggtggacgaagataccgtgattcgtcgttggagtgccgtcaccaccgcagagccgcgtctcatcgtgggtagagaacatcacgcctcggttcctggttgggatttccggtgatggcgccgccgtgggctgagaacaccgccgcctgtgcacagcatcgacgagcaagtgaccgaggagcccagagcacatcaggttgaagattctgagcagaagctcgcagaagattctggaagcacttatagcaaagaattgccgagaggacttttcgcaggaatcattagagacacttggggattctttttcaactatattacag

SEQ ID NO: 76306 - DNA, 613 bp, Zea Mays
cgcacatagatccccgacgccgccaagcaggacactcctgtcgaccccttcgctcaccttactgaacctgaacagaaatcatacacctgggatgctgcaacggccgccgggaaactcagggtcaaaaccggttgtgcgccccggtctccaggctataaaaatagggtcccacgaccctcctacatcccatcggcatcacaaataaatcacgcctaggagcaccatcatggcgaggaggaggataatagggaaagccgtcgcacctggaaatcctttgcattagctttcagcctcggggaattggtcctggtgattcatcaggtcacgctcaagcaattgaccccttgctgtgcatgtctggtggacgaagataccgtgattcgtcgttggagtgccgtcaccaccgcagagccgcgtctcatcgtgggtagagaacatcacgcctcggttcctgacgagcaagtgaccgaggagcccagagcacatcaggttgaagattctgagcagaagctcgcagaagattctggaagcacttatagcaaagaattgccgagaggacttttcgcaggaatcattagagacacttggggattctttttcaactatattacag

SEQ ID NO: 76307 - DNA, 1687 bp, Zea Mays
ctcgtaccggattaaaaaacgtgcttcagctgggctttcggggttacatcaatatttctcttcctccacttcccatcctgttcgtgactcgtgatttcgccgccggaaagccgagggagagggagcgagatggggttcgtcggcgacacgatggagtcaatccgctccatgcagatccgccaattgctcacgcagatcatcagcctcggtgacgctctctgccgcaccctcctcttctttcccccctgcttgttttttttttctcctcgagatctttgtagtgcgtttggagccctataattcttgggtttgtggtgaggcctttgccatgcgagtctactacgattttaattagcgggacaagtcttttttccatttccagtggtttttgccgtaagatcggtggagactgctcctgattcttcatctggttctatgatctgaactctttagctaccccccttaagaatcataaaaatgcgtagatgagaacagtagtcgaattgggtgtgacagctttagagaactggattttgtttttttttcttcttctcctcttttattatctggagcgtttataatgatgcttatgcactgaagaagtgattaagtttcttgtgggttactctagactccagttgtcgctaatagcaattcaggtttgtacactgggactttcctgcggtttgatatttgactgttaatttgcaacatgagtctcatgaggagggttttaactttcgaatttttctctttgcaggtatgattgttacctctgcattaatcatatggaaggggttgatagttttcacagggagcgagtcaccagttgtagtggttctctctggtagcatggaacctggatttaaaaggggtgatatcctgtttttgcatatgagcaaagatcctattcgcacaggagaaatagttgttttcaatatcgatggccgtgaaattccaattgtccaccgtgtaattaaggtccatgaacgtcaggacactgcagaagtggacatcctcaccaaaggtgacaataattttggggatgaccgactattatatgcacatgggcagctttggctccagcaacatcacattatgggacgtgctgtgggctaccttccatatgttggctggattacaattatcatgactgagaaaccatttattaagtacctgctgattggtgcactgggcttgctggtcataacgtcgaaagattagagtgtcaaacttcgcgcagtatagattttgctcttatggtgcaacatcagagctttccaggaaaccccctaggctagctatttgcaatgaaaaaatctgcgcaccaggacaaatttgggatagacgattgttgcttttgtttcatcttattacaaacgggcacacgtcaagccggcaacaggttccggtaatgtgctatgaacaagcaattaaaacggagattgatagggtgtgtttggttaggtttttggctttggtttcggcttggacttctctcccctaaaatccaaaagtcaaacaaaggactggatttagggagctgttttctctgaaagtcatttttctcacaatgtaaaacagaaagcatctatagacctaattttagcagcttttggatggaactatgaaaatatatatggaagaatttttaatagattttagtggtttttatcaaatttgttag

SEQ ID NO: 76308 - DNA, 1201 bp, Zea Mays
gtcatctctacccgaaccgaaccgtataaagacggtcacgcactgtataaagacggtcggattggactcgtaccggattaaaaaacgtgcttcagctgggctttcggggttacatcaatatttctcttcctccacttcccatcctgttcgtgactcgtgatttcgccgccggaaagccgagggagagggagcgagatggggttcgtcggcgacacgatggagtcaatccgctccatgcagatccgccaattgctcacgcagatcatcagcctcggtatgattgttacctctgcattaatcatatggaaggggttgatagttttcacagggagcgagtcaccagttgtagtggttctctctggtagcatggaacctggatttaaaaggggtgatatcctgtttttgcatatgagcaaagatcctattcgcacaggagaaatagttgttttcaatatcgatggccgtgaaattccaattgtccaccgtgtaattaaggtccatgaacgtcaggacactgcagaagtggacatcctcaccaaaggtgacaataattttggggatgaccgactattatatgcacatgggcagctttggctccagcaacatcacattatgggacgtgctgtgggctaccttccatatgttggctggattacaattatcatgactgagaaaccatttattaagtacctgctgattggtgcactgggcttgctggtcataacgtcgaaagattagagtgtcaaacttcgcgcagtatagattttgctcttatggtgcaacatcagagctttccaggaaaccccctaggctagctatttgcaatgaaaaaatctgcgcaccaggacaaatttgggatagacgattgttgcttttgtttcatcttattacaaacgggcacacgtcaagccggcaacaggttccggtaatgtgctatgaacaagcaattaaaacggagattgatagggtgtgtttggttaggtttttggctttggtttcggcttggacttctctcccctaaaatccaaaagtcaaacaaaggactggatttagggagctgttttctctgaaagtcatttttctcacaatgtaaaacagaaagcatctatagacctaattttagcagcttttggatggaactatgaaaatatatatggaagaatttttaatagattttagtggtttttatcaaatttgttag

SEQ ID NO: 76309 - DNA, 847 bp, Zea Mays
acacattcaagggcaaggtagaagaaaagtagtgttgaagtataggagcccttgcttaatcatacgtgtccatggtgtaagtatattgttgtgctgtaaaatttctatttgcttagtgcaaaagttgtgatccatatgaaggagtgctctgcctcccgggatcacaagacatcatctgtaggagtgctctgcctcctagaagccagcttcatctgtaggagtgctctgcctcccagaagcaaatatggctggctctgccacgtaccatgcactaagtaattagagattaaatatgaactattgtaatgtattgatgtatgttattttgattattgtctatccacccacgacgtcccacaagtagagccagttccggaagagaacccggaggagccaggagacgaagaacatgacgccgcggacacgcaactgaacgaagaggatcctgatttcgtgcccgaggaattttgagtactttgtgccctatacccaagtttggcgtggtgccgatgctatagaagccaccatgtgggaagaagatactaccctcgtgtttatcgactatagttcttctagttggtgttattattgtaaccgaatgtactaaataaagttatgtatgactatggcaccacttgtgtaatgtatttcactagagattgttttctggtgcttaaatacatgtttagcttcggttgtttagaccggtgcgttacaggagtggaagatagttcttcttgctatgagttgctcaatcaatgcggataactttgggagcaaactcaaaacaatgtgagcaagagaactttagagagggaagaaacaaatcaactagtgaagattaaca

SEQ ID NO: 76310 - DNA, 1617 bp, Zea Mays
gtgattgtgcttgtggtcctgttacgtggtcttatttaagcttcgcctccagccatgggtaaggagaagtctcacatcaacattgtggttattggccacgtcgactctggcaagtcgacaaccaccggccacctgatctacaagcttggaggcattgacaagcgtgtgatcgagaggtttgagaaggaggccgctgaaatgaacaagcgatccttcaagtatgcttgggtgcttgacaagctcaaggctgagcgtgagaggggtatcaccattgatattgctctgtggaagtttgagaccaccaagtactattgcaccgttattgatgcccctggacaccgtgactttatcaagaacatgatcactggtacctcccaggctgactgtgctgtccttatcattgactccaccactggtggttttgaggctggtatctccaaggatggccagacacgtgagcatgctctccttgcgttcacacttggagtgaagcagatgatttgctgctgcaacaagatggatgcaaccactcccaaatactccaaggcacgttatgatgagattgtgaaggaagtctcatcttacctcaagaaagttgggtacaaccctgataagattgcatttgttcccatctctggttttgagggtgacaacatgattgagaggtccaccaaccttgactggtacaaaggcccaaccctgcttgaggctcttgatcagatcaccgagcccaagagaccctcagacaagcccctgcgtctccccctccaggatgtgtacaagattggtggtattggaactgtgccagttggtcgtgtggagactggtgtcatcaagcctggtatggttgtcacctttggtccaactggcctgactactgaggtgaagtctgttgagatgcaccatgaggctcttcaggaggcccttcctggtgacaacgttggcttcaacgtgaagaatgtcgcggtgaaggatatcaagcgtggttatgtggcctccaactccaaggatgaccctgccaaggaggctgccagcttcacctcccaggtcatcatcatgaaccaccctggccagatcggtaacggctatgccccagtgctggactgccatacctcccatattgctgtcaagtttgctgagctgattaccaagatcgacaggcgttctggcaaggagcttgagaaagagcccaagttcttgaagaacggtgatgctggtatggtgaagatgattcccaccaagcccatggtggtggagacattctcgcagtatcctcccctgggtaggtttgctgtccgtgacatgagacagacggttgctgttggagtcatcaagagtgtggagaagaaggacccgaccggtgccaaggtgaccaaggctgctgccaagaagaaatgatgcgacctgtcgttgatgcagcgtctgcttttccaatacgtagctgagatgttccattttggcataagttttgtatgctgtggttgctgacttgctgttaccttgtgaactgttgagctctactattgggtgcccgtttatctgtttatgtagcatcttgttatttcacctattgcaatacaagaatgctatatatgacatatagtgagaaaaaaaaca

SEQ ID NO: 76311 - DNA, 1751 bp, Zea Mays
tggctgagtttatgggtcctgggcctccattcggtagtcaattttattgggctggtccggcctacaccgacgcccttatataaatcccgaaccctagaaggcagcaccttcctccccaacacgccgccgtcttctgcggttctgccgtttactcttccactttggcctcctctcttgcaaggtatcacctcgttcactgtcgctcgacctctgttcttgagctgcttcatgcgatagcgactggaccaaatttaagcttcgcctccagccatgggtaaggagaagtctcacatcaacattgtggttattggccacgtcgactctggcaagtcgacaaccaccggccacctgatctacaagcttggaggcattgacaagcgtgtgatcgagaggtttgagaaggaggccgctgaaatgaacaagcgatccttcaagtatgcttgggtgcttgacaagctcaaggctgagcgtgagaggggtatcaccattgatattgctctgtggaagtttgagaccaccaagtactattgcaccgttattgatgcccctggacaccgtgactttatcaagaacatgatcactggtacctcccaggctgactgtgctgtccttatcattgactccaccactggtggttttgaggctggtatctccaaggatggccagacacgtgagcatgctctccttgcgttcacacttggagtgaagcagatgatttgctgctgcaacaagatggatgcaaccactcccaaatactccaaggcacgttatgatgagattgtgaaggaagtctcatcttacctcaagaaagttgggtacaaccctgataagattgcatttgttcccatctctggttttgagggtgacaacatgattgagaggtccaccaaccttgactggtacaaaggcccaaccctgcttgaggctcttgatcagatcaccgagcccaagagaccctcagacaagcccctgcgtctccccctccaggatgtgtacaagattggtggtattggaactgtgccagttggtcgtgtggagactggtgtcatcaagcctggtatggttgtcacctttggtccaactggcctgactactgaggtgaagtctgttgagatgcaccatgaggctcttcaggaggcccttcctggtgacaacgttggcttcaacgtgaagaatgtcgcggtgaaggatatcaagcgtggttatgtggcctccaactccaaggatgaccctgccaaggaggctgccagcttcacctcccaggtcatcatcatgaaccaccctggccagatcggcgttctggcaaggagcttgagaaagagcccaagttcttgaagaacggtgatgctggtatggtgaagatgattcccaccaagcccatggtggtggagacattctcgcagtatcctcccctgggtaggtttgctgtccgtgacatgagacagacggttgctgttggagtcatcaagagtgtggagaagaaggacccgaccggtgccaaggtgaccaaggctgctgccaagaagaaatgatgcgacctgtcgttgatgcagcgtctgcttttccaatacgtagctgagatgttccattttggcataagttttgtatgctgtggttgctgacttgctgttaccttgtgaactgttgagctctactattgggtgcccgtttatctgtttatgtagcatcttgttatttcacctattgcaatacaagaatgctatatatgacatatagtgagaaaaaaaaca

SEQ ID NO: 76312 - DNA, 423 bp, Zea Mays
atgctcacgggtctggccatccttggagataccagcctcaaaaccaccagtggtggagtcaatgataaggacagcacagtcagcctgggaggtaccagtgatcatgttcttgatgaagtcacggtgtccaggggcatcaatgacggtgcagtaatacttggtggtctcaaacttccacagagcaatatcaatggtgatacccctctcacgctcagccttgagcttgtcgagcacccaagcatacttgaaggaccgcttgttcatctcagcagcctccttctcaaacctctctattacacgcttgtcaatgcctccaagcttgtagatcaggtggccggtggtggtcgacttgccagagtcgacgtggccaatgaccacaatgttgatgtgggacttctccttacccatggttgaaggtgaagc

SEQ ID NO: 76313 - DNA, 1973 bp, Zea Mays
ggaaaattggtgttttataagagactagtacaatgtccgtgcgttacgatgacacataattatacgataaaatattagtgcataatgattatataaaaatgaggcataatatctcataaattctttaccgacaaccagtttagtgttactctctaaatttacatcaactattacgtcacacggcacggtcgaagacctagatattagtggagtagcccgctaacatcattctcaaatgcaacaggctgatcatgtggcatcattaatcaccaccttgtacttctcgtccatccttttatcgcagcctacatggatggtgatcccaaactccttagtgccaaatgacaatgccccgcggtgaagagtgagtcatagccgtcgtacgcggagatcatagaatcatacccatgtgacaatgtagaagataccacatataatgtaagggccaaattttgtataagaaaaaaatataaataataaaataaatatatgaagaaatcaaatagtaaattctacgcgatgctatgagatcatggattgtagaatgtctaagaacggagttatggttaaagagatatgactttcggaaggttcagaggattgaatattgaaactaatgttctatatcgattataattcaggtgagaaagacattataattaaagaactaattttaaacctatggtataacttgaatagaggtcaagttataactagggactgaaaacatcattttaactttaattaaaaaagttaatccaaagaacataagtattcttttaaaaaaacatgtcacgtgataaaaaatagggttaccaaagtgtagacaattttattacgaggctagtgcaacttgaatggagtaatttggagttatatagtagaagttattgattttcaaagttgtatgaattacctttatactaaaaatcaatttaaaatcaaatttatacaaatcagcaaatcctttggactactggttttatttgtgaaaagctaagggttggtttcataagtattgggacctgatcgtattgatcttaatactggtgtggatggcaggttgatatattaaaagatcagggtctcttatgtaaaaccgttcagccgaaggggtatcgatgacctctggccattggatctccattggatgatccagattagaccgaacagactccaaccgacaaccctcggatcaagatcaatgctccagattttaaagaattggatgggttttcatgcgtcagattcagatcggacggcgcacaaccgactacgagggatacaccatcagttcaatctctgcggtccgctcgatatctagcgatcggtacaccctcaaatccgagtcgcccaagatcgaatcgatggctagggcaccctcctcgaccccgacgaccagctgggcggccgcgcccgagctagccacggcggcgagctcgtcgtcgcacgaccaacattcgcttagttgtagtatctcgaaattaaaccggtgctatatagagaggagcctaaggtgaccaggtggggatgatcttaccgccgagcaattgtcgtggaggggttggtctatggcagggcgcggatgcttgtggcgagttgactccatcgagcgattcccggtgagcccaactgactcccagaggagggaaggtccgcctagatcccacgcgacacgatggaccctctgggcctcctagcgagggccgaacgacggtggtggcagaagacggtgttggtggtgctctgggcctccactccctcctctcttctctcccaacggcggctggtgtctatgaggcgagatggggggcatgcggatgactatagggtcgcggtctgggtttttatgcaccgacagggttccaggtgcggtcgttgcgacgacacacaaatccctcaaggtggttgatatgaagaagaacagtggagcgggaccccatgtggcagtgacggtgcatggcgtggtgagg

SEQ ID NO: 76314 - DNA, 695 bp, Zea Mays
cttaaactaatgggattcaaggagttccaaccgaagattataatacccctggagaatctgcggagtatcgagctcctacacctgctgttggaacaccaaaacaaagaaatgatgctggagatgatgataatgatgatgatgatgatgaacctcctcttaatgaagacgacgacgaggagttagatgaccttgagcaaggggaggatgaacctaacacacaacatcttgtacttgcacaatttgataaagtgtcaaggaccaagaatcgttggaagtgcaccttgaaggatggaatcatgcatttgaatggcagggatgtcctttttaacaaggcgacaggtgagtttgatttttgattttttggatgaagatgagctattttagaagcagctgtatggacatatctttgtcttgacataaggacagggaggtgacagtgttcttggtggggtcctggcagcatgactgcgtcgtgttttctttcctattgaatcttcgttccaccctcttgtttgtcaccgcaactgttatcgctgtaaagaagttactgcttgtgctgtgtagacaatttctgatatgggtctctcaaatccgctgcgtaactatactaaattatatgtttgtccgtgcgttacgacggctcacaacaatacccacgtaaactatccactaaaaaaatcttaagattttttatt

SEQ ID NO: 76315 - DNA, 1704 bp, Zea Mays
gttacaaataccccagccacttgacgacacgggatgcaaacctatttatattctgtccttaattcccgtgtttctcgtccgtctccgctcctccgcaaccccttcccctcctccgccgaagcctctcctccggccgccgaaaccctagcctccgccgctgccgtcatggcaagcagcaacgtctcgaccgtttacatctctgtcattgatgacgtcatctccaaggtccgcgaggatttcatcacctacggagtcggtgacgccgtcctaaacgagctccaggctctctgggagatgaaaatgctacactgtggcgcgatctcggggaacatagaccgaaccaaggctgctgccgcgtccgtcggaggcaccaccggcacgacaccgcccgtgcacgacctgaacgtgccgtacgaggccacatctgaggagtacgccaccccgaccgctgacatgttgttcccgccgacaccattgcagaccccaatccagactcctctgccagggacagacacagcgatgtacaacatacccactggcccttccgattatgccccctcaccgatcagcgatgtcaggaatgggatggcaataaatggggcagacccaacagctggtcatccaagtccctacatgccaccaccttccccttggatgaatcagaggccgctgggtgttgatgtgaatgtcgcttatgtggaaggccgtgaagatcctgacaggggcgtgcagcctcagccactgactcaggattttttgatgatgtcttctgggaaacgcaagagggatgagtatcctggtcagctcccttctggttcttttgtaccacaacaagatggaagtgctgatcagatagtagaatttgttgtgtcaaaggcatcagttctgttaatctatatttaggaaaatgcgaatcaactttggagttccatcggcaataagcttgaaacaccaaccaagacaatcactccagttattccgcagcgtgatgggattcaagataactacaatgatcaatttttctttccaggagttccaaccgaagattataatacccctggagaatctgcggagtatcgagctcctacacctgctgttggaacaccaaaacaaagaaatgatgctggagatgatgataatgatgatgatgatgatgaacctcctcttaatgaagacgacgacgaggagttagatgaccttgagcaaggggaggatgaacctaacacacaacatcttgtacttgcacaatttgataaagtgtcaaggaccaagaatcgttggaagtgcaccttgaaggatggaatcatgcatttgaatggcagggatgtcctttttaacaaggcgacaggtgagtttgatttttgattttttggatgaagatgagctattttagaagcagctgtatggacatatctttgtcttgacataaggacagggaggtgacagtgttcttggtggggtcctggcagcatgactgcgtcgtgttttctttcctattgaatcttcgttccaccctcttgtttgtcaccgcaactgttatcgctgtaaagaagttactgcttgtgctgtgtagacaatttctgatatgggtctctcaaatccgctgcgtaactatactaaattatatgtttgtccgtgcgttacgacggctcacaacaatacccacgtaaactatccactaaaaaaatcttaagattttttatt

SEQ ID NO: 76316 - DNA, 1511 bp, Zea Mays
gttacaaataccccagccacttgacgacacgggatgcaaacctatttatattctgtccttaattcccgtgtttctcgtccgtctccgctcctccgcaaccccttcccctcctccgccgaagcctctcctccggccgccgaaaccctagcctccgccgctgccgtcatggcaagcagcaacgtctcgaccgtttacatctctgtcattgatgacgtcatctccaaggtccgcgaggatttcatcacctacggagtcggtgacgccgtcctaaacgagctccaggctctctgggagatgaaaatgctacactgtggcgcgatctcggggaacatagaccgaaccaaggctgctgccgcgtccgtcggaggcaccaccggcacgacaccgcccgtgcacgacctgaacgtgccgtacgaggccacatctgaggagtacgccaccccgaccgctgacatgttgttcccgccgacaccattgcagaccccaatccagactcctctgccagggacagacacagcgatgtacaacatacccactggcccttccgattatgccccctcaccgatcagcgatgtcaggaatgggatggcaataaatggggcagacccaacagctggtcatccaagtccctacatgccaccaccttccccttggatgaatcagaggccgctgggtgttgatgtgaatgtcgcttatgtggaaggccgtgaagatcctgacaggggcgtgcagcctcagccactgactcaggattttttgatgatgtcttctgggaaacgcaagagggatgagtatcctggtcagctcccttctggttcttttgtaccacaacaagatggaagtgctgatcagatagtagaatttgttgtgtcaaaggaaaatgcgaatcaactttggagttccatcggcaataagcttgaaacaccaaccaagacaatcactccagttattccgcagcgtgatgggattcaagataactacaatgatcaatttttctttccaggagttccaaccgaagattataatacccctggagaatctgcggagtatcgagctcctacacctgctgttggaacaccaaaacaaagaaatgatgctggagatgatgataatgatgatgatgatgatgaacctcctcttaatgaagacgacgacgaggagttagatgaccttgagcaaggggaggatgaacctaacacacaacatcttgtacttgcacaatttgataaagtgtcaaggaccaagaatcgttggaagtgcaccttgaaggatggaatcatgcatttgaatggcagggatgtcctttttaacaaggcgacaggtgagtttgatttttgattttttggatgaagatgagctattttagaagcagctgtatggacaatttctgatatgggtctctcaaatccgctgcgtaactatactaaattatatgtttgtccgtgcgttacgacggctcacaacaatacccacgtaaactatccactaaaaaaatcttaagattttttatt

SEQ ID NO: 76317 - DNA, 817 bp, Zea Mays
gttacaaataccccagccacttgacgacacgggatgcaaacctatttatattctgtccttaattcccgtgtttctcgtccgtctccgctcctccgcaaccccttcccctcctccgccgaagcctctcctccggccgccgaaaccctagcctccgccgctgccgtcatggcaagcagcaacgtctcgaccgtttacatctctgtcattgatgacgtcatctccaaggtccgcgaggatttcatcacctacggagtcggtgacgccgtcctaaacgagctccaggctctctgggagatgaaaatgctacactgtggcgcgatctcggggaacatagaccgaaccaaggctgctgccgcgtccgtcggaggcaccaccggcacgacaccgcccgtgcacgacctgaacgtgccgtacgaggccacatctgaggagtacgccaccccgaccgctgacatgttgttcccgccgacaccattgcagaccccaatccagactcctctgccagggacagacacagcgatgtacaacatacccactggcccttccgattatgccccctcaccgatcagcgatgtcaggaatgggatggcaataaatggggcagacccaacagctggtcatccaagtccctacatgccaccaccttccccttggatgaatcagaggccgctgggtgttgatgtgaatgtcgcttatgtggaaggccgtgaagatcctgacaggggcgtgcagcctcagccactgactcagaacattgctccctgatgatatgtttccagaatgaggttgtggataaatagaatatgtatctagagtt

SEQ ID NO: 76318 - DNA, 237 bp, Zea Mays
atgagcatcttcgagcgatcatcacacgcagccgtcccttcccgagttttcttaaactccgggatgctctggtcctcgaggaactgcaacttggaccagagtaccagacacgacttcggcaccacctcaggccttctactccaacaactcccagccaccttcctcctctcgcccccttggcagtggctgccagggacagggtcagagccgtggtcgcgggcgtgggaagggtggccg

SEQ ID NO: 76319 - DNA, 4051 bp, Zea Mays
ggccaccttctttttctaatctgaaaagaaatatgatatttacaagctcactaacatgtagatgataatcatataaataatataagaaagcagaaaggattatgtataataaaacatgtatgcattgcattgaactcacgaacagtatagatacgagaatacgatattccctgactatcaaatatctctacatcgcctaaagtcgaaatagaagcatagcagatgatcaacctgagaagtcgaagactaaaacatccccgtagtcaaggcaacatcacaatgtagatgttgtgactggaacagaaatcaagtagctcatgtaaatgattgcccttttagtcaccaaagtagctaaacttgaggtggacatggttgaagccatggaaggaaccaaaagtcaaagcctctacaaagacaaataatcactagcttcccacagacaaccatagcatgaaaatgatccgacagggcatatcgatgagcactcacacgtcctccatctacaacatcagcaacaacatcggactcgaactaagagctagcatgaggaccagcaatatggatcgtgtcaacctagatatatggacacgatagggaaatggcttgcccacgagcagcgtgcgttcttggggagtctcgaacggatcggcgggcaaggagacaaccacggttagagacgagaacgccaattcactaggatcatgggaggatcacatgactggttgagaatcacgtcgacagggctatcgtagactcccttgaagttcactggttgagaatcacgtcgacaatggcagctagtcatgtccccctgttggggagcctccttcagcatcctgcttcgcaacagcaacaagaccttccagtgccttcctggcgaccctcagcaacgacaccgatgtcatcctcggcacaccatggttggcttctctcagccccaccacctcatgcgatgagattctggcgaaatgataggacagtgaacgtcatgggagtctaccaacattcagctccaagatcaatactcgctctaccagctatggccccaccacctcctgcacaaacctcgacagagctataccaccaccaggcacccccacatcagctccatcgcgcacacctagcagcagcaccaaacacccctacagcaggtcagcagcaccaaactacagcaggtcagcagcaccaggcacctccacaaccacctgcatgaaaccaggcacgcctctgagcttctccaacggctgcaccgccaccagcaggagcaacgccttcaacacaatctacccccgcctcacaatctttgagcaaatcaggcaagccgtctaggacatgccagcgctatgcttcatcaaccctgttccaaaacttggtggaatccctgctatgtgtgggtcagttcaagaacctttgcaccctggcctccatgccacaaacagcaactagcaactatgctaccacacacccagccagcaagcataaggatggcagaggtgtggccacaacgcatcgtacacactgtcaacagggtcttcttcgacgatgctggatgctggttcctcagcatcgacgacatctccatcgacctcaacagagacaggatggccagtcatctcaccatccaactactaccatgacagcatcttcctcggcctcactattacaccaacccacagtggcaccatatgcctgagtggcaggctacatacgtcacttgcccctcccaccgcaccccccttcccccacctcctaaccatgcaaatgctaccactagaagcaggtgttcccataccatcattgatgccccaggaactccattcgtccactgcaatgtcataacctcaacagcaaacaagtttttccacggctgcatcagctccttacactacatcttccacctcatcatcggcaggacgaggcatatccacctcagccatggtggtaggccgcctcagtgtgcacacaaaggacttaccaatatggctcatccttccaatggaaccagcaaaaaatggagtgatgtcatgggtcgatccatggctaaagaatgagggcccagtgaggcccagagccggccacaccctggcaggctggcaccgtgtctggaagaagcggtagctatccctagccggctgactccctcccctaccgaggagtccagatcaaggattaggaaaagaaaaacaggattaaaataaaatccatttagaaaattgagtttgtttagaagatggagattccaaatctataaggactcaacatggttgtataaagaaaataccacagacattaaaaattttgcaagctcgtcaaaataccataagctttgaaaaaattaattaggcatagctctagatgatgtaggcatgtagcgataccattcaccttaaatttaagtttaaattcagtcacatttcaatacatacaaaaatgacaaattccatgtgtatgcaatcctccagtgcttcatgaaaattttcatatcttatctatttaactaaataactagatcaactttgaactttaaattctgtatagatttataacagtctcgcctataggtgtgccaaattttaaaacaatttaaaacatctaagtactatttttaaaagatttccaatattggtgtttccatatgagatgcacatgcatgatattatcatgtttgttttaaaaaggtaatacggcaaattttgaatacaatgttcagaataataattaacaagactgataagactataatctttaaaatctcctacaatatataatttgcaatctaatatcatctgagattccgaaaatgcgcatgcatatcatgcactctctaaacttgttagatagccacctgctgcccatataggcgcatgggttgttggcccattatagttattatgattgattactcctataataaacaaggagatccgacagtggtcatacttctataaaccaatcctgggtcattgcctatatatatgtacaccttttggcctcataatcaatctactaattttccatgcaattatattgaatccgtgctatcaagagtctatgtttttccacttagcttctctaccgtgcgcgcagcgccccacatgtgggtctcttccctgttgctgcaaccatgtctgggactgatcactgatgtcccacccgccttctccatcgccaccaacttgccgccacccgtgaacacgccccacgtgcggatctcttccctgttgccgcaaccatgcctgggaccgatgtcccacccaccttctctgtaaccgccaacttgtcaccgcacgtgaagctgctctccagtgcacgaatccgctgcagcgcacgcccacgatgtgcttgcacacgccacctgcgagcatgaggctgccgaggccaccgtctatcccacttacagcacccctcctttgccagtgacctcgacaacttccgattgcttcccaacaatggtggttctcaccaaccgctccaagatgtcccagtggctcatgaggccgctgccatcgtcaacctacacacccaggtcgtcggtctctgaaacatgcagacactcgcccctattgtccgcgacgtggagtccaataactacactcgttcgcaccaccagatgattctggttcttgggaagttcttcctccaacaccatgttctcgctaacgccatcgaccatacctaccctaattgaaagtgacggactacgtcgtaatgacgtggctctacgacactgtctcccccaatctcaaggagaccgtccagaaggatccttcaccgcctgctacgtctagcttgcccgggaacaacacttccttggcaacaacgagcaatgtgctctctaccttgacgctgccttccaaaacttcgttcagggtgatctctccatcaacaactacttctgcaagttcaagtccatggtctatcgcttccaaaactcatgaaactcacaatgagggtcaacaactgagaactcagtgcataattgattcataccaacaaactgacacgagttaagaaccttacttaaagataggttttggccaatgttttctga

SEQ ID NO: 76320 - DNA, 806 bp, Zea Mays
atttaatgaggattttggacaaggcttccaagaagaatttggggctggatattgttttgcgcaattaaacaccaaccaaaagttttttttgacagaaacaagtgcacaaggaggctttagtcgagctagtggtcaagctaaagagatctacaagttgtgtaggtgtaaattcaagggtaaacacacgagggctagaaaaccaacacaagcgtgaattttttttaagaggtttcacttgctaaccacaaggttgtttggagtagggggtcttttgtgggcaataaaggcaacaattttataggcaaaaaggattgaacaattacaataccacctagatagcaagacaagagaaacacataacatgacctaataagacttaccaatccgacacgaggtaaggcatttcttatagttcctaacatagtagtacatcacattattcacaagttattattattggaataaaggtgagagaagcatgttggtgcacaagagacaatgatgcgacaatcatgatgcatgctgattctagtcgtcttctcagacctaactacttttcgggtgcttctacaacatccttattaatagtagtagtagcctttacggcctatataaatagccacctagctacccatctatttcctaaggcttcacgtcctaggtctatccttatcgtcctgatatctatccaactttggtttctaagcaagttttactttagaaaaggttggtaatcatgacttattgacttctctgtactggtattcgctccgataccagctgtggcggaaccacctggattattc

SEQ ID NO: 76321 - DNA, 1306 bp, Zea Mays
tctaaacaggcaaattaattgccaaaactcagtgtgtggacatcagataaactcagagtgtggacatcagataaactcagtgtggacatcagatgaaccagaaagaactcatatgtaaggcttctgagcaaaatgacacaacttatgttactagactcacgccaatttcaagtgtgcccacacaaatcaaacaaaacaaactacactagcagtacaatttgctcagcctacttatcacaattgaactaccaattacttgagctaaatgatctgcagaacacagaaataccagtagcacaagaattaaagctttggtcagagcatagcaagataaagcagaaacaagcttgattaaatgaaagttgtagtgttgtagttctagctatctctggttgaatctccgaagttaaaacatgctcattaccttctacaactgcagattaaattagaagtatctgaatattatattaacatagtattatggttcgtaaaggactggcctggtacaatagcgagagaggtctcaagtcaccatgtcacgggtttgaagcagggctggtacaatagcgggagttgctctaagtcaccatgtcacaggttcgaagcagtctcacaagtatcatggttcatatacaagaattagtaaattggataagttagtacccccaacacataatccacgatgacaagcccaagcaaaaaatagcagtaagacctgcaataatgaccctaatcattaactacttcaaggtagaagacactgaacaaacacaatgcaagttgaaggttgtaggtctgaatagatgcaaactagttccttcatgcccagctatcacctagagatctgcagtcaatgagaccaccctcggataactacctatttgatagtgacaactgagaacacaaacagcatgaacattcatcaaataacttaggaataggataaagcgtgatcaatgggcaacaatttcagctagaagtcctatctctgtagcaatgcctcccaaaactgcacatccagtaccagaacatgaaaagcctacgagggaagtaaatttttaaagaccattgacagcaaaagtttcgaacaacattgacagcaaaccaagggaatcctgaacagtttataacttattgctcatgcagaaccagaatctaactcaggctcctccgtccatacaatccagttgctgtacaagtagagaatcaccatcccaaatgtgtaaggaacaagaaatttaagagtaccaataaaatagaggtagagccaaatgatgttctccagatgcaataaacttcagtccag

SEQ ID NO: 76322 - DNA, 723 bp, Zea Mays
ctacacgcccggtgttcctcccgccagtcaccatgaccacgttgccgacgtcaaacttgatgaagtccatgatcttgttggtctccagattgatcttgaccaacgcctccattgcttcgtatagttgcagatacactttcttttcttccatcttcttagctctttcctgccttctctgcatcaattcagagttcagactatatatcgaacaaaggtttcaaaccacaacgagcattggcctggcagttcctggtgaaaaacagacaaactatggattcaacgggctaagactctgagcagacacactgaaacccagtacaatactgagaccaatcatcacagagaactcaccgtatcagcttcgacaagagactcgagcagctcctgttcctgcactcataaacaaatattatgagtgcagtaatcagctggaaagatgaaaaggcagtacctgaagtgccagatttagcaatcgttccaaggttcttaataagatcttcctttgtcataccaatacccctatcccgaatggagaggattttcttctctttgtccaacttaatctgcataagcatagaccagatgccttgaggtctgattctaaagcgttgcccaacagaaaaaaaacagctctcaacattgaaatctacctgaatctcaagctttgcagtgtccccttcacccagaacttccttatcagtaagggaaaggaacctaatctta

SEQ ID NO: 76323 - DNA, 2452 bp, Zea Mays
cggagtcacatgctctgggctggcttctgctgctagctgcctcgctagccgcctagcccaaccgcaatgcgcgccatcgcctccccacttgcgcctcctcgcccagagccacccattgccgtccgatcaagatccaacgccctcaaacgcgccactttaccaccagtccccctcaccgccgcccgtctccgcctccgccgacaaccggagccagggccctcgccacccacccgattgagccaccccatgcctcctcccactgcgacgatgtcccccgcagctggcggttcctttcctgagctcacctgtcccgcggactttgccaccgtcgccgcccccggcggccgcttctccgtcgtcggcttcggatccctcctttccgagcggagcgcgaggagcacgttcccggagctggagggcttccgtgtcgcggtgctgcgggggttccgccgagtcttcgcccacgctgcccccatcttcttcgagcgcggcatcgccatcgaggccaccaaggaattctcaagcttgagcgtagagccatgcgacagtgaactgatagtagtcacggttttcgaaatcaaggaggaagaggtcccggcgtttattgagagggaacatgagtttagatttcttgcggttgtccctgaaggattggatggggtaccttttacaaatcgagcagttgtctgtgcacgctacagcaatgaagaatatttccaagagagatgccgaggaagcaaggaaatatataacaagtactatggacggtacaatattgacaaaatatggagagatgatatcttaccatgtcgcttatacctcagacattggtgagttttgatgttcaaagatatataacgttaaacaatatgtggggttgcttctttcatctattggataaatttgtaattaacattaagagagggtctaacttgtgatcaaattggaataagcctactataactacccttgcacatccttagtgcatactaatatgtactcacgtgtaaagttggaatccaaattcgtatattaaaatgacaaattttatgtttatgtgcactaaaatacaaaattcctagtgtttcatcgtttaattcatatgagcctcatattttccattttggtatgtttttttttctaatttgagtttgcatattctttttgaactactcaggagagctgcgtgtcatttcattaacgcctcgtttggatcattggaattgaattccattctaataatagtaatttaggcatatatcaattaagctaattcggtttatgcaaaatatatttgtatattattattagcaagatgtcggagatatttatgtgctacatttttactataggggagtgagacgaagagtgtcatgtaagttatagattagaaatcaattctagtaatgcataaaatcattttccaccctccaccccatgaatttgagataggcttatatctgaactttggaaagtggtggaatgtcaaattccaaactaaataagttactttattgagtgaattccaattcctctaaaatgaagggatccaaacgccccgtaagagaaaaaacacaaaggtacaagaagagggcaaacgccctctcaagcaaacccactcacacacacacaacaacacacctactgcccactatctgccatctaaagaccaggagcacctctcagcaagagctcccgaaggcagaggccactgttcttaaggcgtcgcctatgcgtccaggcggaggtccaactcctaggcgccttgcccgcctacctcgcctaggcgtccaggcggtggtccaacaccttgtctcgccttaccgctttaaaaaccatgccagaggcaccagccatacaccacatctgtctctctgtagccactgaggcgaggatagattgcatttgaggcctaaaaccatcaaacacaagcatttctatgcttccaaatctctcaagtgactaggatgactagagagttgaaacccttccgaagatccttaggcaggcgattgacagcttcagatcatcaagaacgaaaacggcttgtagaattaggtggtaagatcgacatttaagttcagcccctgcagaattcgagtccacgcttcctgcaccagcacacaggaggagagaatgtggttgatcgtttcctcatcctggtcagaaaaaggacaggtcggctgatggggcagcccttgcttggctaggcgatcagaagtccaacatcggttattaattgccaaccatataaagaattcacaattggccggggcccagctcttccaaatcttcttccagtgagaaaacttgatggtcccaatgaacattgagttataggttgatttgcagctgtacataccggaggccgagaatttccaaagatgctgatccgagtcgtcaggctgcagcaccacatcactaaatcccagataagcaagtattccacaag

SEQ ID NO: 76324 - DNA, 2122 bp, Zea Mays
ctcgtaggtccgatcgccggagtcacatgctctgggctggcttctgctgctagctgcctcgctagccgcctagcccaaccgcaatgcgcgccatcgcctccccacttgcgcctcctcgcccagagccacccattgccgtccgatcaagatccaacgccctcaaacgcgccactttaccaccagtccccctcaccgccgcccgtctccgcctccgccgacaaccggagccagggccctcgccacccacccgattgagccaccccatgcctcctcccactgcgacgatgtcccccgcagctggcggttcctttcctgagctcacctgtcccgcggactttgccaccgtcgccgcccccggcggccgcttctccgtcgtcggcttcggatccctcctttccgagcggagcgcgaggagcacgttcccggagctggagggcttccgtgtcgcggtgctgcgggggttccgccgagtcttcgcccacgctgcccccatcttcttcgagcgcggcatcgccatcgaggccaccaaggaattctcaagcttgagcgtagagccatgcgacagtgaactgatagtagtcacggttttcgaaatcaaggaggaagaggtcccggcgtttattgagagggaacatgagtttagatttcttgcggttgtccctgaaggattggatggggtaccttttacaaatcgagcagttgtctgtgcacgctacagcaatgaagaatatttccaagagagatgccgaggaagcaaggaaatatataacaagtactatggacggtacaatattgacaaaatatggagagatgatatcttaccatgtcgcttatacctcagacattggagagctgcgtgtcatttcattaacgcctcgtttggatcattggaattgaattccattctaataatagtaatttaggcatatatcaattaagctaattcggtttatgcaaaatatatttgtatattattattagcaagatgtcggagatatttatgtgctacatttttactataggggagtgagacgaagagtgtcatgtaagttatagattagaaatcaattctagtaatgcataaaatcattttccaccctccaccccatgaatttgagataggcttatatctgaactttggaaagtggtggaatgtcaaattccaaactaaataagttactttattgagtgaattccaattcctctaaaatgaagggatccaaacgccccgtaagagaaaaaacacaaaggtacaagaagagggcaaacgccctctcaagcaaacccactcacacacacacaacaacacacctactgcccactatctgccatctaaagaccaggagcacctctcagcaagagctcccgaaggcagaggccactgttcttaaggcgtcgcctatgcgtccaggcggaggtccaactcctaggcgccttgcccgcctacctcgcctaggcgtccaggcggtggtccaacaccttgtctcgccttaccgctttaaaaaccatgccagaggcaccagccatacaccacatctgtctctctgtagccactgaggcgaggatagattgcatttgaggcctaaaaccatcaaacacaagcatttctatgcttccaaatctctcaagtgactaggatgactagagagttgaaacccttccgaagatccttaggcaggcgattgacagcttcagatcatcaagaacgaaaacggcttgtagaattaggtggtaagatcgacatttaagttcagcccctgcagaattcgagtccacgcttcctgcaccagcacacaggaggagagaatgtggttgatcgtttcctcatcctggtcagaaaaaggacaggtcggctgatggggcagcccttgcttggctaggcgatcagaagtccaacatcggttattaattgccaaccatataaagaattcacaattggccggggcccagctcttccaaatcttcttccagtgagaaaacttgatggtcccaatgaacattgagttataggttgatttgcagctgtacataccggaggccgagaatttccaaagatgctgatccgagtcgtcaggctgcagcaccacatcactaaatcccagataagcaagtattccacaag

SEQ ID NO: 76325 - DNA, 2496 bp, Zea Mays
gtgttacaggctcgtaggtccgatcgccggagtcacatgctctgggctggcttctgctgctagctgcctcgctagccgcctagcccaaccgcaatgcgcgccatcgcctccccacttgcgcctcctcgcccagagccacccattgccgtccgatcaagatccaacgccctcaaacgcgccactttaccaccagtccccctcaccgccgcccgtctccgcctccgccgacaaccggagccagggccctcgccacccacccgattgagccaccccatgcctcctcccactgcgacgatgtcccccgcagctggcggttcctttcctgagctcacctgtcccgcggactttgccaccgtcgccgcccccggcggccgcttctccgtcgtcggcttcggatccctcctttccgagcggagcgcgaggagcacgttcccggagctggagggcttccgtgtcgcggtgctgcgggggttccgccgagtcttcgcccacgctgcccccatcttcttcgagcgcggcatcgccatcgaggccaccaagtattgagtgacttgtaggaattctcaagcttgagcgtagagccatgcgacagtgaactgatagtagtcacggttttcgaaatcaaggaggaagaggtcccggcgtttattgagagggaacatgagtttagatttcttgcggttgtccctgaaggattggatggggtaccttttacaaatcgagcagttgtctgtgcacgctacagcaatgaagaatatttccaagagagatgccgaggaagcaaggaaatatataacaagtactatggacggtacaatattgacaaaatatggagagatgatatcttaccatgtcgcttatacctcagacattggtgagttttgatgttcaaagatatataacgttaaacaatatgtggggttgcttctttcatctattggataaatttgtaattaacattaagagagggtctaacttgtgatcaaattggaataagcctactataactacccttgcacatccttagtgcatactaatatgtactcacgtgtaaagttggaatccaaattcgtatattaaaatgacaaattttatgtttatgtgcactaaaatacaaaattcctagtgtttcatcgtttaattcatatgagcctcatattttccattttggtatgtttttttttctaatttgagtttgcatattctttttgaactactcaggagagctgcgtgtcatttcattaacgcctcgtttggatcattggaattgaattccattctaataatagtaatttaggcatatatcaattaagctaattcggtttatgcaaaatatatttgtatattattattagcaagatgtcggagatatttatgtgctacatttttactataggggagtgagacgaagagtgtcatgtaagttatagattagaaatcaattctagtaatgcataaaatcattttccaccctccaccccatgaatttgagataggcttatatctgaactttggaaagtggtggaatgtcaaattccaaactaaataagttactttattgagtgaattccaattcctctaaaatgaagggatccaaacgccccgtaagagaaaaaacacaaaggtacaagaagagggcaaacgccctctcaagcaaacccactcacacacacacaacaacacacctactgcccactatctgccatctaaagaccaggagcacctctcagcaagagctcccgaaggcagaggccactgttcttaaggcgtcgcctatgcgtccaggcggaggtccaactcctaggcgccttgcccgcctacctcgcctaggcgtccaggcggtggtccaacaccttgtctcgccttaccgctttaaaaaccatgccagaggcaccagccatacaccacatctgtctctctgtagccactgaggcgaggatagattgcatttgaggcctaaaaccatcaaacacaagcatttctatgcttccaaatctctcaagtgactaggatgactagagagttgaaacccttccgaagatccttaggcaggcgattgacagcttcagatcatcaagaacgaaaacggcttgtagaattaggtggtaagatcgacatttaagttcagcccctgcagaattcgagtccacgcttcctgcaccagcacacaggaggagagaatgtggttgatcgtttcctcatcctggtcagaaaaaggacaggtcggctgatggggcagcccttgcttggctaggcgatcagaagtccaacatcggttattaattgccaaccatataaagaattcacaattggccggggcccagctcttccaaatcttcttccagtgagaaaacttgatggtcccaatgaacattgagttataggttgatttgcagctgtacataccggaggccgagaatttccaaagatgctgatccgagtcgtcaggctgcagcaccacatcactaaatcccagataagcaagtattccacaag

SEQ ID NO: 76326 - DNA, 972 bp, Zea Mays
cgggtgttacaggctcgtaggtccgatcgccggagtcacatgctctgggctggcttctgctgctagctgcctcgctagccgcctagcccaaccgcaatgcgcgccatcgcctccccacttgcgcctcctcgcccagagccacccattgccgtccgatcaagatccaacgccctcaaacgcgccactttaccaccagtccccctcaccgccgcccgtctccgcctccgccgacaaccggagccagggccctcgccacccacccgattgagccaccccatgcctcctcccactgcgacgatgtcccccgcagctggcggttcctttcctgagctcacctgtcccgcggactttgccaccgtcgccgcccccggcggccgcttctccgtcgtcggcttcggatccctcctttccgagcggagcgcgaggagcacgttcccggagctggagggcttccgtgtcgcggtgctgcgggggttccgccgagtcttcgcccacgctgcccccatcttcttcgagcgcggcatcgccatcgaggccaccaaggaattctcaagcttgagcgtagagccatgcgacagtgaactgatagtagtcacggttttcgaaatcaaggaggaagaggtcccggcgtttattgagagggaacatgagtttagatttcttgcggttgtccctgaaggattggatggggtaccttttacaaatcgagcagttgtctgtgcacgctacagcaatgaagaatatttccaagagagatgccgaggaagcaaggaaatatataacaagtactatggacggtacaatattgacaaaatatggagagatgatatcttaccatgtcgcttatacctcagacattggttgatttgcagctgtacataccggaggccgagaatttccaaagatgctgatccgagtcgtcaggctgcagcaccacatcactaaatcccagataagcaagtattccacaag

SEQ ID NO: 76327 - DNA, 987 bp, Zea Mays
agcaaataacgctggtccgcaagtggccgggtgttacaggctcgtaggtccgatcgccggagtcacatgctctgggctggcttctgctgctagctgcctcgctagccgcctagcccaaccgcaatgcgcgccatcgcctccccacttgcgcctcctcgcccagagccacccattgccgtccgatcaagatccaacgccctcaaacgcgccactttaccaccagtccccctcaccgccgcccgtctccgcctccgccgacaaccggagccagggccctcgccacccacccgattgagccaccccatgcctcctcccactgcgacgatgtcccccgcagctggcggttcctttcctgagctcacctgtcccgcggactttgccaccgtcgccgcccccggcggccgcttctccgtcgtcggcttcggatccctcctttccgagcggagcgcgaggagcacgttcccggagctggagggcttccgtgtcgcggtgctgcgggggttccgccgagtcttcgcccacgctgcccccatcttcttcgagcgcggcatcgccatcgaggccaccaaggaattctcaagcttgagcgtagagccatgcgacagtgaactgatagtagtcacggttttcgaaatcaaggaggaagaggtcccggcgtttattgagagggaacatgagtttagatttcttgcggttgtccctgaaggattggatggggtaccttttacaaatcgagcagttgtctgtgcacgctacagcaatgaagaatatttccaagagagatgccgaggaagcaaggaaatatataacaagtactatggacggtacaatattgacaaaatatggagagatgatatcttaccatgtcgcttatacctcagacattgctgtacataccggaggccgagaatttccaaagatgctgatccgagtcgtcaggctgcagcaccacatcactaaatcccagataagcaagtattccacaag

SEQ ID NO: 76328 - DNA, 375 bp, Zea Mays
ggctggcttctgctgctagctgcctcgctagccgcctagcccaaccgcaatgcgcgccatcgcctccccacttgcgcctcctcgcccagagccacccattgccgtccgatcaagatccaacgccctcaaacgcgccactttaccaccagtccccctcaccgccgcccgtctccgcctccgccgacaaccggagccagggccctcgccacccacccgattgagccaccccatgcctcctcccactgcgacgatgtcccccgcagctggcggttcctttcctgagctcacctgtcccgcggactttgccaccgtcgccgcccccggcggccgcttctccgtcgtcggcttcggatccctcctttccgcatcctggtt

SEQ ID NO: 76329 - DNA, 1939 bp, Zea Mays
gggagcgggagcagttgcagctgcaacggtcactttgctggctgctgggccggtcggttcctttgcccaccagctcagctcactcaattcaacactcttcgagcttgcttgcccatctccccaaacatccgccgcgcttcaatacttacaacgactcaacgagatcgcagcttccatggccttcttttccgaatcccagactcctttcacaaaacagaaacaaaaataaaataaatcccagactcccagagacagacagacacaagagttggtggcgtggttccttgtttctacctccctgggctccgtttctttccctgcgaagctggctggctcggcacggcactgcacagagcataccggcggtaactgagaggccctgcggcgatggggaagaagcgagcggcggccgtgagtgctccgttccccgcgcccgcctccgagcccgagtcggaccacttcagcgactacggcttcgacccgcagctcctccacttcccctcccagcctgaggcgaagcgaccgtggggcaggcgccagcgccaccagcagcctgcgcagttgaagcccctggactccgcgcggttcaagctacagaagcccatcgccaagaagcaccaccgccagcagaaacagcagcagcgccgccggtggtggagctccgccgcctctgccgcgctccatctcttcaggaagcgcccctcatcaaccagacccgccgcaggagctccacctccccagtacgggtcgcccgcgtcgccaaccgtgcctatgtacctcaccgactgcgatgctggcggggacgacggcggcggcgcgtccgcgtgcacgtgctgggcaccggccgtgcggtccggccgcctggccgccgccgagcttggcgccgcggcagtggcggttccctacgtcagcctcaggtccactagccttggcactggaggcgctccggtgatgcccatctacctcgtcacctgaagctagctacctcaggccgacgcgggtttcttcttcagaagcttggaccacaagacgtcagtaaattaaaccctgtccaagcgcctggactagtcggtcaaatatcaactgcttgcttctataattgttcctggttttcttctcccgtctgtggggtattttccagatgtagttgcagcagctgcgtttttctttcaaattcgttgctccaagaaggttgccggctcctatatggaagttctgacttcttcagttttgcgttgaactttagattaagagacgatagattctagtattagagcaacttcaaaacaatgctaagaagtttccaacaaaaaaaattattgagggcagactaaaaattttaagagtaagatcatgtttgtaagcaacccagtttttaagaaattagtttttatcttttagctagaagatgtcagcttcttagtttttaagaaactgataatccaatttttataaactaaggtatgatatgtttagaaccacatcaatttctataaactagcatctagatgcttccaaatatgtcctaaattattatgtatatactccaacaaccctcttaaataaaaactgaaaaacagaaaactagactcaaaatttttaaaaaacacacccttcaaacagcccactttgcacatgtgtatgggctttggaaaaagggcctttatatgggcagcccactttgcacctacgtaatctgtgttctcttaaaatactgcggcactcttttaatagtccacacatactaaatgtgatcgggaggcaacaagtccaggatttccttaaaatactgcccacacagtccaggatttccttaaaatgcaccctttgcaaatatctagagagaacaagtaattgagcctttcagttcattgttgctcagactatgtattttcagactttgattctagagatgtgcagataatagttttagattgtg

SEQ ID NO: 76330 - DNA, 1800 bp, Zea Mays
aaaccttgcgtgcgccaccgccaatggcagcaggaatcctctgatcctctttcccgcacatccaaagaggcgccgccgtcctctgaaaaatcctagccgctttctacatggccgagcccgccaaccggcggatggaggccgtccgccgtcacctccttctgccttcacccgcgccgcttcgccctaatccgttaagcagcctcgcggaggtggagcccagcccggtgatcattggcgggatggtgctggatatccatgccaagccttccgtgccgccccatcatggtaccactgtccctggaatggttaaatacatcagtggaggcgtagcaagaaatattgctgagtgcatgtcaaagcttgggacacaacccttcatgataagtgttgttggaaatgatttggcagttctactctgctgaaggggacttccttttgaagtactggaggtcagctggattatgttcagaaggaattctgcaggttgataatgttgcaaccccagtagtatcaaatgtgtttgacggtactggagaattaatcgctggagttgcaagtgttcaagcagttgaaaattttattacttcgagctggatttatcacttccgtcatcatattgctaatgcaccacttgtaatgcttgatgcgaatttatctcctgagtcacttaaagcagcttgcataatggcatatgaatttggggtgcctgtgttatttgagccagtctcagtggtgaagtgtcgaagaattgcaccagttgcagaatatataacttgcacttcccccaatgaaattgagcttgttgccatggcaaattcattatctccatcagtgaaatataattttcacacaatagagcagttcaaggagaaagcagatactgttgaatatatttttcaaatgcttagcccagcaatgttcttcctacttgagaagggcatcaagttgcttatcgtgacacttggctcaaatggtgtttttatttgttgcaaagagcacactaacttcatgaaagaccagcacaagtgcaaacagacgcctttctccagacagctacttgaaaaaatggacgggtgttttccatcgaacaatcttgttaatttgtgcagagaaagctcttcaagaacatgtgtttttcatttacctgcaatatcggcctctgtgataagcctcacaggtgctggcgattgtttggttggtggtgccctttcagctctatgtgcaggcttcgatatcatccagagcgttgcagttggggttgctatagcaaaggcatctgtggaatctgaagccaacatacctgatgacatttctgctgcgagtattgcagatgatgcacaaagtgtattgcattctgctaaggtgctttggtgcaaatgaagaatagaaaaactaccatcccggtgtaaattgaagacagtcaggtgctattgaagctattgaactctgttactgttccaacggcacaagacggataagaatgaaatcgctatatatgatggatttttggttggaagaacagagggatcaccaatcagaattctttctactatagcatatatttttcatgtacattgtgggtgcaagttcgatcaagggagcaaattctgttgtatttttttagttagtgagattatgtgatgaaaaattggttagcgtcaaatttgcaattgcaaagtgactaatataatgacataatataatacactgataagatataattggttgcaagttcaaattcatcattgtgatgtagttatgatacaatttagggtgtgtttcgttgaactgtgatttttt

SEQ ID NO: 76331 - DNA, 1773 bp, Zea Mays
aaaccttgcgtgcgccaccgccaatggcagcaggaatcctctgatcctctttcccgcacatccaaagaggcgccgccgtcctctgaaaaatcctagccgctttctacatggccgagcccgccaaccggcggatggaggccgtccgccgtcacctccttctgccttcacccgcgccgcttcgccctaatccgttaagcagcctcgcggaggtggagcccagcccggtgatcattggcgggatggtgctggatatccatgccaagccttccgtgccgccccatcatggtaccactgtccctggaatggttaaatacatcagtggaggcgtagcaagaaatattgctgagtgcatgtcaaagcttgggacacaacccttcatgataagtgttgttggaaatgatttggcaggggacttccttttgaagtactggaggtcagctggattatgttcagaaggttgataatgttgcaaccccagtagtatcaaatgtgtttgacggtactggagaattaatcgctggagttgcaagtgttcaagcagttgaaaattttattacttcgagctggatttatcacttccgtcatcatattgctaatgcaccacttgtaatgcttgatgcgaatttatctcctgagtcacttaaagcagcttgcataatggcatatgaatttggggtgcctgtgttatttgagccagtctcagtggtgaagtgtcgaagaattgcaccagttgcagaatatataacttgcacttcccccaatgaaattgagcttgttgccatggcaaattcattatctccatcagtgaaatataattttcacacaatagagcagttcaaggagaaagcagatactgttgaatatatttttcaaatgcttagcccagcaatgttcttcctacttgagaagggcatcaagttgcttatcgtgacacttggctcaaatggtgtttttatttgttgcaaagagcacactaacttcatgaaagaccagcacaagtgcaaacagacgcctttctccagacagctacttgaaaaaatggacgggtgttttccatcgaacaatcttgttaatttgtgcagagaaagctcttcaagaacatgtgtttttcatttacctgcaatatcggcctctgtgataagcctcacaggtgctggcgattgtttggttggtggtgccctttcagctctatgtgcaggcttcgatatcatccagagcgttgcagttggggttgctatagcaaaggcatctgtggaatctgaagccaacatacctgatgacatttctgctgcgagtattgcagatgatgcacaaagtgtattgcattctgctaaggtgctttggtgcaaatgaagaatagaaaaactaccatcccggtgtaaattgaagacagtcaggtgctattgaagctattgaactctgttactgttccaacggcacaagacggataagaatgaaatcgctatatatgatggatttttggttggaagaacagagggatcaccaatcagaattctttctactatagcatatatttttcatgtacattgtgggtgcaagttcgatcaagggagcaaattctgttgtatttttttagttagtgagattatgtgatgaaaaattggttagcgtcaaatttgcaattgcaaagtgactaatataatgacataatataatacactgataagatataattggttgcaagttcaaattcatcattgtgatgtagttatgatacaatttagggtgtgtttcgttgaactgtgatttttt

SEQ ID NO: 76332 - DNA, 1789 bp, Zea Mays
aaaccttgcgtgcgccaccgccaatggcagcaggaatcctctgatcctctttcccgcacatccaaagaggcgccgccgtcctctgaaaaatcctagccgctttctacatggccgagcccgccaaccggcggatggaggccgtccgccgtcacctccttctgccttcacccgcgccgcttcgccctaatccgttaagcagcctcgcggaggtggagcccagcccggtgatcattggcgggatggtgctggatatccatgccaagccttccgtgccgccccatcatggtaccactgtccctggaatggttaaatacatcagtggaggcgtagcaagaaatattgctgagtgcatgtcaaagcttgggacacaacccttcatgataagtgttgttggaaatgatttggcagttctactctgctgaaggggacttccttttgaagtactggaggtcagctggattatgttcagaaggttgataatgttgcaaccccagtagtatcaaatgtgtttgacggtactggagaattaatcgctggagttgcaagtgttcaagcagttgaaaattttattacttcgagctggatttatcacttccgtcatcatattgctaatgcaccacttgtaatgcttgatgcgaatttatctcctgagtcacttaaagcagcttgcataatggcatatgaatttggggtgcctgtgttatttgagccagtctcagtggtgaagtgtcgaagaattgcaccagttgcagaatatataacttgcacttcccccaatgaaattgagcttgttgccatggcaaattcattatctccatcagtgaaatataattttcacacaatagagcagttcaaggagaaagcagatactgttgaatatatttttcaaatgcttagcccagcaatgttcttcctacttgagaagggcatcaagttgcttatcgtgacacttggctcaaatggtgtttttatttgttgcaaagagcacactaacttcatgaaagaccagcacaagtgcaaacagacgcctttctccagacagctacttgaaaaaatggacgggtgttttccatcgaacaatcttgttaatttgtgcagagaaagctcttcaagaacatgtgtttttcatttacctgcaatatcggcctctgtgataagcctcacaggtgctggcgattgtttggttggtggtgccctttcagctctatgtgcaggcttcgatatcatccagagcgttgcagttggggttgctatagcaaaggcatctgtggaatctgaagccaacatacctgatgacatttctgctgcgagtattgcagatgatgcacaaagtgtattgcattctgctaaggtgctttggtgcaaatgaagaatagaaaaactaccatcccggtgtaaattgaagacagtcaggtgctattgaagctattgaactctgttactgttccaacggcacaagacggataagaatgaaatcgctatatatgatggatttttggttggaagaacagagggatcaccaatcagaattctttctactatagcatatatttttcatgtacattgtgggtgcaagttcgatcaagggagcaaattctgttgtatttttttagttagtgagattatgtgatgaaaaattggttagcgtcaaatttgcaattgcaaagtgactaatataatgacataatataatacactgataagatataattggttgcaagttcaaattcatcattgtgatgtagttatgatacaatttagggtgtgtttcgttgaactgtgatttttt

SEQ ID NO: 76333 - DNA, 1756 bp, Zea Mays
aaaccttgcgtgcgccaccgccaatggcagcaggaatcctctgatcctctttcccgcacatccaaagaggcgccgccgtcctctgaaaaatcctagccgctttctacatggccgagcccgccaaccggcggatggaggccgtccgccgtcacctccttctgccttcacccgcgccgcttcgccctaatccgttaagcagcctcgcggaggtggagcccagcccggtgatcattggcgggatggtgctggatatccatgccaagccttccgtgccgccccatcatggtaccactgtccctggaatggttaaatacatcagtggaggcgtagcaagaaatattgctgagtgcatgtcaaagcttgggacacaacccttcatgataagtgttgttggaaatgatttggcagtactggaggtcagctggattatgttcagaaggttgataatgttgcaaccccagtagtatcaaatgtgtttgacggtactggagaattaatcgctggagttgcaagtgttcaagcagttgaaaattttattacttcgagctggatttatcacttccgtcatcatattgctaatgcaccacttgtaatgcttgatgcgaatttatctcctgagtcacttaaagcagcttgcataatggcatatgaatttggggtgcctgtgttatttgagccagtctcagtggtgaagtgtcgaagaattgcaccagttgcagaatatataacttgcacttcccccaatgaaattgagcttgttgccatggcaaattcattatctccatcagtgaaatataattttcacacaatagagcagttcaaggagaaagcagatactgttgaatatatttttcaaatgcttagcccagcaatgttcttcctacttgagaagggcatcaagttgcttatcgtgacacttggctcaaatggtgtttttatttgttgcaaagagcacactaacttcatgaaagaccagcacaagtgcaaacagacgcctttctccagacagctacttgaaaaaatggacgggtgttttccatcgaacaatcttgttaatttgtgcagagaaagctcttcaagaacatgtgtttttcatttacctgcaatatcggcctctgtgataagcctcacaggtgctggcgattgtttggttggtggtgccctttcagctctatgtgcaggcttcgatatcatccagagcgttgcagttggggttgctatagcaaaggcatctgtggaatctgaagccaacatacctgatgacatttctgctgcgagtattgcagatgatgcacaaagtgtattgcattctgctaaggtgctttggtgcaaatgaagaatagaaaaactaccatcccggtgtaaattgaagacagtcaggtgctattgaagctattgaactctgttactgttccaacggcacaagacggataagaatgaaatcgctatatatgatggatttttggttggaagaacagagggatcaccaatcagaattctttctactatagcatatatttttcatgtacattgtgggtgcaagttcgatcaagggagcaaattctgttgtatttttttagttagtgagattatgtgatgaaaaattggttagcgtcaaatttgcaattgcaaagtgactaatataatgacataatataatacactgataagatataattggttgcaagttcaaattcatcattgtgatgtagttatgatacaatttagggtgtgtttcgttgaactgtgatttttt

SEQ ID NO: 76334 - DNA, 1571 bp, Zea Mays
aaaccttgcgtgcgccaccgccaatggcagcaggaatcctctgatcctctttcccgcacatccaaagaggcgccgccgtcctctgaaaaatcctagccgctttctacatggccgagcccgccaaccggcggatggaggccgtccgccgtcacctccttctgccttcacccgcgccgcttcgccctaatccgttaagcagcctcgcggaggtggagcccagcccggtgatcattggcgggatggtgctggatatccatgccaagccttccgtgccgccccatcatggtaccactgtccctggaatggttaaatacatcagtggaggcgtagcaagaaatattgctgagtgcatgtcaaagcttgggacacaacccttcatgataagtgttgttggaaatgatttggcaggggacttccttttgaagtactggaggtcagctggattatgttcagaagtggcatatgaatttggggtgcctgtgttatttgagccagtctcagtggtgaagtgtcgaagaattgcaccagttgcagaatatataacttgcacttcccccaatgaaattgagcttgttgccatggcaaattcattatctccatcagtgaaatataattttcacacaatagagcagttcaaggagaaagcagatactgttgaatatatttttcaaatgcttagcccagcaatgttcttcctacttgagaagggcatcaagttgcttatcgtgacacttggctcaaatggtgtttttatttgttgcaaagagcacactaacttcatgaaagaccagcacaagtgcaaacagacgcctttctccagacagctacttgaaaaaatggacgggtgttttccatcgaacaatcttgttaatttgtgcagagaaagctcttcaagaacatgtgtttttcatttacctgcaatatcggcctctgtgataagcctcacaggtgctggcgattgtttggttggtggtgccctttcagctctatgtgcaggcttcgatatcatccagagcgttgcagttggggttgctatagcaaaggcatctgtggaatctgaagccaacatacctgatgacatttctgctgcgagtattgcagatgatgcacaaagtgtattgcattctgctaaggtgctttggtgcaaatgaagaatagaaaaactaccatcccggtgtaaattgaagacagtcaggtgctattgaagctattgaactctgttactgttccaacggcacaagacggataagaatgaaatcgctatatatgatggatttttggttggaagaacagagggatcaccaatcagaattctttctactatagcatatatttttcatgtacattgtgggtgcaagttcgatcaagggagcaaattctgttgtatttttttagttagtgagattatgtgatgaaaaattggttagcgtcaaatttgcaattgcaaagtgactaatataatgacataatataatacactgataagatataattggttgcaagttcaaattcatcattgtgatgtagttatgatacaatttagggtgtgtttcgttgaactgtgatttttt

SEQ ID NO: 76335 - DNA, 5690 bp, Zea Mays
catgtcaagaaactggaggtcgaagtcgaacagcagctgttgcgttgtctctctacagtactgaaacagctagagcatatatactgagacgcaatacctctgacagactgtcttccacatccatgctggtcctgagaagctccagcgccgtcttcagccggggcttgtcctggtagatgagcgtgttcttcctgatctgtccacgcacgcaatatttcaattcaactatggctgttccgcaaaatcaaacagcaataattcagaaaaaaaaaccatgtgcatcattgaccttctcgcgcttgacggggtccttgaatgcggagtcgatgacgtccttggtggggacgatcttccacttggggatgatctcctccacctgagttagcagggtgaccaccaccgggtgcggcttcactttctccgatatctgtaacgtcattcaagcaggctccagaaaccatgacagtttaatcaggttcagtatggaatagcaccttgcacattggcgccacaagaactgcaccgtcccagaaggtcggatccttcctgtgcagcagtagagccacggctccgcccatggactcgccgtatagaaaccggctcttgttcctgtatccctccatgtctgcagaagagttcaaactactataaactttttcaggtcctggtaacacttttacccagtaatttccaaggaaaagatgtttacgtaccacagatggacttgaagaacatgtcgcagtcggccacgaggctctcaaacttgtggatgtagcacctggcacccatggacttgccgtggccctcataatcgataccaaacacgccataccctgctgtggccagcttcatcccacatgctgccagtaaaacgtgttccccaccgttagacggggggcatcatgccaccacccagcagttttcatttttaaggctagcgattcatgagcatcaatgatccatggtgaagccttcagtgcgaaccacagactatgtttcagggacaccaccagctactgccagcctgatggtccatgcatgagcatgtatcaagaaaagcaacttgatttcttacgaaaccgattcagacaagaaacccccggccgcttagcttttggtcactgaacgtacgcaacaaacaactgtcgtttctggaatcatcagaagcgacggtgtgcagagactttcagcaatgtgtggatagtgatagatggattttaattagggtttggaatttgtgaagttgacgtaagaaagaaaggaaggaaggaccacacgccaacaatttgaaacgagatgcctgtttcttcaagtgatcaggagaggctgttggatggtagctcactggtcagatctgtccttgccctttctttcttttgagcacgaatgtgacttgcattaaaaactgccccagattatagtagggcccaatgtgatccgaaatttgattcatccttattatgtaaaaaaataattaagatacaatagtaattattctgaataagtaacttggctaatggttcatgaaatgttttattgctgctcaacgttcaaaatccgtagatataacttcattattattggtacttaattgtttatagatgaattatagtttaaaacacacgggtgactcgaaacctaacgggttcgagtgtgggtttggaattgcacccgcgggtgtgatcgtggacgaatttaggtacatttcgcgcgtgcactcgcgggcaggtttttgctccacccgacccattgccattgctactaaactgaattgtactagcactgtaaaaaccatgactagcaatacagaaattgtttccacatataaattctttgtttgtacaataaggtcttgtcctgttattcctgttccatgtggattagagataattgagagagagtaggaggaattttgacttgctagggatttaaactcacttaatcccttctaatccatatagattgagattaaaacaaacagatcctaaactaatttgtgcactgtaaattgtagtagcatatagactaaacaaacttgcagtatcaccgtaaaccctttccgcttatactaaactaagagaactaagagtgtgtttgagactgctccactccaccaagacaccaactccagttctgcttcaccaactttaccatagagttgctctactctagagttcaccaatattttatattttgatgtgtttagcttgtaaccctgcttcagctccaacctgtcagtggcgcaataaactagggaatgtatcgatgggtcgatcccgaccttgtggatgagtccgtctttgacgatgggataacttagcttcttgtacagctcgtacaatggctccacctcgttcatagtgactgccatgcaacacaacaaccgctgaccccgggtgctgttgcgccggagggttccatacgagaagagaaagaaggagatgcgttggggaaggaaagaaaagaaggaaaaacaagctctatttctatgcccagcggcaccagcgtggtcctatgcctaccggcgccggcgttagggcctgcggatccatgaagatgcagataacagagaaagggaaatgtgagcgctagatggggtatgggagaaaaaaagaagcaatttattgtgtaatcggtggcagcggtggataattattccctaacttcacgagttaatttattgcaaaatagcgtttgtgaaacaccctattcgttgctttataaaaaagggtgaagttaaccccaacttcactatttttttgtgaagctgagccggtgaagttggaagtgtttggctagagttttgttgatctaagctagaattcgtgaagtgaagcagtcccaaacaccccctaaatttgtagtagcactgtaaattctctgcttgtacaataatgactacataacataacaatttgatgccaaagtagggccatagtttccacatatttgtggcatctatctttatttgggctatacagacgtggaggtatgggtggtaatgggctctaaattttatactgtacaatgtaaggatcagatctgattgtaatcgagctctatttctattcatttttgaactaaaattatttaagagtccaaacaatctgggaaggaacatttgggtcatgacccattaccacccctaggtgtaggttcaaataaaatgaaacaattataactctaaatgagatattcaagttcttacttatttaaatttatgcgccaaatgatacaaagaacaccagggaattcgctgttgggtggctttgcattgccacttgcagcagacctctttatgaaaagtaccttccgttagtggtcaagcaaaagcaaccccccctggccgggctacaaggcagaagagtagtgtacgtaattaccacctacagtactaactttatttgcttcacgcgttcttctaaatgtaagacggagtaagaaaaaaccctgaacaagtttagcagcaatctgatgaggccatatctacaaagagagcagagatgaaaaagaaaaggaaccaattcgacaagctaagttgttaaggccgtgcttgatgttaaaatcgtgctcagcagcctataaccgtgcaaaacatttgcaccgcacactacactgcacaatacattgtttgcacacaatacattgtttgcagatagaacgcatatatatatatatatatatatatatatatatatatatatatatatatatatatatatatagtcttgctcgagataggctgagataatctttggagatagcctaaggttgttgtcttcaatatctattctatcttatcccttattataaacttcagtttgtaaatagtatcatctatagtgtaaatcctcctactttacacgatcgacaacctaagataatctcctgggtcgggctggcgatgggtgtccatgctttcagaattttcttttcatttatttcagttccctttcggcgctggtggtttcaatcatatatacacctttctcagattacaaaaaaaaaccaacctcttttgcctagagaagaagagcgcaaagtggttccatgcttttttggtgggcgttaacagctccgcaacatgtctcattattccattatttttttcgtcttttggagcctgcgcggtcaaatatgaggtttggttgtgtctaggggtggatatcgagccagctcggctcaactcgaccgagctcgagctggctcgttaagaaaacgagctggctcggctcgttaaggaaccgagccagagaaccagctcggctcggctcgtttgcgagctcgagctggctcgtttagctcgcgagccacaacaaaaaatagtatacatgtatatatacaacaatataatcaattgctagttaattttatactaatttaacactagaaaagactaacaatactcataattttatatatcacatcatttaaaccctaaacaaacatagttcgtcacttattaattcatccaatacaagtatatgctttgttttatagataaatgctagctcattcgagctaacgagctggctcgagctcgtgtcgagctggctcgttaacgaaccgagctgagatgttagctcagctcgtgataaaattgaaacgagccgagtcgagccgagccgagctgaccacgagtcgagcgagctcacgagccacgagtattttgtccagccctagttgtgtccggtgctagttgcattgcatgcctgcttaactttctactcagctgtctaaattatgagacgtcttgacacttatattgagtgttactactagctgttccatttgttacctagacgcatcgcgcaccaagagttagtggaaggaagagagagagagagagagagagagagagagagagagagagagagagagagagagagagagaaggacacgatcatggtcatatggggtatgaaaactggggcgtgtgtacgtgtgtgtacctctcatgaagtcgctgcactccatcccgtagcctggatccaagcaaagcgcacagggacaagaaaaaggtcaatgaatgcacatatccggtccattacttcaaataaaaacccattcttcgttaggaaatttcgaagctctcttttatgctttggtgatgctatatgctacgcatactatagttcgcagacttggcagaaggaactcaatcaacgcacagcagcaaggtgcttgtgcggatgtgtggtgacgacgtccaagtgaagtgaagggcagtctacgacgacgacgacgacgtaccatggcagaggaagacgagcgctttggtgggcgcggaggacggcgccggcagccagacgcaggtgaagagctgcacgcccctcgcgttcctcacgtactcctgcgcgcgcgcacgcacgcgcgccacccctcgtggtactccacgtccatcatcgtctaggagcttctggatcggaccagcagctaatccgcaactccgcctgctctcgaatcagatatatatgttgcctggaagcggtgggggagacgggcggggaagcgtacgtacagtacgtacgtgtggaggaggcgcaccaccacgtgccgtatggacgcggcccggctgtatagtgtagagacagacagagagggagacgaggcgcgacatgacatatatgggcggcgtccgtcaggataggatatgggatcctctgcgccgctgcccgctgctgttggtt

SEQ ID NO: 76336 - DNA, 1574 bp, Zea Mays
atgcagcgccatatccgtgcagtctactccatttttgttcccctctccggtggcggcctagcgggggtgtggtcttcctcgcgtcgcctcccctcgctctcatccggtcatcagtttgaggtttcaacctatttcaccagagctgattggactcatggatgggaacaaagatgaggcattgagatctgtcaagcttgcaaaatctgcatttgcatctggggataggcagcgcgcagaaaaattaattaaaattgctcaaagattggaccctggtcttccacttgatgatttgctgagcccagttgagaaggttggcatcctgaatatttctacttgcaaagacaagactgaaagaggacaagctcttttatacccaaaaacaacaaaagaatctgttggtcctttaaatgttgataaggcttacactgaggagaatattagagtggttcaggatatcaggaaaaagaaggattactatgcagttctcggagtagagagaagatgcactgtggaggaaattaggaaggcatacaggaggttatcactgaaggttcatcctgacaagaacaaggttcctggggcagaagatgctttcaagatggtaagcaaggctttcaagtgcctaagcaatgatcagtcgcggaggacttatgatcagacaggcaccactgaggaccatgaattcaatgagcaatatcccaatgtcatgaggcggggagctgctaggcggagaaggccagcaagaagtggcttctataactatgaagaagattttgatccagatgagatattcaggtccttttatggcacccatgataatatgttccatccccagtatacctacagggctaggggaacaggcaggcaacagcaacagagaagggagcattcagtggagggtggttccagcataaatctaacagtgtttattcaccttgtagtagtactgtttattgtttcgcttgcatttattccagcgcgtcaagctgagtattcgctgcaacagacaaattacttccccatttcaaaggtcactcaaaaacaaggagtggagtacttcgtcagcaaacaagattttgatcagcagtttccacagggtagtcagtctagagagaatcttgaacggcatgttctgatggactataagagtatgcttggaagatattgccatgtggaactccaacgtcgtcaatgggccaaggactaccctacacctcgctgtgacaagctaagggagctgtctgtggcgcagaatgtgcatatgccatcagtttgatctcccgttttcatcatggaagaatattgctcatatttgcagttgtgaaccagtaagccagagcataaaaggcttgtttacatgaagagatacatggctggtgaccaaccggttgaagttgcggttcacgttgatgcagatgcagcacgcccgacacctcacacctccgaactccgatgttgctgctgatgcccgcactgtactgtaaacaatctttcaaaggcaaatggaactgtgggatacatgtggcagtgtggcacttcgatgatgtgctctgttaaatatttttttaggaaac

SEQ ID NO: 76337 - DNA, 1477 bp, Zea Mays
atgcagcgccatatccgtgcagtctactccatttttgttcccctctccggtggcggcctagcgggggtgtggtcttcctcgcgtcgcctcccctcgctctcatccggtcatcagtttgaggtttcaacctatttcaccagagctgattggactcatggatgggaacaaagatgaggcattgagatctgtcaagcttgcaaaatctgcatttgcatctggggataggcagcgcgcagaaaaattaattaaaattgctcaaagattggaccctggtcttccacttgatgatttgctgagcccagttgagaaggttggcatcctgaatatttctacttgcaaagacaagactgaaagaggacaagctcttttatacccaaaaacaacaaaagaatctgttggtcctttaaatgttgataaggcttacactgaggagaatattagagtggttcaggatatcaggaaaaagaaggattactatgcagttctcggagtagagagaagatgcactgtggaggaaattaggaaggcatacaggaggttatcactgaaggttcatcctgacaagaacaaggttcctggggcagaagatgctttcaagatggtaagcaaggctttcaagtgcctaagcaatgatcagtcgcggaggacttatgatcagacaggcaccactgaggaccatgaattcaatgagcaatatcccaatgtcatgaggcggggagctgctaggcggagaaggccagcaagaagtggcttctataactatgaagaagattttgatccagatgagatattcaggtccttttatggcacccatgataatatgttccatccccagtatacctacagggctaggggaacaggcaggcaacagcaacagagaagggagcattcagtggagggtggttccagcataaatctaacagtgtttattcaccttgtagtagtactgtttattgtttcgcttgcatttattccagcgcgtcaagctgagtattcgctgcaacagacaaattacttccccatttcaaaggtcactcaaaaacaaggagtggagtacttcgtcagcaaacaagattttgatcagcagtttccacagggtagtcagtctagagagaatcttgaacggcatgttctgatggactataagagtatgcttggaagatattgccatgtggaactccaacgtcgtcaatgggccaaggactaccctacacctcgctgtgacaagctaagggagctgtctgtggcgcagaatgtgcatatgccatcagtttgatctcccgttttcatcatggaagaatattgctcatatttgcagatgcagcacgcccgacacctcacacctccgaactccgatgttgctgctgatgcccgcactgtactgtaaacaatctttcaaaggcaaatggaactgtgggatacatgtggcagtgtggcacttcgatgatgtgctctgttaaatatttttttaggaaac

SEQ ID NO: 76338 - DNA, 1395 bp, Zea Mays
ctccgatccaccggtctcaatcagccccagctttcaaatttggaagtttcctcttagaattcggtcaacgcgcccggttcccctttcgagttcgaggtgtcacgacacatcgaggtcatcagtttgaggtttcaacctatttcaccagagctgattggactcatggatgggaacaaagatgaggcattgagatctgtcaagcttgcaaaatctgcatttgcatctggggataggcagcgcgcagaaaaattaattaaaattgctcaaagattggaccctggtcttccacttgatgatttgctgagcccagttgagaaggttggcatcctgaatatttctacttgcaaagacaagactgaaagaggacaagctcttttatacccaaaaacaacaaaagaatctgttggtcctttaaatgttgataaggcttacactgaggagaatattagagtggttcaggatatcaggaaaaagaaggattactatgcagttctcggagtagagagaagatgcactgtggaggaaattaggaaggcatacaggaggttatcactgaaggttcatcctgacaagaacaaggttcctggggcagaagatgctttcaagatggtaagcaaggctttcaagtgcctaagcaatgatcagtcgcggaggacttatgatcagacaggcaccactgaggaccatgaattcaatgagcaatatcccaatgtcatgaggcggggagctgctaggcggagaaggccagcaagaagtggcttctataactatgaagaagattttgatccagatgagatattcaggtccttttatggcacccatgataatatgttccatccccagtatacctacagggctaggggaacaggcaggcaacagcaacagagaagggagcattcagtggagggtggttccagcataaatctaacagtgtttattcaccttgtagtagtactgtttattgtttcgcttgcatttattccagcgcgtcaagctgagtattcgctgcaacagacaaattacttccccatttcaaaggtcactcaaaaacaaggagtggagtacttcgtcagcaaacaagattttgatcagcagtttccacagggtagtcagtctagagagaatcttgaacggcatgttctgatggactataagagtatgcttggaagatattgccatgtggaactccaacgtcgtcaatgggccaaggactaccctacacctcgctgtgacaagctaagggagctgtctgtggcgcagaatgtgcatatgccatcagtttgatctcccgttttcatcatggaagaatattgctcatatttgcagcaccgtaacctgggactgtgacaaccttctgcactattgaccactgcaactaccgctgctaggagggcc

SEQ ID NO: 76339 - DNA, 1392 bp, Zea Mays
atgcagcgccatatccgtgcagtctactccatttttgttcccctctccggtggcggcctagcgggggtgtggtcttcctcgcgtcgcctcccctcgctctcatccggtcatcagtttgaggtttcaacctatttcaccagagctgattggactcatggatgggaacaaagatgaggcattgagatctgtcaagcttgcaaaatctgcatttgcatctggggataggcagcgcgcagaaaaattaattaaaattgctcaaagattggaccctggtcttccacttgatgatttgctgagcccagttgagaaggttggcatcctgaatatttctacttgcaaagacaagactgaaagaggacaagctcttttatacccaaaaacaacaaaagaatctgttggtcctttaaatgttgataaggcttacactgaggagaatattagagtggttcaggatatcaggaaaaagaaggattactatgcagttctcggagtagagagaagatgcactgtggaggaaattaggaaggcatacaggaggttatcactgaaggttcatcctgacaagaacaaggttcctggggcagaagatgctttcaagatggtaagcaaggctttcaagtgcctaagcaatgatcagtcgcggaggacttatgatcagacaggcaccactgaggaccatgaattcaatgagcaatatcccaatgtcatgaggcggggagctgctaggcggagaaggccagcaagaagtggcttctataactatgaagaagattttgatccagatgagatattcaggtccttttatggcacccatgataatatgttccatccccagtatacctacagggctaggggaacaggcaggcaacagcaacagagaagggagcattcagtggagggtggttccagcataaatctaacagtgtttattcaccttgtagtagtactgtttattgtttcgcttgcatttattccagcgcgtcaagctgagtattcgctgcaacagacaaattacttccccatttcaaaggtcactcaaaaacaaggagtggagtacttcgtcagcaaacaagattttgatcagcagtttccacagggtagtcagtctagagagaatcttgaacggcatgttctgatggactataagagtatgcttggaagatattgccatgtggaactccaacgtcgtcaatgggccaaggactaccctacacctcgctgtgacaagctaagggagctgtctgtggcgcagaatgtgcatatgccatcagtttgatctcccgttttcatcatggaagaatattgctcatatttgcaggacagcaccgtaacctgggactgtgacaaccttctgcactattgaccactgcaactaccgctgctaggagggcc

SEQ ID NO: 76340 - DNA, 1393 bp, Zea Mays
cagaaaatgcagcgccatatccgtgcagtctactccatttttgttcccctctccggtggcggcctagcgggggtgtggtcttcctcgcgtcgcctcccctcgctctcatccggtcatcagtttgaggtttcaacctatttcaccagagctgattggactcatggatgggaacaaagatgaggcattgagatctgtcaagcttgcaaaatctgcatttgcatctggggataggcagcgcgcagaaaaattaattaaaattgctcaaagattggaccctggtcttccacttgatgatttgctgagcccagttgagaaggttggcatcctgaatatttctacttgcaaagacaagactgaaagaggacaagctcttttatacccaaaaacaacaaaagaatctgttggtcctttaaatgttgataaggcttacactgaggagaatattagagtggttcaggatatcaggaaaaagaaggattactatgcagttctcggagtagagagaagatgcactgtggaggaaattaggaaggcatacaggaggttatcactgaaggttcatcctgacaagaacaaggttcctggggcagaagatgctttcaagatggtaagcaaggctttcaagtgcctaagcaatgatcagtcgcggaggacttatgatcagacaggcaccactgaggaccatgaattcaatgagcaatatcccaatgtcatgaggcggggagctgctaggcggagaaggccagcaagaagtggcttctataactatgaagaagattttgatccagatgagatattcaggtccttttatggcacccatgataatatgttccatccccagtatacctacagggctaggggaacaggcaggcaacagcaacagagaagggagcattcagtggagggtggttccagcataaatctaacagtgtttattcaccttgtagtagtactgtttattgtttcgcttgcatttattccagcgcgtcaagctgagtattcgctgcaacagacaaattacttccccatttcaaaggtcactcaaaaacaaggagtggagtacttcgtcagcaaacaagattttgatcagcagtttccacagggtagtcagtctagagagaatcttgaacggcatgttctgatggactataagagtatgcttggaagatattgccatgtggaactccaacgtcgtcaatgggccaaggactaccctacacctcgctgtgacaagctaagggagctgtctgtggcgcagaatgtgcatatgccatcagtttgatctcccgttttcatcatggaagaatattgctcatatttgcagcaccgtaacctgggactgtgacaaccttctgcactattgaccactgcaactaccgctgctaggagggcc

SEQ ID NO: 76341 - DNA, 1345 bp, Zea Mays
atgcagcgccatatccgtgcagtctactccatttttgttcccctctccggtggcggcctagcgggggtgtggtcttcctcgcgtcgcctcccctcgctctcatccgtttgaggtttcaacctatttcaccagagctgattggactcatggatgggaacaaagatgaggcattgagatctgtcaagcttgcaaaatctgcatttgcatctggggataggcagcgcgcagaaaaattaattaaaattgctcaaagattggaccctggtcttccacttgatgatttgctgagcccagttgagaaggttggcatcctgaatatttctacttgcaaagacaagactgaaagaggacaagctcttttatacccaaaaacaacaaaagaatctgttggtcctttaaatgttgataaggcttacactgaggagaatattagagtggttcaggatatcaggaaaaagaaggattactatgcagttctcggagtagagagaagatgcactgtggaggaaattaggaaggcatacaggaggttatcactgaaggttcatcctgacaagaacaaggttcctggggcagaagatgctttcaagatggtaagcaaggctttcaagtgcctaagcaatgatcagtcgcggaggacttatgatcagacaggcaccactgaggaccatgaattcaatgagcaatatcccaatgtcatgaggcggggagctgctaggcggagaaggccagcaagaagtggcttctataactatgaagaagattttgatccagatgagatattcaggtccttttatggcacccatgataatatgttccatccccagtatacctacagggctaggggaacaggcaggcaacagcaacagagaagggagcattcagtggagggtggttccagcataaatctaacagtgtttattcaccttgtagtagtactgtttattgtttcgcttgcatttattccagcgcgtcaagctgagtattcgctgcaacagacaaattacttccccatttcaaaggtcactcaaaaacaaggagtggagtacttcgtcagcaaacaagattttgatcagcagtttccacagggtagtcagtctagagagaatcttgaacggcatgttctgatggactataagagtatgcttggaagatattgccatgtggaactccaacgtcgtcaatgggccaaggactaccctacacctcgctgtgacaagctaagggagctgtctgtggcgcagaatgtgcatatgccatcagtttgatctcccgttttcatcatggaagaatattgctcatatttgcaggttatgaaaactcctgaaattcgcttcaccctata

SEQ ID NO: 76342 - DNA, 1353 bp, Zea Mays
atgcagcgccatatccgtgcagtctactccatttttgttcccctctccggtggcggcctagcgggggtgtggtcttcctcgcgtcgcctcccctcgctctcatccggtcatcagtttgaggtttcaacctatttcaccagagctgattggactcatggatgggaacaaagatgaggcattgagatctgtcaagcttgcaaaatctgcatttgcatctggggataggcagcgcgcagaaaaattaattaaaattgctcaaagattggaccctggtcttccacttgatgatttgctgagcccagttgagaaggttggcatcctgaatatttctacttgcaaagacaagactgaaagaggacaagctcttttatacccaaaaacaacaaaagaatctgttggtcctttaaatgttgataaggcttacactgaggagaatattagagtggttcaggatatcaggaaaaagaaggattactatgcagttctcggagtagagagaagatgcactgtggaggaaattaggaaggcatacaggaggttatcactgaaggttcatcctgacaagaacaaggttcctggggcagaagatgctttcaagatggtaagcaaggctttcaagtgcctaagcaatgatcagtcgcggaggacttatgatcagacaggcaccactgaggaccatgaattcaatgagcaatatcccaatgtcatgaggcggggagctgctaggcggagaaggccagcaagaagtggcttctataactatgaagaagattttgatccagatgagatattcaggtccttttatggcacccatgataatatgttccatccccagtatacctacagggctaggggaacaggcaggcaacagcaacagagaagggagcattcagtggagggtggttccagcataaatctaacagtgtttattcaccttgtagtagtactgtttattgtttcgcttgcatttattccagcgcgtcaagctgagtattcgctgcaacagacaaattacttccccatttcaaaggtcactcaaaaacaaggagtggagtacttcgtcagcaaacaagattttgatcagcagtttccacagggtagtcagtctagagagaatcttgaacggcatgttctgatggactataagagtatgcttggaagatattgccatgtggaactccaacgtcgtcaatgggccaaggactaccctacacctcgctgtgacaagctaagggagctgtctgtggcgcagaatgtgcatatgccatcagtttgatctcccgttttcatcatggaagaatattgctcatatttgcaggttatgaaaactcctgaaattcgcttcaccctata

SEQ ID NO: 76343 - DNA, 2098 bp, Zea Mays
atggctaccaagatcctatctttaacagcaagttcttctggttgtgaaagaaattggagtgggtttgatggggtgcacactaagaagagaaataggcttactacagactgcctcaacaagttggtctacattcagttcaacaacaggctaattaataagagagcaaagatcaagtccaagaaaattactgatgttctcttgtctagtggtacaactgaagctcaaggtttcctccaagagaatggagatgattgtgcattagtttcctttagagatgaggaagaagtcatggaaggtacagggatactttggtctgtgcttggagatgcagtgggagcagaagaacaactagagctgcgtagaagtgcaagggtaagagagctcaatgaagaagagtttgagtccgaagaagaagagtttgatgaagatgaggatgagtatgagatggatgaaacctaagtgtgagccagcttcatgtcatgttttagcttttattatgcatccatgtatctttaacttgtgaacttagaaatcctgttgtgcgcttgtgttttgtgttgtggcttgtgagaactgaatcatgtgcttgttattttatttcgtgttgctgcattttatatgtgttgctgcctgctgtcccttcatgtttgtgatttctaaaggctatcctatgctgctgatcagtacttaatggatgggagaagggtcagacctcagataagtacctaacttgctatttccttttttttatcacttgtatcgatgcccaattgcatctaaaagtgttgtccacttctattgcagcagtgcttgaggattcagtgatcagcagatctgcaaggacaaaaggaccgggacgagagcggcactggcagcaagggttgaggcatctagcgctcccccaacctatcgggccgtccgggctgctggtgcagaagaggggcgacggggagccaccatccgagtcaaggctgatggtggaaagggccaccatccgagtcaaggttgcgtcgtccgtggtgctcgccgcccgtggtgaagcagagtgtgcagtgttaagcttcagcgagtacacggttgctcatgctgtactgctcgtggcgcttcatacaactgttttgtcgttctccaattctcagaatgctactcagaaaagtcgaatggtatttgtccatgttcctttagaaattgctggatgagaagtatgtctaggggctgagaagctggagtatttcacttgcttgcttaccttttaatttgtttgtctttacagaatgctactaaaattttgaaaggtatttgtccatgttccttaagaaatgctgctcatgaagttgaggaaattggtcagacttgttgatctgctactgcatgaacaacaacaaaaagttatgtggattttactattcttattctgtttcactgaatcccggtcccgtgaaggtcaacctcggtgtcggtggctaccggaccgagatgagatgagtttgtggatttgatgtgaaccttctaagtccccttttgtttttttattatttggatctattgatggattttacgcccctgtttctattctgatctgaagggaaaatcctctcatgctgaatgtggtcaggcacatcgagcaaatgtggtcagtcgccctctgtgtacgccagcagaatttcatgggaagcccctcgtgctaaatgtttgatatggttttcctggcgctcgtatttgcaaacgagaattagtgttgttctggtgatcatcttgcactttcagttccatggttgcgtctatttagtttcttggtcgttacatctcaatgtttatttctattatctgttactctttttcctagctcacgtaagttggaatatgttttttagggtgggcaactaggcattatttgtacattgatattgtttgaaaattatagcaaattcatttgccagtgatgatgtgaatgccaatctgcttttggagccttgaacatataaggatgtactgatctgcttttggtttgatgatcgtgaccttccattcggattcaaagaagtcatactatatgacgtcaaacttttaacattacttgagtatgaccttccttgtt

SEQ ID NO: 76344 - DNA, 499 bp, Zea Mays
tgcgctcgctacatggttggatggcatcggggtataaagctgggactaccctcgtcggcccttgccgccgcgacgccagccggaccgtcgtccgccctaaccattgggaatcagacctctggggcttcctttcgagctcattgtcgcccggcgtttgtggaaggtctggggggatctccaccccgtgttgatcgcgcacgcactgctaattggtctctgagggttagcggtcgatggcaatcgctcgccgtgaatccagcgccgccgtctgaccgccaagtgccggggtcggcaacctctgcgtgcatgatttctgcgcgaggctacgagtcatgtgaagatcatcctggtacctggaatcttaagtcccaggcaagttgtgcccttgatcacttctttttactcaatcatgttcttattaatcataatgatatgcataggttaattttgatgggacccaataggttaccctagtttgactatctttataccttgttta

SEQ ID NO: 76345 - DNA, 1851 bp, Zea Mays
ccttaagcgcaatagattctcacgcaaaccacgcgttttgttgacctggtgcgctcgctacatggttggatggcatcggggtataaagctgggactaccctcgtcggcccttgccgccgcgacgccagccggaccgtcgtccgccctaaccattgggaatcagacctctggggcttcctttcgagctcattgtcgcccggcgtttgtggaaggtctggggggatctccaccccgtgttgatcgcgcacgcactgctaattggtctctgagggttagcggtcgatggcaatcgctcgccgtgaatccagcgccgccgtctgaccgccaagtgccggggtcggcaacctctgcgtgcatgatttctggtaattctccctttcgtatgttcgctaccatctcctcttcgtgtttctgtgatccaatttgaggatggggacatgtgcgtgtcccgtgggtggcttgtcggcgaagccccgccgcggcggcatttgcgttgccgtcactgtatcggagttgggggaaagagagatgaccgtggatcttcaaatgtgtggtgcagatttgaaatagggagaacgtttaggccgggaccttcgtgtccatagatcaaaggatgggtggtgtagatttagttggccatacccgatgggggaggcccggctctcgaacgttgataatcggatccacggtagggactagacttgggttaattaaatccgggccatgaactcgggatctggggccacaaatgcgtaccgtttcagatcagggtgatctaatctgggcgcttgattgatgatccaacggccctgatcgcgcaataccccttcgctgtttgcgttttctaaacgagaccctagaagaatagagtatcaacccgcagtccatcactgtataactctgagtctcgggaattttatagtttagcccctgtactctttggtagttttcgcgtagtctagacatttaataaaatcgagaaattaatttgaaaaatgatttttaatataaaataaatccagaaacttgtataaatgatattaaatccatcttaactccaaatcgattcattccagtggcattaatttttttaatattgtttatcacatagtaactttgtttagccatgaaacttgaattaaaattattcacttgaattactctactctaggtactaaataacttcggaaaaacataactaattcattttaactctgtttcaatccgttcaagttgcgctagattcatatgaatatttattatgtagtaacagtattaattataccatattgtataattttatagttagatatatatttaacctatgtctactagattaactcttttaatcaaagctaacatgtccatagttataatttgggttaaaatgtgatctctagtcaagttataattaagattaaagtagaattaattattcgtagaataatctctcatatgatttacgctaatcaatttataatatagtttggtagataaatcatagggatctcccataaatcataactttataaccgtaactccgattttagtagttctcgaactcacgatctcgtagcaacgcgtagattattaatacgcagtttgttcttatgtttggtgttatgttaattttgtctataccatgtttgtttgtattgctacgactagcgcgaggctacgagtcatgtgaagatcatcctggtacctggaatcttaagtcccaggcaagttgtgcccttgatcacttctttttactcaatcatgttcttattaatcataatgatatgcataggttaattttgatgggacccaataggttaccctagtttgactatctttataccttgttta

SEQ ID NO: 76346 - DNA, 931 bp, Zea Mays
cacccaatcctcaatgtgtcgacgatccacgcaggacacgggatatgaatgcacagtgacagtcaccgaaatagatacatcaaacacatggtggtatccatcatgcacaaaatgcggccgaaaaacaactccacataatacaacatattattgtgatttgtgtaagtgggatggctacaaattcaaatacaagctcaaatttcgagcatcagatgcaacagccatagcacaaatgttttgctttgataacatagcacgatatattgttggcaaatcttgcaaagttatcttacgatctacaaatgcagcgacaccaattcctccagatttagctcagattgtttcactgaaattcacctttagagtaataccagatgacagttctttcgataaccaagaccaggtccccattgcccttcgcatcatctctataactgcagcgcatggtagacaacatgcactaccattgaagccaaccaatatcatagaaggtacatcaacaccacagaacaagttacaactgcagttaatcgagaactcaccatcaaatccttttcaaaatttatccacaagtactccaccacccaaacaggctacaaggaagctaatatatccaccgctcagtaaccccctcacatatcaacatactcccaagtctgatggcgaagaagaaattacagagcaaacaatggacaccagtcaaatcaaaggaaaaaaagtatgcactcattcgaatctcctccaaaaaggtatccatgaacagaacaacatgatggatgatagagctacgaagacgatctggttggatgaagaagacacgcgaatacgtgttggccaagaacatggcttcgtcagttgaagataatacattgacagaaacatggaaaacaaagatgcttgtaactgactcgatcgaggaacgaggatgcag

SEQ ID NO: 76347 - DNA, 2509 bp, Zea Mays
atgacttctctcagatcgatggactacacacttctaccagatttaacaacgtataaaaaacatgcgataatccaggtccatgtctcaagaaaatggtctttccatggtgccactgaaaatggtcccttgcagcacatcgacatggtcctatcagattgcaagggtaatagtatgtatgctgaaataccagcaaatcttgccgaagaaaagggagcactcatcgaaacaaatcagatctacgacatcagtcgttttagagttactgcagcaaaaacagcctacaaacccattgatggtgacaagatgatacaatttacgatttacacaattatcaagcctgcaagtaacccaccacctacattttctttatatatctatcaattaactccatttgatgagattgaatctcaaattcagcacaagaccaaatttctagatgttcttggaactataaccgaggtaactgctttgaagacagtacacatagaaggacagctcagccccactattattagagacataatgatagaagatctaagccgcaaaactctcaaaatcactctttgggcaaaacgagcaacatcatttacaatacaaaatgtgtatgacccagttagcaaaaagccaattcttgctctttttgttggttgcctacctaaattctacaaaggtgtttacttaagtggtggtgcggcttgccattggtatttcaatcccgcaatacctgaagctgaagcgtaccaaaatagtataacaaagtattatgcttacaaacatggtggtgaaacaattcagctccaccttcctacacaaccggaacatgcactacaaaccttccaacctccaacaatagaacataaaactctggagcaactcctgacaatgaacccatatgattacccagacacgggatatgaatgcacagtgacagtcaccgaaatagatacatcaaacacatggtggtatccatcatgcacaaaatgcggccgaaaaacaactccacataatacaacatattattgtgatttgtgtaagtgggatggctacaaattcaagtaagtaatcaacatcttcaacattcatatggtgaataaattagacatactaacaacactttttacataaacaattacattgctttataaacaaatctaaccatgacatattactattatccattgttatttacatcacccaattttataacaacattctaagcatagatttttaattgctatcacaatgcctcttaatgacagatacaagctcaaatttcgagcatcagatgcaacagccatagcacaaatgttttgctttgataacatagcacgatatattgttggcaaatcttgcaaagttatcttacgatctacaaatgcagcgacaccaattcctccagatttagctcagattgtttcactgaaattcacctttagagtaataccagatgacagttctttcgataaccaagaccaggtccccattgcccttcgcatcatctctataactgcagcgcatggtagacaacatgcactaccattgaagccaaccaatatcatagaaggtacatcaacaccacagaacaagttacaactgcagttaatcgagaactcaccatcaaatccttttcaaaatttatccacaagtactccaccacccaaacaggctacaaggaagctaatatatccaccgctcagtaaccccctcacatatcaacatactcccaagtctgatggcgaagaagaaattacagagcaaacaatggacaccagtcaaatcaaaggaaaaaaagtatgcactcattcgaatctcctccaaaaaggttcaagaaaggaagcttacatatccaaagcaatgatgacgatgtccaggagaactaaacacagatgtttagagcaccaaattttcttgcttttgacacgatgtcttctacaaactttggtgtaatccgatctaaaacgtatttgcctgccaaagtccctacgaactttcttttgatgtaaacaatatatccatgccgaaacaaatactacaactagaaaggcatgtagctatagttctgacatgtcatcttttgcggtctttaggaccaatattctggtgcctcaacaaatatgtacatataactaggaatttgctatcaactatggttagcttacaacccactgtaatataacacatccaatctggacgtgatcctatatttgcatatcccaacttttcagtggtacaaacatattcgtgcttgcatattttttcattcatattacataccgtcttctacgcatatattactaagatacaaattgcttatatacacccacaacatcaatttacttaatgtctatatacatcaaatcagctattcaattatgttataaaaaactcgtgcaaggcgcgagcaagtttctagtaaggggtaagaaaggggattgacctccggtcgcgtcgcgccctctcgcaagctcagagtcctcatcccgaaggcgatccacgtcgccacgagccc

SEQ ID NO: 76348 - DNA, 2357 bp, Zea Mays
atgacttctctcagatcgatggactacacacttctaccagatttaacaacgtataaaaaacatgcgataatccaggtccatgtctcaagaaaatggtctttccatggtgccactgaaaatggtcccttgcagcacatcgacatggtcctatcagattgcaagtatgtatgctgaaataccagcaaatcttgccgaagaaaagggagcactcatcgaaacaaatcagatctacgacatcagtcgttttagagttactgcagcaaaaacagcctacaaacccattgatggtgacaagatgatacaatttacgatttacacaattatcaagcctgcaagtaacccaccacctacattttctttatatatctatcaattaactccatttgatgagattgaatctcaaattcagcacaagaccaaatttctagatgttcttggaactataaccgaggtaactgctttgaagacagtacacatagaaggacagctcagccccactattattagagacataatgatagaagatctaagccgcaaaactctcaaaatcactctttgggcaaaacgagcaacatcatttacaatacaaaatgtgtatgacccagttagcaaaaagccaattcttgctctttttgttggttgcctacctaaattctacaaaggtgtttacttaagtggtggtgcggcttgccattggtatttcaatcccgcaatacctgaagctgaagcgtaccaaaataggtaaaaaaacaccaaagttattttttatttatgtcatcttctattcacatcacactatagtataacaaagtattatgcttacaaacatggtggtgaaacaattcagctccaccttcctacacaaccggaacatgcactacaaaccttccaacctccaacaatagaacataaaactctggagcaactcctgacaatgaacccatatgattacccagacacgggatatgaatgcacagtgacagtcaccgaaatagatacatcaaacacatggtggtatccatcatgcacaaaatgcggccgaaaaacaactccacataatacaacatattattgtgatttgtgtaagtgggatggctacaaattcaaatacaagctcaaatttcgagcatcagatgcaacagccatagcacaaatgttttgctttgataacatagcacgatatattgttggcaaatcttgcaaagttatcttacgatctacaaatgcagcgacaccaattcctccagatttagctcagattgtttcactgaaattcacctttagagtaataccagatgacagttctttcgataaccaagaccaggtccccattgcccttcgcatcatctctataactgcagcgcatggtagacaacatgcactaccattgaagccaaccaatatcatagaaggtacatcaacaccacagaacaagttacaactgcagttaatcgagaactcaccatcaaatccttttcaaaatttatccacaagtactccaccacccaaacaggctacaaggaagctaatatatccaccgctcagtaaccccctcacatatcaacatactcccaagtctgatggcgaagaagaaattacagagcaaacaatggacaccagtcaaatcaaaggaaaaaaagtatgcactcattcgaatctcctccaaaaaggttcaagaaaggaagcttacatatccaaagcaatgatgacgatgtccaggagaactaaacacagatgtttagagcaccaaattttcttgcttttgacacgatgtcttctacaaactttggtgtaatccgatctaaaacgtatttgcctgccaaagtccctacgaactttcttttgatgtaaacaatatatccatgccgaaacaaatactacaactagaaaggcatgtagctatagttctgacatgtcatcttttgcggtctttaggaccaatattctggtgcctcaacaaatatgtacatataactaggaatttgctatcaactatggttagcttacaacccactgtaatataacacatccaatctggacgtgatcctatatttgcatatcccaacttttcagtggtacaaacatattcgtgcttgcatattttttcattcatattacataccgtcttctacgcatatattactaagatacaaattgcttatatacacccacaacatcaatttacttaatgtctatatacatcaaatcagctattcaattatgttataaaaaactcgtgcaaggcgcgagcaagtttctagtaaggggtaagaaaggggattgacctccggtcgcgtcgcgccctctcgcaagctcagagtcctcatcccgaaggcgatccacgtcgccacgagccc

SEQ ID NO: 76349 - DNA, 2265 bp, Zea Mays
ttttggtccatgtactgcagatcgatggactacacacttctaccagatttaacaacgtataaaaaacatgcgataatccaggtccatgtctcaagaaaatggtctttccatggtgccactgaaaatggtcccttgcagcacatcgacatggtcctatcagattgcaagggtaatagtatgtatgctgaaataccagcaaatcttgccgaagaaaagggagcactcatcgaaacaaatcagatctacgacatcagtcgttttagagttactgcagcaaaaacagcctacaaacccattgatggtgacaagatgatacaatttacgatttacacaattatcaagcctgcaagtaacccaccacctacattttctttatatatctatcaattaactccatttgatgagattgaatctcaaattcagcacaagaccaaatttctagatgttcttggaactataaccgaggtaactgctttgaagacagtacacatagaaggacagctcagccccactattattagagacataatgatagaagatctaagccgcaaaactctcaaaatcactctttgggcaaaacgagcaacatcatttacaatacaaaatgtgtatgacccagttagcaaaaagccaattcttgctctttttgttggttgcctacctaaattctacaaaggtgtttacttaagtggtggtgcggcttgccattggtatttcaatcccgcaatacctgaagctgaagcgtaccaaaatagctccaccttcctacacaaccggaacatgcactacaaaccttccaacctccaacaatagaacataaaactctggagcaactcctgacaatgaacccatatgattacccagacacgggatatgaatgcacagtgacagtcaccgaaatagatacatcaaacacatggtggtatccatcatgcacaaaatgcggccgaaaaacaactccacataatacaacatattattgtgatttgtgtaagtgggatggctacaaattcaaatacaagctcaaatttcgagcatcagatgcaacagccatagcacaaatgttttgctttgataacatagcacgatatattgttggcaaatcttgcaaagttatcttacgatctacaaatgcagcgacaccaattcctccagatttagctcagattgtttcactgaaattcacctttagagtaataccagatgacagttctttcgataaccaagaccaggtccccattgcccttcgcatcatctctataactgcagcgcatggtagacaacatgcactaccattgaagccaaccaatatcatagaaggtacatcaacaccacagaacaagttacaactgcagttaatcgagaactcaccatcaaatccttttcaaaatttatccacaagtactccaccacccaaacaggctacaaggaagctaatatatccaccgctcagtaaccccctcacatatcaacatactcccaagtctgatggcgaagaagaaattacagagcaaacaatggacaccagtcaaatcaaaggaaaaaaagtatgcactcattcgaatctcctccaaaaaggttcaagaaaggaagcttacatatccaaagcaatgatgacgatgtccaggagaactaaacacagatgtttagagcaccaaattttcttgcttttgacacgatgtcttctacaaactttggtgtaatccgatctaaaacgtatttgcctgccaaagtccctacgaactttcttttgatgtaaacaatatatccatgccgaaacaaatactacaactagaaaggcatgtagctatagttctgacatgtcatcttttgcggtctttaggaccaatattctggtgcctcaacaaatatgtacatataactaggaatttgctatcaactatggttagcttacaacccactgtaatataacacatccaatctggacgtgatcctatatttgcatatcccaacttttcagtggtacaaacatattcgtgcttgcatattttttcattcatattacataccgtcttctacgcatatattactaagatacaaattgcttatatacacccacaacatcaatttacttaatgtctatatacatcaaatcagctattcaattatgttataaaaaactcgtgcaaggcgcgagcaagtttctagtaaggggtaagaaaggggattgacctccggtcgcgtcgcgccctctcgcaagctcagagtcctcatcccgaaggcgatccacgtcgccacgagccc

SEQ ID NO: 76350 - DNA, 1166 bp, Zea Mays
cctgtttctggtgaaagggagtgttgcattccccatcagcactgttactgacggccgccgcgtggtgttcccgacgtgtgctaccatctccaatacacccaatcctcaatgtgtcgacgatccacgcaggcgcttctgccatctatactcctcctaatataactgccactcaagcaagggcaacaagacgacatcttctaaatcagagtcgaattgctagaaaagggttgacagctaaaacattgacgaatttccatactggacagttcacagccgaatatgtggaagcattaaaagcctcatacccaaataggtcatactacggaacaccagattatgaatgctcttattgtcatgctgtgttctggtatgctgaaagggtcaggagtaatcaacaggattcatctatcagatataacaactgctgcaaaggtggaaaaatcagcattcctcccttcaagcctcgacctgagcctttagcatctcttgcaagatttgatggtgatgccacatcaagaaaattcattcgcaatattagacagtacaattgtctgtttgcttttacatcaatgggagcacaaatagataactctgtcaatgatggtcgtggtccacctctctttaaaatttgcggccaagttcaccatcgtattggaactttgttgccagacaatggatctcctccaagattcattcaattgtatatttacgacaccacaaacgaagtccaaaatagaataaatgctttagacagtggtgacagaacccaagacagtttcgatcctgtaataataagaaatttaattaaaatgcttgatcatcataacccattcgtcaagaaattcagaatggcaagagatcgtttggcggataatccgaatgaagaattcactatcagacttatcggagcaaaggaaggtgatcctatccaatataacttaccaacaacagatgaattagctatgctggttgtcggagatttcacattagacacattcaaacgtgatattattattgagactcagaacaaagagctaaagcgaatatcttcactacacccaacatatatggctctacaatacccactgctttttcgctttggcgagagaggtttccaggttggcgagagaggtttccattatagaaaaaatcaaccaaatccttat

SEQ ID NO: 76351 - DNA, 888 bp, Zea Mays
agggtccgccgcgggtgctcctgcgcggggtagccctgctcgtgtgactgctccctgcacggcggtcacccctgcgtcggacaccgcaccccctgtgctggaactcgacgttcgtgctcctctgcccaaagccggtttctcctcctcctatcccacctctctagagcttcagtgaccgggctgggagagatgcatgcagttaggagctcggcggggaccaccgtcgcgagttcatcggtggcgctctgtggccggcgtgctgtgggtcaataccgcgaatgccccctcaaccgtcccataccagtgttggggcctgggcgtgttggccagggagtttcttgggcgcacctggaactgcaccgtggcgaccgcgggcgtgaaggtgtggacatcgtggaggaatttctcactggtgctgcgggtccgcgcatcgccgcgtgccatcatcaccacgcccggatttttggtcaagaactggtatcactggaggaggcgcatggtggatgtgcgctgtgttcgtgtgaggtctaggtcatcgtctcccagtcgactttctggcgccaaggatggattttagatcctgttatatttgtcttttattttgtaggacttccgctatgtaataaatactctgattatgtttttgacatttatctctatacactctgttattatatatgttgtcttcttggcgcatgtatgagatgcacctggctttgttccttaaagccgggtgtgacaatgtcatagtgattaacaggaacattattaggtaaagaaaagtgatcaagagcatagcttgccttagacttgagattcctaggtaccaagttggtcttcagattatcgtgacctcatcgctaatcgtagcaatacatacaaatagac

SEQ ID NO: 76352 - DNA, 781 bp, Zea Mays
caacctctgcaccccgcaacaataattatcctaccgcagagtgccatagccactgagcagagcaaaaccattggtgtggagacatcaccgccgtgggtatgcaaagcggggaaaagggtccgccgcgggtgctcctgcgcggggtagccctgctcgtgtgagttgtgactgctccctgcacggcggtcgcccctgcgtcggacacctcaccccctgtgctggaactcgacgtccgtgctcctctgcccaaagccggttgctcctcctcctatcccacctctctagagcttcagtgaccgggctgggagagatgcacgcagttaggagctcggcggggaccaccgtcgcgagttcatcggtggcgctctgtggccggtgtgctgtgggtcaataccgcgaacgccccctcaaccgtcccataccagcggtggggcctgggcgtgttggccagggagtttcttgggcgcacctggaactgcaccgtggcgaccgcgggcgtgaaggtgtgggcatcgtggaggaatttctcactggtgctgcgggcccgcgcatcgccgcgtgccatcatcaccacgcccggatttttggtcaagaactggtatcactggaggaggcgcatggtggatgtgcgctgtgttcgtgtgaggtctaggtcatcgtctcccagtcgactttctggcgccaaggatggattttagatcctgttatatttgtcttttattttgtaagacttccgctatgtaataaataccctgattatgttattgacatttatctctat

SEQ ID NO: 76353 - DNA, 715 bp, Zea Mays
ctgcgggtggggatactctgtcagctgctccgtgtgccttcctctcaactccgccactgatctgtgggccaccgctgtcagctccttctccttcaactagctgcccgtaacagacgccgtgcgcatcacgcgctccaccgaccggatctccccctcttcttcggggctctcgtggtggatatcgtcggtgggacctgctccagccacgagacctccttccacacgcgtggggccggatggccagtactgacctccccgcggtgatggcggaaatggcggagctcacaactaaactccggaaatcgctcgacaggcgtgtgcctttctcgcattatatggttgccatacccttcgcggaccgctcaattcaccagtgcctcgaccatatcctagtaaaaccgccccttcccctgttctccctctttgacgcgagagagattttgagaaacagaatgagcgcaagggccgtcgccattgcgcttgaatcttcgacggtgctccgacctcgtgtctgaccatgagggttcgccataacgccacgaaggtatccgcgacccttgtatccgaggaacacccctggagaccatgcaatttcaccgaggcgccatctcagccgcagatccgccttcgaccatcgactggaatccctgcggctcaacccatgaagaacctattattgaggatcctggtgaccagaagatagaagttgctgagc

SEQ ID NO: 76354 - DNA, 369 bp, Zea Mays
agaggagatttaagtttccaaactaatcctaacatgacgttccaagcaggcagaacatgtcttggatatttttgcgaggcagataatcacggaaaaagctaaaagcacacgtgaactgtttgatgatgtttgttgagttgaccctagttagaaaaaaaacgtgagcgaatatcattgaaaggaaattgtgtccgcaatgtatccttgttgaaatggaattgtgttcccaattgtaagtagtattaggtctatcataagtcaaacttttctagctttaatcgaattaacagaaaactgtagaaaatatgtacagcatcaaataagattcattgtatcacgcacctgcatgaaacatattttaatgatgta

SEQ ID NO: 76355 - DNA, 1598 bp, Zea Mays
gtactttggccaaaagaagtcaaattggcttgagccgaggttcagccgttcaggtcgccgacgccgcgcacgtcccatccgatggctgccgcagtccacctccggcctctccactcgttcgccttccctctccccgcagtgaaggccgcgcccagctggctcccgctccaggcgaaacccggcgcgcggaggacgggcagccgcgttgctctgctcgtcccctccgcgtctgcccccgcgccagcgtctccatctccctcgggcaaggatggcaccactgcgtcggctgcgacaaagtgggtggagtggatcccgcgcgctgcggcaggcgctgggtcggcagtgggccccgagcaggtgctcaggctcatctctggcgccgcggccacgcccatctgccagttcgttgacagcccgcgaacctttctccattccgtcgacccgcgcgtcaagctggtgtggctcttgtcccttgttgtcctaccagccaggtcaaatatttatatgcggtttggtttggtagtattcctggcccttatttcaatgtgggttttaccaaatcatgtttggaaggatcaacttggaagggttactcttctttcaggattcatattcatcatgctgggatttggtgctgatggtgcaccttcattagtccagatgagaacgcctccaccttctgttctaggcataccgaacattccttgctccacaagtgggtattcttacacaatcttgaaactgggaccactgcaatttacaaggaaaggcctatcattagcaagtacttcagcaagcctctcctttgcaatattccaaagtgcaagtctctgcttgacaacaaccactcctgagcagcttgcttctgctttgtggtggtttatgagtccactgaagcatatcggtgtgccagtgcctgagataatacttacattactactctcattgaggtttatcaatttagtatttgatgaggttcgcaactcagctctagcgattgtagcacgccggataaattggaaaaagctgacagctatggaaactatagatttttcttcagctatgtccaacggatatttaaaaatatatttgatcatgcggagcaaatatccaaggcaatggtagctcgaggatttcgtggtaatccaatcaatcacaagatctactttctcacagaatcatcatttggaattgcggatttcttttcgttgctttgcctattggttgtagtgagcttggcttccttttctgaccaattagtttgatggtaacaaaaaggcagaacatgtcttggatatttttgcgaggcagataatcacggaaaaagctaaaagcacacgtgaactgtttgatgatgtttgttgagttgaccctagttagaaaaaaaacgtgagcgaatatcattgaaaggaaattgtgtccgcaatgtatccttgttgaaatggaattgtgttcccaattgtaagtagtattaggtctatcataagtcaaacttttctagctttaatcgaattaacagaaaactgtagaaaatatgtacagcatcaaataagattcattgtatcacgcacctgcatgaaacatattttaatgatgta

SEQ ID NO: 76356 - DNA, 1574 bp, Zea Mays
gtactttggccaaaagaagtcaaattggcttgagccgaggttcagccgttcaggtcgccgacgccgcgcacgtcccatccgatggctgccgcagtccacctccggcctctccactcgttcgccttccctctccccgcagtgaaggccgcgcccagctggctcccgctccaggcgaaacccggcgcgcggaggacgggcagccgcgttgctctgctcgtcccctccgcgtctgcccccgcgccagcgtctccatctccctcgggcaaggatggcaccactgcgtcggctgcgacaaagtgggtggagtggatcccgcgcgctgcggcaggcgctgggtcggcagtgggccccgagcaggtgctcaggctcatctctggcgccgcggccacgcccatctgccagttcgttgacagcccgcgaacctttctccattccgtcgacccgcgcgtcaagctggtgtggctcttgtcccttgttgtcctaccagccaggtcaaatatttatatgcggtttggtttggtagtattcctggcccttatttcaatgtgggttttaccaaatcatgtttggaaggatcaacttggaagggttactcttctttcaggattcatattcatcatgctgggatttggtgctgatggtgcaccttcattagtccagatgagaacgcctccaccttctgttctaggcataccgaacattccttgctccacaagtgggtattcttacacaatcttgaaactgggaccactgcaatttacaaggaaaggcctatcattagcaagtacttcagcaagcctctcctttgcaatattccaaagtgcaagtctctgcttgacaacaaccactcctgagcagcttgcttctgctttgtggtggtttatgagtccactgaagcatatcggtgtgccagtgcctgagataatacttacattactactctcattgaggttcgcaactcagctctagcgattgtagcacgccggataaattggaaaaagctgacagctatggaaactatagatattttcttcagctatgtccaacggatatttaaaaatatatttgatcatgcggagcaaatatccaaggcaatggtagctcgaggatttcgtggtaatccaatcaatcacaagatctactttctcacagaatcatcatttggaattgcggatttcttttcgttgctttgcctattggttgtagtgagcttggcttccttttctgaccaattagtttgatggtaacaaaaaggcagaacatgtcttggatatttttgcgaggcagataatcacggaaaaagctaaaagcacacgtgaactgtttgatgatgtttgttgagttgaccctagttagaaaaaaaacgtgagcgaatatcattgaaaggaaattgtgtccgcaatgtatccttgttgaaatggaattgtgttcccaattgtaagtagtattaggtctatcataagtcaaacttttctagctttaatcgaattaacagaaaactgtagaaaatatgtacagcatcaaataagattcattgtatcacgcacctgcatgaaacatattttaatgatgta

SEQ ID NO: 76357 - DNA, 1514 bp, Zea Mays
gtactttggccaaaagaagtcaaattggcttgagccgaggttcagccgttcaggtcgccgacgccgcgcacgtcccatccgatggctgccgcagtccacctccggcctctccactcgttcgccttccctctccccgcagtgaaggccgcgcccagctggctcccgctccaggcgaaacccggcgcgcggaggacgggcagccgcgttgctctgctcgtcccctccgcgtctgcccccgcgccagcgtctccatctccctcgggcaaggatggcaccactgcgtcggctgcgacaaagtgggtggagtggatcccgcgcgctgcggcaggcgctgggtcggcagtgggccccgagcaggtgctcaggctcatctctggcgccgcggccacgcccatctgccagttcgttgacagcccgcgaacctttctccattccgtcgacccgcgcgtcaagctggtgtggctcttgtcccttgttgtcctaccagccaggtcaaatatttatatgcggtttggtttggattcatattcatcatgctgggatttggtgctgatggtgcaccttcattagtccagatgagaacgcctccaccttctgttctaggcataccgaacattccttgctccacaagtgggtattcttacacaatcttgaaactgggaccactgcaatttacaaggaaaggcctatcattagcaagtacttcagcaagcctctcctttgcaatattccaaagtgcaagtctctgcttgacaacaaccactcctgagcagcttgcttctgctttgtggtggtttatgagtccactgaagcatatcggtgtgccagtgcctgagataatacttacattactactctcattgaggtttatcaatttagtatttgatgaggttcgcaactcagctctagcgattgtagcacgccggataaattggaaaaagctgacagctatggaaactatagatattttcttcagctatgtccaacggatatttaaaaatatatttgatcatgcggagcaaatatccaaggcaatggtagctcgaggatttcgtggtaatccaatcaatcacaagatctactttctcacagaatcatcatttggaattgcggatttcttttcgttgctttgcctattggttgtagtgagcttggcttccttttctgaccaattagtttgatggtaacaaaaaggcagaacatgtcttggatatttttgcgaggcagataatcacggaaaaagctaaaagcacacgtgaactgtttgatgatgtttgttgagttgaccctagttagaaaaaaaacgtgagcgaatatcattgaaaggaaattgtgtccgcaatgtatccttgttgaaatggaattgtgttcccaattgtaagtagtattaggtctatcataagtcaaacttttctagctttaatcgaattaacagaaaactgtagaaaatatgtacagcatcaaataagattcattgtatcacgcacctgcatgaaacatattttaatgatgta

SEQ ID NO: 76358 - DNA, 1503 bp, Zea Mays
gtactttggccaaaagaagtcaaattggcttgagccgaggttcagccgttcaggtcgccgacgccgcgcacgtcccatccgatggctgccgcagtccacctccggcctctccactcgttcgccttccctctccccgcagtgaaggccgcgcccagctggctcccgctccaggcgaaacccggcgcgcggaggacgggcagccgcgttgctctgctcgtcccctccgcgtctgcccccgcgccagcgtctccatctccctcgggcaaggatggcaccactgcgtcggctgcgacaaagtgggtggagtggatcccgcgcgctgcggcaggcgctgggtcggcagtgggccccgagcaggtgctcaggctcatctctggcgccgcggccacgcccatctgccagttcgttgacagcccgcgaacctttctccattccgtcgacccgcgcgtcaagctggtgtggctcttgtcccttgttgtcctaccagccaggtcaaatatttatatgcggtttggtttggtagtattcctggcccttatttcaatgtgggttttaccaaatcatgtttggaaggattcatattcatcatgctgggatttggtgctgatggtgcaccttcattagtccagatgagaacgcctccaccttctgttctaggcataccgaacattccttgctccacaagtgggtattcttacacaatcttgaaactgggaccactgcaatttacaaggaaaggcctatcattagcaagtacttcagcaagcctctcctttgcaatattccaaagtgcaagtctctgcttgacaacaaccactcctgagcagcttgcttctgctttgtggtggtttatgagtccactgaagcatatcggtgtgccagtgcctgagataatacttacattactactctcattgaggtttatcaatttagtatttgatgaggttcgcaactcagctctagcgattgtagcacgccggataaattggaaaaagctgacagctatggaaactatagatagcaatggtagctcgaggatttcgtggtaatccaatcaatcacaagatctactttctcacagaatcatcatttggaattgcggatttcttttcgttgctttgcctattggttgtagtgagcttggcttccttttctgaccaattagtttgatggtaacaaaaaggcagaacatgtcttggatatttttgcgaggcagataatcacggaaaaagctaaaagcacacgtgaactgtttgatgatgtttgttgagttgaccctagttagaaaaaaaacgtgagcgaatatcattgaaaggaaattgtgtccgcaatgtatccttgttgaaatggaattgtgttcccaattgtaagtagtattaggtctatcataagtcaaacttttctagctttaatcgaattaacagaaaactgtagaaaatatgtacagcatcaaataagattcattgtatcacgcacctgcatgaaacatattttaatgatgta

SEQ ID NO: 76359 - DNA, 1595 bp, Zea Mays
cttggagttgctctgactacggaggcagtactttggccaaaagaagtcaaattggcttgagccgaggttcagccgttcaggtcgccgacgccgcgcacgtcccatccgatggctgccgcagtccacctccggcctctccactcgttcgccttccctctccccgcagtgaaggccgcgcccagctggctcccgctccaggcgaaacccggcgcgcggaggacgggcagccgcgttgctctgctcgtcccctccgcgtctgcccccgcgccagcgtctccatctccctcgggcaaggatggcaccactgcgtcggctgcgacaaagtgggtggagtggatcccgcgcgctgcggcaggcgctgggtcggcagtgggccccgagcaggtgctcaggctcatctctggcgccgcggccacgcccatctgccagttcgttgacagcccgcgaacctttctccattccgtcgacccgcgcgtcaagctggtgtggctcttgtcccttgttgtcctaccagccaggtcaaatatttatatgcggtttggtttggtagtattcctggcccttatttcaatgtgggttttaccaaatcatgtttggaaggattcatattcatcatgctgggatttggtgctgatggtgcaccttcattagtccagatgagaacgcctccaccttctgttctaggcataccgaacattccttgctccacaagtgggtattcttacacaatcttgaaactgggaccactgcaatttacaaggaaaggcctatcattagcaagtacttcagcaagcctctcctttgcaatattccaaagtgcaagtctctgcttgacaacaaccactcctgagcagcttgcttctgctttgtggtggtttatgagtccactgaagcatatcggtgtgccagtgcctgagataatacttacattactactctcattgaggtttatcaatttagtatttgatgaggttcgcaactcagctctagcgattgtagcacgccggataaattggaaaaagctgacagctatggaaactatagatattttcttcagctatgtccaacggatatttaaaaatatatttgatcatgcggagcaaatatccaaggcaatggtagctcgaggatttcgtggtaatccaatcaatcacaagatctactttctcacagaatcatcatttggaattgcggatttcttttcgttgctttgcctattggttgtagtgagcttggcttccttttctgaccaattagtttgatggtaacaaaaaggcagaacatgtcttggatatttttgcgaggcagataatcacggaaaaagctaaaagcacacgtgaactgtttgatgatgtttgttgagttgaccctagttagaaaaaaaacgtgagcgaatatcattgaaaggaaattgtgtccgcaatgtatccttgttgaaatggaattgtgttcccaattgtaagtagtattaggtctatcataagtcaaacttttctagctttaatcgaattaacagaaaactgtagaaaatatgtacagcatcaaataagattcattgtatcacgcacctgcatgaaacatattttaatgatgta

SEQ ID NO: 76360 - DNA, 2161 bp, Zea Mays
atcacagaccgaaaaggaaaatagaggcgagacaaacgagagcgagcgagagagaaacagttcgagctcaccccggcgagagccgactctcaagcgataaggggcgtgggcgtcgtcggcatggagagcgagatggcggaggagtcaccggccgcagtctcagcggcggcggcgcgggcccggccactggaggcggtcgcggaggaagggcaggaggtggcggagcagcacgaggtggcagttggctccaccaagaccatggagcgcgtggcggccgcgaagaagttcatcgaggaccactaccgcgcgcagatgaagaacctccaagagcgcaaggagaggcgcttgattttggaacaacagctagcttcttcacaagttccgagggaggagcagataaacttaataaaggatttggagagaaaggagactgaatacatgagacttaaaagacacagaatttgtgtggatgactttgatctgctcactatcattggaaaaggtgcttatggacaggttcaactatgtcgggaaaaatccactggtaacatttatgccatgaaaaagctgaagaaaactgatatgcttgtgaggggtcaggtggagcatgttagagctgaaagaaacttactggcggaagttggtagccactgcattgtgaagctatattattctttccaagatgctgagtacctctatcttatcatggagtatcttcctggaggtgacatgatgaccctcctgatgagagaggatactctgactgaaaatgtggctcgattctacattgctgagactattcttgccattgaatccattcataaacataactacattcacagagatattaagcctgacaacctacttctagacaagaatggtcatatgaaattgtcagattttggattgtgtaagccaattgattgttcgaagttgtcaacactgaatgaaaatgaaccaatgactgatgaaaaccttagggagtctatggacatcgatcattctctctctgatactgcaaatggtaggagtaacactaattctcatgatcatgaactctcaaaggtaatttattgtcattgtgtttttcttaacatgctaaataaatgttttccaggcattttcaacagtcgggacacctgattatattgctccagaggttctactaaagaagggatatggactagagtgtgactggtggtctcttggtgcaatcatgtatgaaatgcttgttggttatccaccattttattcagatgatccactagttacatgccaaaagattgtgcattggagaagctatttgaattttccagataatccaagattgtctcttgaagcaaaggatctcatttgtcggttattatgtgatgttgatcacagaattggcagcggaggagcagatcaaataaaagctcatccttggtttcgaggagttgaatgggacaagctgtatgagatggaggcagcatttaagcccctagttaatgatgaactggatacacagaatttcatgaagtttccagatttaaaccctgctccagcaagagcaagttctggggcttcaaggaagatgatgcttaattctaaagatcttagctttgtggggtatacatacaagaattttgaggccgtgaaaggtttgcatcagtttgcagatcttcagagaagttcctcatttacaaggcactctgctggctccccatctgatacagcagatatggacgcctcaatggaagctaacgggaccgacacacacatgcgcactggttcagctggcgaccctatggcgccataatctgccctgttgttttcgtgaagtaccctgccctacaccggcatcatgcatgcacctcgacaacatggctacatctgaagagacctggttgtggacttgcatttattcaggtctggtgcccttctactatttggcgagcaccttcgtagttgtacaaaccagaggtatttgtgtagtatgtttcaggtgagacaagttgggcaggtctggccctgggtatatacttcttgacgctggttgcccaggttggcatagtattaggtcgtcgccttccttgtggcagctctttgcccgtttatttaacaataatatatattatatatggtcatgaggaagaggaaatggagacataataactgtgtt

SEQ ID NO: 76361 - DNA, 1944 bp, Zea Mays
atcacagaccgaaaaggaaaatagaggcgagacaaacgagagcgagcgagagagaaacagttcgagctcaccccggcgagagccgactctcaagcgataaggggcgtgggcgtcgtcggcatggagagcgagatggcggaggagtcaccggccgcagtctcagcggcggcggcgcgggcccggccactggaggcggtcgcggaggaagggcaggaggtggcggagcagcacgaggtggcagttggctccaccaagaccatggagcgcgtggcggccgcgaagaagttcatcgaggaccactaccgcgcgcagatgaagaacctccaagagcgcaaggagaggcgcttgattttggaacaacagctagcttcttcacaagttccgagggaggagcagataaacttaataaaggatttggagagaaaggagactgaatacatgagacttaaaagacacagaatttgtgtggatgactttgatctgctcactatcattggaaaaggtgcttatggacaggttcaactatgtcgggaaaaatccactggtaacatttatgccatgaaaaagctgaagaaaactgatatgcttgtgaggggtcaggtggagcatgttagagctgaaagaaacttactggcggaagttggtagccactgcattgtgaagctatattattctttccaagatgctgagtacctctatcttatcatggagtatcttcctggaggtgacatgatgaccctcctgatgagagaggatactctgactgaaaatgtggctcgattctacattgctgagactattcttgccattgaatccattcataaacataactacattcacaggaggtggagaagtccaaatgaacagcttcagcattggcagaacaacaggagaaaattggcattttcaacagtcgggacacctgattatattgctccagaggttctactaaagaagggatatggactagagtgtgactggtggtctcttggtgcaatcatgtatgaaatgcttgttggttatccaccattttattcagatgatccactagttacatgccaaaagattgtgcattggagaagctatttgaattttccagataatccaagattgtctcttgaagcaaaggatctcatttgtcggttattatgtgatgttgatcacagaattggcagcggaggagcagatcaaataaaagctcatccttggtttcgaggagttgaatgggacaagctgtatgagatggaggcagcatttaagcccctagttaatgatgaactggatacacagaatttcatgaagtttccagatttaaaccctgctccagcaagagcaagttctggggcttcaaggaagatgatgcttaattctaaagatcttagctttgtggggtatacatacaagaattttgaggccgtgaaaggtttgcatcagtttgcagatcttcagagaagttcctcatttacaaggcactctgctggctccccatctgatacagcagatatggacgcctcaatggaagctaacgggaccgacacacacatgcgcactggttcagctggcgaccctatggcgccataatctgccctgttgttttcgtgaagtaccctgccctacaccggcatcatgcatgcacctcgacaacatggctacatctgaagagacctggttgtggacttgcatttattcaggtctggtgcccttctactatttggcgagcaccttcgtagttgtacaaaccagaggtatttgtgtagtatgtttcaggtgagacaagttgggcaggtctggccctgggtatatacttcttgacgctggttgcccaggttggcatagtattaggtcgtcgccttccttgtggcagctctttgcccgtttatttaacaataatatatattatatatggtcatgaggaagaggaaatggagacataataactgtgtt

SEQ ID NO: 76362 - DNA, 2121 bp, Zea Mays
atcacagaccgaaaaggaaaatagaggcgagacaaacgagagcgagcgagagagaaacagttcgagctcaccccggcgagagccgactctcaagcgataaggggcgtgggcgtcgtcggcatggagagcgagatggcggaggagtcaccggccgcagtctcagcggcggcggcgcgggcccggccactggaggcggtcgcggaggaagggcaggaggtggcggagcagcacgaggtggcagttggctccaccaagaccatggagcgcgtggcggccgcgaagaagttcatcgaggaccactaccgcgcgcagatgaagaacctccaagagcgcaaggagaggcgcttgattttggaacaacagctagcttcttcacaagttccgagggaggagcagataaacttaataaaggatttggagagaaaggagactgaatacatgagacttaaaagacacagaatttgtgtggatgactttgatctgctcactatcattggaaaaggtgcttatggacaggttcaactatgtcgggaaaaatccactggtaacatttatgccatgaaaaagctgaagaaaactgatatgcttgtgaggggtcaggtggagcatgttagagctgaaagaaacttactggcggaagttggtagccactgcattgtgaagctatattattctttccaagatgctgagtacctctatcttatcatggagtatcttcctggaggtgacatgatgaccctcctgatgagagaggatactctgactgaaaatgtggctcgattctacattgctgagactattcttgccattgaatccattcataaacataactacattcacagagatattaagcctgacaacctacttctagacaagaatggtcatatgaaattgtcagattttggattgtgtaagccaattgattgttcgaagttgtcaacactgaatgaaaatgaaccaatgactgatgaaaaccttagggagtctatggacatcgatcattctctctctgatactgcaaatggtaggaggtggagaagtccaaatgaacagcttcagcattggcagaacaacaggagaaaattggcattttcaacagtcgggacacctgattatattgctccagaggttctactaaagaagggatatggactagagtgtgactggtggtctcttggtgcaatcatgtatgaaatgcttgttggttatccaccattttattcagatgatccactagttacatgccaaaagattgtgcattggagaagctatttgaattttccagataatccaagattgtctcttgaagcaaaggatctcatttgtcggttattatgtgatgttgatcacagaattggcagcggaggagcagatcaaataaaagctcatccttggtttcgaggagttgaatgggacaagctgtatgagatggaggcagcatttaagcccctagttaatgatgaactggatacacagaatttcatgaagtttccagatttaaaccctgctccagcaagagcaagttctggggcttcaaggaagatgatgcttaattctaaagatcttagctttgtggggtatacatacaagaattttgaggccgtgaaaggtttgcatcagtttgcagatcttcagagaagttcctcatttacaaggcactctgctggctccccatctgatatggacgcctcaatggaagctaacgggaccgacacacacatgcgcactggttcagctggcgaccctatggcgccataatctgccctgttgttttcgtgaagtaccctgccctacaccggcatcatgcatgcacctcgacaacatggctacatctgaagagacctggttgtggacttgcatttattcaggtctggtgcccttctactatttggcgagcaccttcgtagttgtacaaaccagaggtatttgtgtagtatgtttcaggtgagacaagttgggcaggtctggccctgggtatatacttcttgacgctggttgcccaggttggcatagtattaggtcgtcgccttccttgtggcagctctttgcccgtttatttaacaataatatatattatatatggtcatgaggaagaggaaatggagacataataactgtgtt

SEQ ID NO: 76363 - DNA, 1649 bp, Zea Mays
atcacagaccgaaaaggaaaatagaggcgagacaaacgagagcgagcgagagagaaacagttcgagctcaccccggcgagagccgactctcaagcgataaggggcgtgggcgtcgtcggcatggagagcgagatggcggaggagtcaccggccgcagtctcagcggcggcggcgcgggcccggccactggaggcggtcgcggaggaagggcaggaggtggcggagcagcacgaggtggcagttggctccaccaagaccatggagcgcgtggcggccgcgaagaagttcatcgaggaccactaccgcgcgcagatgaagaacctccaagagcgcaaggagaggcgcttgattttggaacaacagctagcttcttcacaagttccgagggaggagcagataaacttaataaaggatttggagagaaaggagactgaatacatgagacttaaaagacacagaatttgtgtggatgactttgatctgctcactatcattggaaaaggtgcttatggacaggttcaactatgtcgggaaaaatccactggtaacatttatgccatgaaaaagctgaagaaaactgatatgcttgtgaggggtcaggtggagcatgttagagctgaaagaaacttactggcggaagttggtagccactgcattgtgaagctatattattctttccaagatgctgagtacctctatcttatcatggagtatcttcctggaggtgacatgatgaccctcctgatgagagaggatactctgactgaaaatgtggctcgattctacattgctgagactattcttgccattgaatccattcataaacataactacattcacagagatattaagcctgacaacctacttctagacaagaatggtcatatgaaattgtcagattttggattgtgtaagccaattgattgttcgaagttgtcaacactgaatgaaaatgaaccaatgactgatgaaaaccttagggagtctatggacatcgatcattctctctctgatactgcaaatggtaggaggtggagaagtccaaatgaacagcttcagcattggcagaacaacaggagaaaattggcattttcaacagtcgggacacctgattatattgctccagaggttctactaaagaagggatatggactagagtgtgactggtggtctcttggtgcaatcatgtatgaaatgcttgttggttatccaccattttattcagatgatccactagttacatgccaaaagattgtgcattggagaagctatttgaattttccagataatccaagattgtctcttgaagcaaaggatctcatttgtcggttattatgtgatgttgatcacagaattggcagcggaggagcagatcaaataaaagctcatccttggtttcgaggagttgaatgggacaagctgtatgagatggaggcagcatttaagcccctagttaatgatgaactggatacacagaatttcatgaagtttccagatttaaaccctgctccagcaagagcaagttctggggcttcaaggaagatgatgcttaattctaaagatcttagctttgtggggtatacatacaagaattttgaggccgtgaaaggtttgcatcagtttgcaggtgatctatttctgtactagag

SEQ ID NO: 76364 - DNA, 3249 bp, Zea Mays
taaagatgtgtatgatactgattaatgaggtgcgtcgccttgccatggaggtccggcaacttggtaattcacgttcaataactgttctcaatggaggttctgcacaatcaggagtatcaggcctgatagtacctgcagcaactgtaggagcactgggttacggttatatgtggtggaaggggatctcgttctcagatctaatgtatgtcaccaagcgcaacatggcaaatgctgtttcaagcatgactaaacatttggagcaagtgcaaagttctcttgctgtaagtacttattctttcctaatttatcacaggaactacaccttcaactgcataatgtgtctactatgacttctaggtagtgtttggttgggagacatggtaggatgggacggtcttgtctcattttttagagacgggacgatcctgtctgtttggttgggagagagcaagatgaccccgttttttgttttgtttgaggacataaaaatggaatcagctaaatgacatatgggctccacatgctagtctcttattttccctccttcctctgctttctttcctatgcatgcatctacgagaagcaccactatcccacactgagctcacggtcgagggtcgacattcaaaacagggtgtggagctgtcccattcagcggcaaagctagggcagagctcgcccacacgctgacggagctagcccatgctctggcagagctggaccacgtggctttggcgccaccgtcggagcttggccatgcttggacctcacccctcctcttcctctcctgcatgcaccttatcttccccgcgagcgagctcgttccacctcggacgaccttgtctaagaattttctgagggcggggtgaacccgcatctggaaagaatattccctagtggatcatctgttgggtcctgacaggcggacccagacgctcagtgacatgtgtggagaacaatgcacaacaaaatgttaggtagggagttgtagcgtctatgtgtgtcctgtctgctacaggacgggggtatttatagggcaacctgggggtaggtggtccaaagtacattcgtacccccggttaccaactacattcctagaatatttcgtgcaacgggataattacaacactgcgacaccttttggacacatgcacacacaatcctaccctctagttacactgacaaatgggccctctgggagccccacagtgggccggtgacccggatgggtcttcttccctagagccttcgttgtctcatagccttcgcgtcttggtacccctcgctctaggggggcatagcttttgcagagggccccttggagattcgtgtctggcgaagtccttgacctcaatgtttggcccgagcctaggctctcgcctgggcaccagtcttcgccacggtcggtattagttgcttgaccgaaggctccatcgaagttgcgcctgacgaaggctctgattgtccctgtccctgcgctcaagtatggttagtcaagacgaggggcaaacttgcgcggtgctgattgaggtctggttcgacctctgccccaacatcattccatctcattgtctctgaaccaaatactgtgcgaaggtgggatatcccacttgggttggtctcgtcctcagaaccaaacactaacctagtttgacattctctaaaacgatacttctcaaggtttaaaagtgatagcgtggaatattgtgtgttgtattgtactgagtagcatgattacaatatatatacctctaccagattgtgctccacctgatttatagaaacaatgatcagggagatctcacactaaataggaaacaaccatataggaaagaatcacccattagcgcctaatcaggggcaatcagccaacgcctgatagggaagggtatcacctaattaggggcaatcaatcaacacctaatagggaaggaaacctcctaaacatggaaggaaataagctgtctaacccccccggcagtcgaaacgtcgatggcgcaaacgttaagacaggagcggaactcggagaagacaagtgggcagccccttggtgaagatattcgcacactgagacgtcgttgggacatgaagaacacgaacatcaccaatggcagcgcactcgcggacgaagtggagatcaatctcgatatgcttcgtgcgctgattgacacaatagactaaggagctcttggtcaagtagacaacactgtcattgtcagaataaactaaggagctcttggtcaagggactgtgaagctcctatagtaactgacgcagccaggaagcttcagcgacaccgttagcaaccaccctgtatttagcctctgcactggagctagacatcgtaggctgctgcttggaggaccaggagacgaggttatctccaaggaaaacagcgtaccctgaagtagacctgcgagtattcgggcatccggctcaatcagcatctgtgtagacgagtagagcagaggtcatggatgggcgaaggaggagaccatgactaagtgtcccacgaaggtagcgcaggatatgcttgactgccgagaggtgaatatcccgaggatcatgcatatgaagacacacttgctgaacaacataggagatgtcaggctgggtgaaagtcaagtattgcagagcaccaaccaggctgtgatactgagtggggtcgctgatagtggtaccggtcatggcagagaccttagcatgagtgtcgacaatactgcacggcttgcaatcggacataccagcacgctcaagaatatcgtgagcatactgctgctgtgaaacgaagaggccctctgaatgttgctgaagagccacacctaagaaatgatggaggataccaagatccttcatggagaatgccttttgaagagcacctaatcagggagatctcacactaaataggaaacaaccatataggaaagaattacccattagcacctaatcaggggcaatcaaccaacgcctgatagggaagggtatcacctaattaggggcaatcagtcaacacctaatagggaaggaaacctcctaaacatggatggaaataggttgtctaacaaaaaggcgtcgcctaggcgttcagatgccaaaatattatggacgtcggcgtggccttgacccagaagcttagggcgtccgccttggcgcactaggcgtcgccttcctggcggatgccttatgccctaaaaatctgggcgcggggtggctcctctttggcgtgtattgcctttgatgtgcggaaga

SEQ ID NO: 76365 - DNA, 3331 bp, Zea Mays
ggactgcgctcttgcgccttaacggcggagatactcgacaaggggaagaaggtgaaggatggaggagggggagacggggaaaccgatctcaacgaggctcttacctcgcaggtgcgtcgccttgccatggaggtccggcaacttggtaattcacgttcaataactgttctcaatggaggttctgcacaatcaggagtatcaggcctgatagtacctgcagcaactgtaggagcactgggttacggttatatgtggtggaaggggatctcgttctcagatctaatgtatgtcaccaagcgcaacatggcaaatgctgtttcaagcatgactaaacatttggagcaagtgcaaagttctcttgctgtaagtacttattctttcctaatttatcacaggaactacaccttcaactgcataatgtgtctactatgacttctaggtagtgtttggttgggagacatggtaggatgggacggtcttgtctcattttttagagacgggacgatcctgtctgtttggttgggagagagcaagatgaccccgttttttgttttgtttgaggacataaaaatggaatcagctaaatgacatatgggctccacatgctagtctcttattttccctccttcctctgctttctttcctatgcatgcatctacgagaagcaccactatcccacactgagctcacggtcgagggtcgacattcaaaacagggtgtggagctgtcccattcagcggcaaagctagggcagagctcgcccacacgctgacggagctagcccatgctctggcagagctggaccacgtggctttggcgccaccgtcggagcttggccatgcttggacctcacccctcctcttcctctcctgcatgcaccttatcttccccgcgagcgagctcgttccacctcggacgaccttgtctaagaattttctgagggcggggtgaacccgcatctggaaagaatattccctagtggatcatctgttgggtcctgacaggcggacccagacgctcagtgacatgtgtggagaacaatgcacaacaaaatgttaggtagggagttgtagcgtctatgtgtgtcctgtctgctacaggacgggggtatttatagggcaacctgggggtaggtggtccaaagtacattcgtacccccggttaccaactacattcctagaatatttcgtgcaacgggataattacaacactgcgacaccttttggacacatgcacacacaatcctaccctctagttacactgacaaatgggccctctgggagccccacagtgggccggtgacccggatgggtcttcttccctagagccttcgttgtctcatagccttcgcgtcttggtacccctcgctctaggggggcatagcttttgcagagggccccttggagattcgtgtctggcgaagtccttgacctcaatgtttggcccgagcctaggctctcgcctgggcaccagtcttcgccacggtcggtattagttgcttgaccgaaggctccatcgaagttgcgcctgacgaaggctctgattgtccctgtccctgcgctcaagtatggttagtcaagacgaggggcaaacttgcgcggtgctgattgaggtctggttcgacctctgccccaacatcattccatctcattgtctctgaaccaaatactgtgcgaaggtgggatatcccacttgggttggtctcgtcctcagaaccaaacactaacctagtttgacattctctaaaacgatacttctcaaggtttaaaagtgatagcgtggaatattgtgtgttgtattgtactgagtagcatgattacaatatatatacctctaccagattgtgctccacctgatttatagaaacaatgatcagggagatctcacactaaataggaaacaaccatataggaaagaatcacccattagcgcctaatcaggggcaatcagccaacgcctgatagggaagggtatcacctaattaggggcaatcaatcaacacctaatagggaaggaaacctcctaaacatggaaggaaataagctgtctaacccccccggcagtcgaaacgtcgatggcgcaaacgttaagacaggagcggaactcggagaagacaagtgggcagccccttggtgaagatattcgcacactgagacgtcgttgggacatgaagaacacgaacatcaccaatggcagcgcactcgcggacgaagtggagatcaatctcgatatgcttcgtgcgctgattgacacaatagactaaggagctcttggtcaagtagacaacactgtcattgtcagaataaactaaggagctcttggtcaagggactgtgaagctcctatagtaactgacgcagccaggaagcttcagcgacaccgttagcaaccaccctgtatttagcctctgcactggagctagacatcgtaggctgctgcttggaggaccaggagacgaggttatctccaaggaaaacagcgtaccctgaagtagacctgcgagtattcgggcatccggctcaatcagcatctgtgtagacgagtagagcagaggtcatggatgggcgaaggaggagaccatgactaagtgtcccacgaaggtagcgcaggatatgcttgactgccgagaggtgaatatcccgaggatcatgcatatgaagacacacttgctgaacaacataggagatgtcaggctgggtgaaagtcaagtattgcagagcaccaaccaggctgtgatactgagtggggtcgctgatagtggtaccggtcatggcagagaccttagcatgagtgtcgacaatactgcacggcttgcaatcggacataccagcacgctcaagaatatcgtgagcatactgctgctgtgaaacgaagaggccctctgaatgttgctgaagagccacacctaagaaatgatggaggataccaagatccttcatggagaatgccttttgaagagcacctaatcagggagatctcacactaaataggaaacaaccatataggaaagaattacccattagcacctaatcaggggcaatcaaccaacgcctgatagggaagggtatcacctaattaggggcaatcagtcaacacctaatagggaaggaaacctcctaaacatggatggaaataggttgtctaacaaaaaggcgtcgcctaggcgttcagatgccaaaatattatggacgtcggcgtggccttgacccagaagcttagggcgtccgccttggcgcactaggcgtcgccttcctggcggatgccttatgccctaaaaatctgggcgcggggtggctcctctttggcgtgtattgcctttgatgtgcggaaga

SEQ ID NO: 76366 - DNA, 3741 bp, Zea Mays
agaagagtgtcgcgagggaggggagagggtagcgctcgccgctgcgggagaaagggggagactgcagcccctatccgatgaacagtaatagcgtaggggaggggaagggtgatgcgttgcagtcagtctgaggcggtcgtcttcgtcagagcaggggaaccggctctgacaataggccccaccctcacggcctaacctttctctttctctctctacctcctcgcgcgccctcgtcagaccagccacgcgctcaactccacgggccttgagctagggttttcttcgccgctacctccctacgaggcgggcgtgcagccatggcgctggtgcaggcgggcatgggccttacccgggtcgttatcctcgtcggcgccggcgttgccggctccgtcgtcctccgcaacggccgcctcgccgagatcctcggcgagctccaggagatactcgacaaggggaagaaggtgaaggatggaggagggggagacggggaaaccgatctcaacgaggctcttacctcgcaggtgcgtcgccttgccatggaggtccggcaacttggtaattcacgttcaataactgttctcaatggaggttctgcacaatcaggagtatcaggcctgatagtacctgcagcaactgtaggagcactgggttacggttatatgtggtggaaggggatctcgttctcagatctaatgtatgtcaccaagcgcaacatggcaaatgctgtttcaagcatgactaaacatttggagcaagtgcaaagttctcttgctgtaagtacttattctttcctaatttatcacaggaactacaccttcaactgcataatgtgtctactatgacttctaggtagtgtttggttgggagacatggtaggatgggacggtcttgtctcattttttagagacgggacgatcctgtctgtttggttgggagagagcaagatgaccccgttttttgttttgtttgaggacataaaaatggaatcagctaaatgacatatgggctccacatgctagtctcttattttccctccttcctctgctttctttcctatgcatgcatctacgagaagcaccactatcccacactgagctcacggtcgagggtcgacattcaaaacagggtgtggagctgtcccattcagcggcaaagctagggcagagctcgcccacacgctgacggagctagcccatgctctggcagagctggaccacgtggctttggcgccaccgtcggagcttggccatgcttggacctcacccctcctcttcctctcctgcatgcaccttatcttccccgcgagcgagctcgttccacctcggacgaccttgtctaagaattttctgagggcggggtgaacccgcatctggaaagaatattccctagtggatcatctgttgggtcctgacaggcggacccagacgctcagtgacatgtgtggagaacaatgcacaacaaaatgttaggtagggagttgtagcgtctatgtgtgtcctgtctgctacaggacgggggtatttatagggcaacctgggggtaggtggtccaaagtacattcgtacccccggttaccaactacattcctagaatatttcgtgcaacgggataattacaacactgcgacaccttttggacacatgcacacacaatcctaccctctagttacactgacaaatgggccctctgggagccccacagtgggccggtgacccggatgggtcttcttccctagagccttcgttgtctcatagccttcgcgtcttggtacccctcgctctaggggggcatagcttttgcagagggccccttggagattcgtgtctggcgaagtccttgacctcaatgtttggcccgagcctaggctctcgcctgggcaccagtcttcgccacggtcggtattagttgcttgaccgaaggctccatcgaagttgcgcctgacgaaggctctgattgtccctgtccctgcgctcaagtatggttagtcaagacgaggggcaaacttgcgcggtgctgattgaggtctggttcgacctctgccccaacatcattccatctcattgtctctgaaccaaatactgtgcgaaggtgggatatcccacttgggttggtctcgtcctcagaaccaaacactaacctagtttgacattctctaaaacgatacttctcaaggtttaaaagtgatagcgtggaatattgtgtgttgtattgtactgagtagcatgattacaatatatatacctctaccagattgtgctccacctgatttatagaaacaatgatcagggagatctcacactaaataggaaacaaccatataggaaagaatcacccattagcgcctaatcaggggcaatcagccaacgcctgatagggaagggtatcacctaattaggggcaatcaatcaacacctaatagggaaggaaacctcctaaacatggaaggaaataagctgtctaacccccccggcagtcgaaacgtcgatggcgcaaacgttaagacaggagcggaactcggagaagacaagtgggcagccccttggtgaagatattcgcacactgagacgtcgttgggacatgaagaacacgaacatcaccaatggcagcgcactcgcggacgaagtggagatcaatctcgatatgcttcgtgcgctgattgacacaatagactaaggagctcttggtcaagtagacaacactgtcattgtcagaataaactaaggagctcttggtcaagggactgtgaagctcctatagtaactgacgcagccaggaagcttcagcgacaccgttagcaaccaccctgtatttagcctctgcactggagctagacatcgtaggctgctgcttggaggaccaggagacgaggttatctccaaggaaaacagcgtaccctgaagtagacctgcgagtattcgggcatccggctcaatcagcatctgtgtagacgagtagagcagaggtcatggatgggcgaaggaggagaccatgactaagtgtcccacgaaggtagcgcaggatatgcttgactgccgagaggtgaatatcccgaggatcatgcatatgaagacacacttgctgaacaacataggagatgtcaggctgggtgaaagtcaagtattgcagagcaccaaccaggctgtgatactgagtggggtcgctgatagtggtaccggtcatggcagagaccttagcatgagtgtcgacaatactgcacggcttgcaatcggacataccagcacgctcaagaatatcgtgagcatactgctgctgtgaaacgaagaggccctctgaatgttgctgaagagccacacctaagaaatgatggaggataccaagatccttcatggagaatgccttttgaagagcacctaatcagggagatctcacactaaataggaaacaaccatataggaaagaattacccattagcacctaatcaggggcaatcaaccaacgcctgatagggaagggtatcacctaattaggggcaatcagtcaacacctaatagggaaggaaacctcctaaacatggatggaaataggttgtctaacaaaaaggcgtcgcctaggcgttcagatgccaaaatattatggacgtcggcgtggccttgacccagaagcttagggcgtccgccttggcgcactaggcgtcgccttcctggcggatgccttatgccctaaaaatctgggcgcggggtggctcctctttggcgtgtattgcctttgatgtgcggaaga

SEQ ID NO: 76367 - DNA, 554 bp, Zea Mays
gaaccggctctgacaataggccccaccctcacggcctaacctttctctttctctctctacctcctcgcgcgccctcgtcagaccagccacgcgctcaactccacgggccttgagctagggttttcttcgccgctacctccctacgaggcgggcgtgcagccatggcgctggtgcaggcgggcatgggccttacccgggtcgttatcctcgtcggcgccggcgttgccggctccgtcgtcctccgcaacggccgcctcgccgagatcctcggcgagctccaggagatactcgacaaggggaagaaggtgaaggatggaggagggggagacggggaaaccgatctcaacgaggctcttacctcgcaggtgcgtcgccttgccatggaggtccggcaacttggtaattcacgttcaataactgttctcaatggaggttctgcacaatcaggagtatcaggcctgatagtacctgcagcaactgtaggagcactgggttacggttatatgtggtggaaggatctgtctgctttctcctacattctaatcattttgtcg

SEQ ID NO: 76368 - DNA, 472 bp, Zea Mays
gaaccggctctgacaataggccccaccctcacggcctaacctttctctttctctctctacctcctcgcgcgccctcgtcagaccagccacgcgctcaactccacgggccttgagctagggttttcttcgccgctacctccctacgaggcgggcgtgcagccatggcgctggtgcaggcgggcatgggccttacccgggtcgttatcctcgtcggcgccggcgttgccggctccgtcgtcctccgcaacggccgcctcgccgagatcctcggcgagctccaggagatactcgacaaggggaagaaggtgaaggatggaggagggggagacggggaaaccgatctcaacgaggctcttacctcgcaggtgcgtcgccttgccatggaggtccggcaacttggtaattcacgttcaataactgttctcaatggaggttctgcacaatcagcatattagcgtattagcctatatgc

SEQ ID NO: 76369 - DNA, 1636 bp, Zea Mays
gtcctcactcctctccggctctccccttctcgccaaaggggaagccctgcccgtacttccgttgcggcgctacgagcttcgacgggcctcgatctccacctctgaagtgactacttgtgatctagatctgaagctgtagtggtcagcagcttagtgtgaatcgaagatgagcgtggtggggttcgacctcggcaatgagagctgtatcgtggcggttgcgcggcagcgtggcatcgacgtggttctcaacgaggagtccaagcgcgagacacccgccatcgtttgcttcggggacaagcagcggttcatcggcaccgccggcgccgcgtcctccaccatgaaccccaaaaactccatctctcagattaagcgcctgctcggccgcaagttctcagatcccgagctgcagcgcgatctcgcctccttcccattccgagtcacggagggccccgatggttttcccctggtccatgtacggtacctgggcgaggagcggacgttcacctccacccagctgcttgccatggtgctgtccaatttgaagggcattgctgagggtaacctgaatgccgcagttgttgattgttgcattggtatcccggtctacttcacagatctgcagcgcagggctgttcttgatgctgctactattgcgggtctccggccattgcgattgttccatgagacgacagccactgctctggcatatggtatttataagactgatctcccagagaatgaccagttgaatgttgcatttgtcgatatcggtcatgcaagcatgcaggttagtgttgtcggttacaggaagggacagctcaagatgttgtcccatacatacgaccggtctcttggtgggagggacttcgatgaggccctgtttaagcactttgcagctaaatttaaagaggaatataagattgatgtgtaccagaatgcgcgggcatgtattaggttgcgtgtggcatgtgagaaacttaagaaggtgctgagtgccaacccagaggccccactgaacattgagtgcttgatggatgaaaaggatgtgcggggttttatcaagagggaggagtttgaacagatcagtgcctctgtgctggaacgcgtgaaagggccactggagaaggccttggctgaagctgggttgactactgaaaatgtgcactttgttgaggttgtcggatctggttctcgtgttccggctataatcaagataattactgatttttttgggaaggaaccaagacgtaccatgaatgcaagcgagtgtgttgcgcgaggatgcgctcttcaatgtgctattctcagccccactttcaaagtgcgagaattccagattggccctttccaaacctccaacggagagaaggccaaactgaaagtgaaagtgcgtctcaacatccatgggaccgttacagttgattcggtgataatgctggaggaggatgtggaagttccagtctcatctgcaaatgaagctccaaacgatactatgaagatggacacagatgatgtgccaagtgatcctgctgctggatctgatgtgactatgcaggagcagcctcctgcagctggaaatggagcacaagataatgaggaaaagtctgtttcgatggaaactgatgcaaaggtatgg

SEQ ID NO: 76370 - DNA, 1874 bp, Zea Mays
ggccaatccgcggcacacaccgtatatcactgcgtcctcactcctctccggctctccccttctcgccaaaggggaagccctgcccgtacttccgttgcggcgctacgagcttcgacgggcctcgatctccacctctgaagtgactacttgtgatctagatctgaagctgtagtggtcagcagcttagtgtgaatcgaagatgagcgtggtggggttcgacctcggcaatgagagctgtatcgtggcggttgcgcggcagcgtggcatcgacgtggttctcaacgaggagtccaagcgcgagacacccgccatcgtttgcttcggggacaagcagcggttcatcggcaccgccggcgccgcgtcctccaccatgaaccccaaaaactccatctctcagattaagcgcctgctcggccgcaagttctcagatcccgagctgcagcgcgatctcgcctccttcccattccgagtcacggagggccccgatggttttcccctggtccatgtacggtacctgggcgaggagcggacgttcacctccacccagctgcttgccatggtgctgtccaatttgaagggcattgctgagggtaacctgaatgccgcagttgttgattgttgcattggtatcccggtctacttcacagatctgcagcgcagggctgttcttgatgctgctactattgcgggtctccggccattgcgattgttccatgagacgacagccactgctctggcatatggtatttataagactgatctcccagagaatgaccagttgaatgttgcatttgtcgatatcggtcatgcaagcatgcaggttagtgttgtcggttacaggaagggacagctcaagatgttgtcccatacatacgaccggtctcttggtgggagggacttcgatgaggccctgtttaagcactttgcagctaaatttaaagaggaatataagattgatgtgtaccagaatgcgcgggcatgtattaggttgcgtgtggcatgtgagaaacttaagaaggtgctgagtgccaacccagaggccccactgaacattgagtgcttgatggatgaaaaggatgtgcggggttttatcaagagggaggagtttgaacagatcagtgcctctgtgctggaacgcgtgaaagggccactggagaaggccttggctgaagctgggttgactactgaaaatgtgcactttgttgaggttgtcggatctggttctcgtgttccggctataatcaagataattactgatttttttgggaaggaaccaagacgtaccatgaatgcaagcgagtgtgttgcgcgaggatgcgctcttcaatgtgctattctcagccccactttcaaagtgcgagaattccaggtcaatgatgggtttcctttctcaattgcattgtcatggaatggagactcccagaatgcaccccaacaaacccttgtattccaaaaggggaatgcaattcctagcactaaagctcttaccatctttaaatccagcacatttgaagttgatgttttgtatgtcgacccagataactcacaaattccacaaaaaataagcacttacacaattggccctttccaaacctccaacggagagaaggccaaactgaaagtgaaagtgcgtctcaacatccatgggaccgttacagttgattcggtgaatgctggaggaggatgtggaagttccagtctcatctgcaaatgaagctccaaacgatactatgaagatggacacagatgatgtgccaagtgatcctgctgctggatctgatgtgactatgcaggagcagcctcctgcagctggaaatggagcacaagataatgaggaaaagtctgtttcgatggaaactgatgcaaaggtatgg

SEQ ID NO: 76371 - DNA, 1880 bp, Zea Mays
cgtctacattggccaatccgcggcacacaccgtatatcactgcgtcctcactcctctccggctctccccttctcgccaaaggggaagccctgcccgtacttccgttgcggcgctacgagcttcgacgggcctcgatctccacctctgaagtgactacttgtgatctagatctgaagctgtagtggtcagcagcttagtgtgaatcgaagatgagcgtggtggggttcgacctcggcaatgagagctgtatcgtggcggttgcgcggcagcgtggcatcgacgtggttctcaacgaggagtccaagcgcgagacacccgccatcgtttgcttcggggacaagcagcggttcatcggcaccgccggcgccgcgtcctccaccatgaaccccaaaaactccatctctcagattaagcgcctgctcggccgcaagttctcagatcccgagctgcagcgcgatctcgcctccttcccattccgagtcacggagggccccgatggttttcccctggtccatgtacggtacctgggcgaggagcggacgttcacctccacccagctgcttgccatggtgctgtccaatttgaagggcattgctgagggtaacctgaatgccgcagttgttgattgttgcattggtatcccggtctacttcacagatctgcagcgcagggctgttcttgatgctgctactattgcgggtctccggccattgcgattgttccatgagacgacagccactgctctggcatatggtatttataagactgatctcccagagaatgaccagttgaatgttgcatttgtcgatatcggtcatgcaagcatgcaggttagtgttgtcggttacaggaagggacagctcaagatgttgtcccatacatacgaccggtctcttggtgggagggacttcgatgaggccctgtttaagcactttgcagctaaatttaaagaggaatataagattgatgtgtaccagaatgcgcgggcatgtattaggttgcgtgtggcatgtgagaaacttaagaaggtgctgagtgccaacccagaggccccactgaacattgagtgcttgatggatgaaaaggatgtgcggggttttatcaagagggaggagtttgaacagatcagtgcctctgtgctggaacgcgtgaaagggccactggagaaggccttggctgaagctgggttgactactgaaaatgtgcactttgttgaggttgtcggatctggttctcgtgttccggctataatcaagataattactgatttttttgggaaggaaccaagacgtaccatgaatgcaagcgagtgtgttgcgcgaggatgcgctcttcaatgtgctattctcagccccactttcaaagtgcgagaattccaggtcaatgatgggtttcctttctcaattgcattgtcatggaatggagactcccagaatgcaccccaacaaacccttgtattccaaaaggggaatgcaattcctagcactaaagctcttaccatctttaaatccagcacatttgaagttgatgttttgtatgtcgacccagataactcacaaattccacaaaaaataagcacttacacaattggccctttccaaacctccaacggagagaaggccaaactgaaagtgaaagtgcgtctcaacatccatgggaccgttacagttgattcgatgctggaggaggatgtggaagttccagtctcatctgcaaatgaagctccaaacgatactatgaagatggacacagatgatgtgccaagtgatcctgctgctggatctgatgtgactatgcaggagcagcctcctgcagctggaaatggagcacaagataatgaggaaaagtctgtttcgatggaaactgatgcaaaggtatgg

SEQ ID NO: 76372 - DNA, 1957 bp, Zea Mays
ggaagagaacgtcatcgtcttgtaccctgtcatcccatcgagaaagccctagggttaatgatgggtttcctttctcaattgcattgtcatggaaacaagactcgcagaacagtgcaccccaacagacccttgtatttccaaaggggaatgtaattcccagcattaaagctctaaccttctataaatccagtacatttgaagttgatgttttgtatgtggacacatgcgactcgcaaattccacagaagataagcacttacacaattggacctttccaaccctccaaaggtgagagggccaaactgaaagttaaagtgcgtctcaacatccacgggattgtcacagttgattcagctatgatgctggaggaggatgtggcagttccagtctcatctgctaatgaagctccaaaggatactacaaagatggacacagatgatgcaccaagtgatcctgtctctggaactgatgtgaatgtgcatgagcctgatactactgaggctgctcctgcagctgaaaatggaacacaaaatcccgaggaaaaatctgttccaatggaaactgatgcaaaggttgagccatcaaaaaggaaagttaagagaacttctgttccggtccatgcgttggtctatggtgccttggctgcagctgacctgcagaaggctgtagagaaagagtatgagatggctcttcaggacagagtaatggaagaaaccaaagagaagaaaaatgctgtggaagcttatgtctatgacatgcgtaacaagctctacgacaggtacaacgattttgtgacacctgaggagaaggaagggttgattggaaagcttcaggaggttgaagattggctatatgaagatggtgaggatgagacaaagggagtctatatttctaaactggaagatcttaagaagattggtgacccaattgaggcacggtacaaggagtcgacagaaaggggttcctctgtagatcaactggtctactgcatcaacagtttcagagaggctgctttgtccagtgaccaaaagtttggccatatcgacatatctgagaaacagaaggtcatcaatgagtgctctgaagtagagaactggttgagagagaggaagcagcagcaggacgccctacctaagcacaccgatcctgtgctgctcgtatcagatctgaagaagaaagctgaagcacttgacaggttctgcaaaccgatcatgactaaaccaaagccagctccgaagccacagactccgccaccacatactccacctccacagcctgaagcccaagcatctgaccctcaaacaccagaacaacaacaaagcgggactggtgcagctggtgagccgggtagtgagggaggtgtgcagcaggcctccggtgagcaaatggacatggacaggcccgatgattctgcggatgttgcggcataattgtggttgtggttgtcatctgtcttatgatcgatcaaaattttctgtttgtctggtaggtggatgagttaaggcaacagcatattctcccaagcgatttcgttttagggtttggaacattgagattgaggtaatgcgtcttgtccagcgttgttttggtctggactgtgaatcagaatagaaacgttgcatgatcgaattgcgccattagatctcataatcaaaaaacgtggatgattcgacaaaaggtatatttatctggatgtttcatgttaattcatgtcacatggattccttcagttatgctgtgtcctgttcctttgaatgctccaaagaacacaaaaggctattggtttctaaacgcttttgtgcgggtataattaaagcagccttttacttgttgcagtctcttgtaaggtgtgtgaactgcttcctcagccccgtcctaaaaaataaagtgctcacttatcgaaaagttttaaatcgcgagatacgcccgaatctcgaaaaaaggcaaaaaaaaaaaa

SEQ ID NO: 76373 - DNA, 3685 bp, Zea Mays
atctctggcaactcctagaacgttcacggccacaccgccacacccacaccacacagcagtgcagcacggcgccccgcccctcgtactcggtgagatatatccccgccttccctcgcgaaagctctcgtagagacgacgacgacgacgacgacgacgacgacgcgagaagtcgaggcgccgctgcttgctaggaccgagcttcaggaagtctccaacggccccggcgccggcacggcctgccccgcgccgccacagggattgattgtgatcagatctattctgtagtggtcagcggctgagggtgaaccgaagatgagcgttgtgggattcgatctcggcaatgagagctgcattgtggcagtcgcgcggcagcgcggcatcgacgtggtcctcaacgatgagtccaaacgcgagacacccgccatcgtctgcttcggggacaagcagcggttcatcggtacggcgggcgccgcgtcctcaaccatgaaccccaaaaactccatttctcagatcaagcgcctgctcggccgcaagttctccgaccccgagctccagagtgatctcgcgtccttcccgttccgtgtcacggagggccccgatggatttcccttggtacatgtgcggttcctgggcgaggagcggacgtttacccccacccagctgcttgccatggtgctgtccaatctgaagggcattgctgaggggaaccttaagactgcggttgttgattgctgcattggcatccctgtgtacttcagtgatttgcagcgcagggctgttcttgatgctgctactattgcaggcctcacgccgttgcagctatttcatgagacaactgccacggcattggcttatggcatttataagactgacctcccggagcatgaccagctaaacgttgcatttgttgatgtcggccatgctagcttgcaggtcagcattgtcggttacaagaagggacagctcaagatgctttcgcatgcatatgaccgttctcttggtgggagggacttcgatgaggccctcttcaagcacttcgcggcgaagttcaaagaagaatataagattgatgtttaccagaatgcccgtgcatgccttaggttgcgtgtggcgtgtgagaagcttaagaagatgctgagcgccaacccagaggccccactgaacattgagtgcttgatggatgagaaagatgtgagagggtttattaagagagaggagtttgaacacatcagtgcacctgtgctggtacgtgtcaaaggacccttggagaaggccttggctgaagctggcttgacaactgaaaatgtgcactttgttgaggttgtcggatctggttctcgtgttccagccataatcaagataatcactgatttttttgggaaggagccgagacgaaccatgaatgcaagcgagtgtgttgcgcggggctgtgctctccagtgtgctattctcagccccactttcaaagtgcgggaattccaggttaatgatgggtttcctttctcaattgcattgtcatggaaacaagactcgcagaacagtgcaccccaacagacccttgtatttccaaaggggaatgtaattcccagcattaaagctctaaccttctataaatccagtacatttgaagttgatgttttgtatgtggacacatgcgactcgcaaattccacagaagataagcacttacacaattggacctttccaaccctccaaaggtgagagggccaaactgaaagttaaagtgcgtctcaacatccacgggattgtcacagttgattcagctatgatgctggaggaggatgtggcagttccagtctcatctgctaatgaagctccaaaggatactacaaagatggacacagatgatgcaccaagtgatcctgtctctggaactgatgtgaatgtgcatgagcctgatactactgaggctgctcctgcagctgaaaatggaacacaaaatcccgaggaaaaatctgttccaatggaaactgatgcaaaggtgtgatatattcttcacaaattttggaaaatcctattttgtttgcagcatgctgatggatttgatgattgttgcgaccttccataatggggtttttctgtttattctgactgcttgtcgtcttgagatggcataacaggaggtcaattttggaggctatcattcttgttgtgatcatgtgttagaaatttacggattagtttcatgcaagttatatacttgctctcttgttaggttcatgaatgctttggatgagaagttagtaatttgttgatttgcttcttatatattttatttaggttgagccatcaaaaaggaaagttaagagaacttctgttccggtccatgcgttggtctatggtgccttggctgcagctgacctgcagaaggctgtagagaaagagtatgagatggctcttcaggacagagtaatggaagaaaccaaagagaagaaaaatgctgtggaagcttatgtctatgacatgcgtaacaagctctacgacaggtacaacgattttgtgacacctgaggagaaggaagggttgattggaaagcttcaggaggttgaagattggctatatgaagatggtgaggatgagacaaagggagtctatatttctaaactggaagatcttaagaagattggtgacccaattgaggcacggtacaaggagtcgacagaaaggggttcctctgtagatcaactggtctactgcatcaacagtttcagagaggctgctttgtccagtgaccaaaagtttggccatatcgacatatctgagaaacagaaggtcatcaatgagtgctctgaagtagagaactggttgagagagaggaagcagcagcaggacgccctacctaagcacaccgatcctgtgctgctcgtatcagatctgaagaagaaagctgaagcacttgacaggttctgcaaaccgatcatgactaaaccaaagccagctccgaagccacagactccgccaccacatactccacctccacagcctgaagcccaagcatctgaccctcaaacaccagaacaacaacaaagcgggactggtgcagctggtgagccgggtagtgagggaggtgtgcagcaggcctccggtgagcaaatggacatggacaggcccgatgattctgcggatgttgcggcataattgtggttgtggttgtcatctgtcttatgatcgatcaaaattttctgtttgtctggtaggtggatgagttaaggcaacagcatattctcccaagcgatttcgttttagggtttggaacattgagattgaggtaatgcgtcttgtccagcgttgttttggtctggactgtgaatcagaatagaaacgttgcatgatcgaattgcgccattagatctcataatcaaaaaacgtggatgattcgacaaaaggtatatttatctggatgtttcatgttaattcatgtcacatggattccttcagttatgctgtgtcctgttcctttgaatgctccaaagaacacaaaaggctattggtttctaaacgcttttgtgcgggtataattaaagcagccttttacttgttgcagtctcttgtaaggtgtgtgaactgcttcctcagccccgtcctaaaaaataaagtgctcacttatcgaaaagttttaaatcgcgagatacgcccgaatctcgaaaaaaggcaaaaaaaaaaaa

SEQ ID NO: 76374 - DNA, 2162 bp, Zea Mays
agtatctctggcaactcctagaacgttcacggccacaccgccacacccacaccacacagcagtgcagcacggcgccccgcccctcgtactcggtgagatatatccccgccttccctcgcgaaagctctcgtagagacgacgacgacgacgacgacgacgacgacgcgagaagtcgaggcgccgctgcttgctaggaccgagcttcaggaagtctccaacggccccggcgccggcacggcctgccccgcgccgccacaggttaatgatgggtttcctttctcaattgcattgtcatggaaacaagactcgcagaacagtgcaccccaacagacccttgtatttccaaaggggaatgtaattcccagcattaaagctctaaccttctataaatccagtacatttgaagttgatgttttgtatgtggacacatgcgactcgcaaattccacagaagataagcacttacacaattggacctttccaaccctccaaaggtgagagggccaaactgaaagttaaagtgcgtctcaacatccacgggattgtcacagttgattcagctatgatgctggaggaggatgtggcagttccagtctcatctgctaatgaagctccaaaggatactacaaagatggacacagatgatgcaccaagtgatcctgtctctggaactgatgtgaatgtgcatgagcctgatactactgaggctgctcctgcagctgaaaatggaacacaaaatcccgaggaaaaatctgttccaatggaaactgatgcaaaggttgagccatcaaaaaggaaagttaagagaacttctgttccggtccatgcgttggtctatggtgccttggctgcagctgacctgcagaaggctgtagagaaagagtatgagatggctcttcaggacagagtaatggaagaaaccaaagagaagaaaaatgctgtggaagcttatgtctatgacatgcgtaacaagctctacgacaggtacaacgattttgtgacacctgaggagaaggaagggttgattggaaagcttcaggaggttgaagattggctatatgaagatggtgaggatgagacaaagggagtctatatttctaaactggaagatcttaagaagattggtgacccaattgaggcacggtacaaggagtcgacagaaaggggttcctctgtagatcaactggtctactgcatcaacagtttcagagaggctgctttgtccagtgaccaaaagtttggccatatcgacatatctgagaaacagaaggtcatcaatgagtgctctgaagtagagaactggttgagagagaggaagcagcagcaggacgccctacctaagcacaccgatcctgtgctgctcgtatcagatctgaagaagaaagctgaagcacttgacaggttctgcaaaccgatcatgactaaaccaaagccagctccgaagccacagactccgccaccacatactccacctccacagcctgaagcccaagcatctgaccctcaaacaccagaacaacaacaaagcgggactggtgcagctggtgagccgggtagtgagggaggtgtgcagcaggcctccggtgagcaaatggacatggacaggcccgatgattctgcggatgttgcggcataattgtggttgtggttgtcatctgtcttatgatcgatcaaaattttctgtttgtctggtaggtggatgagttaaggcaacagcatattctcccaagcgatttcgttttagggtttggaacattgagattgaggtaatgcgtcttgtccagcgttgttttggtctggactgtgaatcagaatagaaacgttgcatgatcgaattgcgccattagatctcataatcaaaaaacgtggatgattcgacaaaaggtatatttatctggatgtttcatgttaattcatgtcacatggattccttcagttatgctgtgtcctgttcctttgaatgctccaaagaacacaaaaggctattggtttctaaacgcttttgtgcgggtataattaaagcagccttttacttgttgcagtctcttgtaaggtgtgtgaactgcttcctcagccccgtcctaaaaaataaagtgctcacttatcgaaaagttttaaatcgcgagatacgcccgaatctcgaaaaaaggcaaaaaaaaaaaa

SEQ ID NO: 76375 - DNA, 3284 bp, Zea Mays
cagacgaaagaatgaacagaacctgggccaacacgtcagtccgaagaacgaacagtatctctggcaactcctagaacgttcacggccacaccgccacacccacaccacacagcagtgcagcacggcgccccgcccctcgtactcggtgagatatatccccgccttccctcgcgaaagctctcgtagagacgacgacgacgacgacgacgacgacgacgcgagaagtcgaggcgccgctgcttgctaggaccgagcttcaggaagtctccaacggccccggcgccggcacggcctgccccgcgccgccacagggattgattgtgatcagatctattctgtagtggtcagcggctgagggtgaaccgaagatgagcgttgtgggattcgatctcggcaatgagagctgcattgtggcagtcgcgcggcagcgcggcatcgacgtggtcctcaacgatgagtccaaacgcgagacacccgccatcgtctgcttcggggacaagcagcggttcatcggtacggcgggcgccgcgtcctcaaccatgaaccccaaaaactccatttctcagatcaagcgcctgctcggccgcaagttctccgaccccgagctccagagtgatctcgcgtccttcccgttccgtgtcacggagggccccgatggatttcccttggtacatgtgcggttcctgggcgaggagcggacgtttacccccacccagctgcttgccatggtgctgtccaatctgaagggcattgctgaggggaaccttaagactgcggttgttgattgctgcattggcatccctgtgtacttcagtgatttgcagcgcagggctgttcttgatgctgctactattgcaggcctcacgccgttgcagctatttcatgagacaactgccacggcattggcttatggcatttataagactgacctcccggagcatgaccagctaaacgttgcatttgttgatgtcggccatgctagcttgcaggtcagcattgtcggttacaagaagggacagctcaagatgctttcgcatgcatatgaccgttctcttggtgggagggacttcgatgaggccctcttcaagcacttcgcggcgaagttcaaagaagaatataagattgatgtttaccagaatgcccgtgcatgccttaggttgcgtgtggcgtgtgagaagcttaagaagatgctgagcgccaacccagaggccccactgaacattgagtgcttgatggatgagaaagatgtgagagggtttattaagagagaggagtttgaacacatcagtgcacctgtgctggtacgtgtcaaaggacccttggagaaggccttggctgaagctggcttgacaactgaaaatgtgcactttgttgaggttgtcggatctggttctcgtgttccagccataatcaagataatcactgatttttttgggaaggagccgagacgaaccatgaatgcaagcgagtgtgttgcgcggggctgtgctctccagtgtgctattctcagccccactttcaaagtgcgggaattccaggttaatgatgggtttcctttctcaattgcattgtcatggaaacaagactcgcagaacagtgcaccccaacagacccttgtatttccaaaggggaatgtaattcccagcattaaagctctaaccttctataaatccagtacatttgaagttgatgttttgtatgtggacacatgcgactcgcaaattccacagaagataagcacttacacaattggacctttccaaccctccaaaggtgagagggccaaactgaaagttaaagtgcgtctcaacatccacgggattgtcacagttgattcagctatgatgctggaggaggatgtggcagttccagtctcatctgctaatgaagctccaaaggatactacaaagatggacacagatgatgcaccaagtgatcctgtctctggaactgatgtgaatgtgcatgagcctgatactactgaggctgctcctgcagctgaaaatggaacacaaaatcccgaggaaaaatctgttccaatggaaactgatgcaaaggttgagccatcaaaaaggaaagttaagagaacttctgttccggtccatgcgttggtctatggtgccttggctgcagctgacctgcagaaggctgtagagaaagagtatgagatggctcttcaggacagagtaatggaagaaaccaaagagaagaaaaatgctgtggaagcttatgtctatgacatgcgtaacaagctctacgacaggtacaacgattttgtgacacctgaggagaaggaagggttgattggaaagcttcaggaggttgaagattggctatatgaagatggtgaggatgagacaaagggagtctatatttctaaactggaagatcttaagaagattggtgacccaattgaggcacggtacaaggagtcgacagaaaggggttcctctgtagatcaactggtctactgcatcaacagtttcagagaggctgctttgtccagtgaccaaaagtttggccatatcgacatatctgagaaacagaaggtcatcaatgagtgctctgaagtagagaactggttgagagagaggaagcagcagcaggacgccctacctaagcacaccgatcctgtgctgctcgtatcagatctgaagaagaaagctgaagcacttgacaggttctgcaaaccgatcatgactaaaccaaagccagctccgaagccacagactccgccaccacatactccacctccacagcctgaagcccaagcatctgaccctcaaacaccagaacaacaacaaagcgggactggtgcagctggtgagccgggtagtgagggaggtgtgcagcaggcctccggtgagcaaatggacatggacaggcccgatgattctgcggatgttgcggcataattgtggttgtggttgtcatctgtcttatgatcgatcaaaattttctgtttgtctggtaggtggatgagttaaggcaacagcatattctcccaagcgatttcgttttagggtttggaacattgagattgaggtaatgcgtcttgtccagcgttgttttggtctggactgtgaatcagaatagaaacgttgcatgatcgaattgcgccattagatctcataatcaaaaaacgtggatgattcgacaaaagtctcttgtaaggtgtgtgaactgcttcctcagccccgtcctaaaaaataaagtgctcacttatcgaaaagttttaaatcgcgagatacgcccgaatctcgaaaaaaggcaaaaaaaaaaaa

SEQ ID NO: 76376 - DNA, 2240 bp, Zea Mays
cgtacggttcctcctcctcggcacctcccgtgtgcaagtggcagggccagacacggcgggggccccggcattactcccccgccataaattctccgccgccgcacaaggcagaacggaagaggtgtccccgctccgcgcccagcggtaaccccacccaacccctgtgagctgtgacacagctgtactcctctccccactccaggcgctcacactcacatccccttccctccacaggaatccgccgccacaatcccctccgctccacattgtgggattgagccgaacacaagcaccctcctccccgaaacctcttctttgccctgctttcggtggtatggtgcgatgatgactagggaggctgtgctgttgtccctcctcttctgcctcgccgctgccggcgaggcagtgtcactggtgagccagggcgaggcggcggagctggcggtgtcggtggacccgtcgtggcgcttccccagccagcggctgcgggacgcgtacttggcgctgcagacgtggaagcagcaggccatcttctccgaccccaggggcttcaccgccgactgggtgggcccgggggtctgcaactacactggggtcttctgcgcgccgctgccgcggggggtgccgggcgccggggagctctccgtcgcgggcgtcgacctcaaccacggcgacatcgcgggctacctcccgacggagctcggcctcctcgccgacctctcgctgctccacctcaactccaaccgtttctgcggcctcgtgcccgccacgctccgccggctccgcctcctcgtcgagctcgacctcagcaacaaccgcctcgtcgggccgttcccggccgtcgttctcgacctcccggcgctcaagttcctcgacctccgcttcaacgaattcgagggcgccatcccgccggagctcttcgaccgcccgctcgacgccatcttcctcaaccacaaccgcctccgctcgccgctccccgacaacttgggcaactcgccggcctccgtcatcgtgctcgccgacaacagctttggcggatgcctcccggccagcatcggcaacatgtccggcacgctcaacgagatcctcctcatcaacgacggtctcgactcctgcgtcccgccagagcaggtggccgggatgcgcaaggtggagcagctggacgtcgcgcacaaccgcctgtcggggtccgtcccggaggccatctgcgaccttccgcgcctcaagaacctcaccatcgcatacaacttcttcaccggcgagccgccgtcctgcgcgcgcgtggtgccacgaggcggcgacacgaagaattgcctacccagccgccccgcgcagcgcacgccgcagcagtgcgccgcgttctactcgcagccgcccgtcgactgcgcctctttccagtgcaagccgtttgtccctgttccgccattgccgccgccgccgccatcgtaccccggccccttgccaccggtataccccatgccgtacgcatcgcctccgccacctgcgcattaccgatgattcgctgcgggagagaagcaatatcactttcaccttaaattcgccaccgccgctgcgctggacaaagttcgccgtcacaattgtatgtggtcagtcattgttgtgcttagattagtagtgttcttgattgatagctactggcatatagaagtttattattataaggtgcatatatcgtccttgcttttgcattggtcgttctctgtttttcgcgtcgatcggggtttgcgtcacggtgatggtgaaatagatggtcagatggaggtgaaaaggattggagggaacaatttgagtttggattgattgctaattggctgactgcttgagagagaggtcaggatgacgaggaggattggttggtgacttggcgccaccttgggcctcggatgtatagggggaattgagcataagttcttcagttaagctactgctttcagttgggagcccggagataagttttcagaccaaggaatgtaccccacttaactattctttttgcatttttatgtctcagctacttactgttaatcgattgttatgatatatctgtttcgattcttagaaggttttggtcctttgcttgctacttagtgttgtatggttcacgtatttgtaacgtgaacgacaatattcgtttaagtccaaccgtaattggatatctttgataccgtgctattcaattcgtgaaccaaacgacatgttactatatattttcagttggg

SEQ ID NO: 76377 - DNA, 1201 bp, Zea Mays
ctgtcttattgtgatattgtcgattgtgtctagcatctgctactatgttatctagaaaagccaaaacctcttataatttggaatggagggagtgtatgttgtcatgctagatgtttggtttagggcatcataaaaaagccactactgggttgttcttgttcttttttcaaaatagagcgctgctacacgtacgactctactggtagactcaggagattgagagtgaagatgatggccttgatgatgaggttgatgatgacgctgatgaggaccatgaggataaagcagatgatgctgtccctgctgaaccaaccgtgaagaatgcgacagctccacctgcaccacccaaagatactgaaagacaactttccaagaaggaattgaagaaaaaggaactcgctgaacttgatgctgttctggctgagttgggccttggcacatcaaacaattccatacaagaggaacccaatggtaagaaaggtgcagatcaagttgcagatggagagaaaaaggaagatgcacctgctcctctagaaagcaagaactcaaagaagaagaaatctaagaaagaaaagtcttcaaaggagctaaaggaagcgcaggatcaagccaatgggttggaagcagcagctgttgcagaacctgatgaagatacagcctctgtggatgtcaaggagcgcataaagaaggtagcctcgatgaagaaaaagaagtcaagcaaagagatggacgctgcggcaaagattgctgcatccgaggccgcagcgaggagtgcccggcttgccgctgcaaagaagaaagagaagagccactacaaccagcagcctgtgcggtgaactcccctgatctgaggccgcagcgaggagtgcccggcttgccgctgcaaagaagaaagagaagagccactacaaccagcagcctgtgcggtgaactcccctggtctggtgtctctagaaaccttttgagctctgatgtcccctgttcgttttggacctgcaataaaacttttgagactgttttttgacatggtggaggtgccgtctgatgctcgttttgggaattaaattacatataggtacataggggttgtcttgtcgctggattctgtttggtgtaatgagctatgaactgttcgtcaatcgtcatatgaaccctgctgactatttatatggaaaatgtgggatatttgatacctaactaa

SEQ ID NO: 76378 - DNA, 3266 bp, Zea Mays
atttagtgtctgtctagtcgcatggtgtgcaacgttatccagtagaggtctgagttggcgtgagatagtaacaacgcacatgtaaccttctatctgcgttatgcaagagaaggttattgtaaatagaataaatctattgttgacctagtaatctctcagtatatgtaaatagttaaataaatagattataaagcacatggaacacacaaagcaatgggtttaagtattcaagaggctaaataacatattatcaccacatatcatgcagcggatcggtgatgccttacatgtaaggaaaacatgctaatgcaactgctacctataaagtgttctgtcaacgtgtaagcaaaggaaggtgatgtaagtgttacctactacctataaaatgttctctcaacgaagctaatccaagtggcgatatcaacactacttatatagaaataaacataacataatgcacatgcaagacataaactaagtggtacaataaaatgttagtcttcacaaatcatgcagcggacaaatagtcttacacgtatggagaacaggctttggcaagtgccaattacctcgttggatgaagtctctaaggatcagtgctattattccacacatttcaacccaaaaaggtgttgtcatatagtattcaaaacacaacttcagtccttttatacaccaataatgcaataaattcgcaaaacatgttggagcagaagctatgagaaggattacctttgtgtatcaacatattacttagacgttgccttttgacgtactttgtctgcagcaagtgatattaacaagctgtaacagaacaagagaaggggagatttggagaaaatatagaagcaaatagtagaattgtcatccgaccagattatttaaaaaacaaacaaggggatagtaggatgtgtaacccaccaagtcggacatgtggaattattacctgtccttgcaaattatttttttacatgtatgtatgtacacacaattcagacctgtggaattataatttattgctgcaaattaatcttttgacatgtatgaatggcacttctgttgctttcttttctgtcaagagcagctactatggagagtatataaatctagttgtcctacattaagagaaaaatgaaatatgaagggttatcttatattagaaaaaagtggcatatggtatccttccacttttattagatatatgcataactgcaaaacaaggagcaaagcacgaatgtgtgagaacaaaataacaatatatctaaaatagggcgagagcaagagatgtgtgctgatgcaatggtccaatttagacctgggtaatccttccaggtttctgcctggctgtgtcataacctgctatcaagctgaatgggacggatggctcatgatgccaacacagagagacaaattgggctataaaagtttgaggtgatttggcgctagactcaaatcagctcctgactgggagcaactgatttggatcatgtcgagtttgcgtaaaagaaattctaggtttagccattataaaagagttgactacaaaagagaggctgcatatacaaccttttgcaaagtaattgaaccgcaaaattgatgtgattgtgtccactgtatccaactcattggctacagcaggccctgctctgtttgtcatagtagattagggtgtgttaagtccaccttgtcagagcacacaacagaaaaatgacagtaatgaacataaaccaaacatagacctatctatgttcatttggtaagattatacagtatcccaaggctggaataaagaagttaagaaatgcaccaaaggtactatcagaaattaaaatcaatatttcataaattggaaatcaatatttcagaaataaagcttcttcataacaatagcaagaaaaaaatgcatacatgtaaacaatgtcattgtgctgagaaggggctcattggtgttgctgcattaaaaatgatgaacctgaccaaacgtttgaagcttagtgtctattatgctcccaaaatactggcacttataaatcaaatctattttatctaagaagacattaacagagtctgagtacttttagcatccttacaaacacagaagttagaaccgatgtgtattaactgttcataaacttcaggctgtgaaagtttgtagactggccctgaagatactatcagaaattggaaatcaatatttcataaattggaagtcaatatttcagaaataatgcttttttcataacaatagcaagaaaaaaatgcatacatgtaaacaatttcattgtgctgagaaggggctcattggtgttggtgcattaaaaatgatgaacctgaccaaacgtttgaagctcagtgtctattatgcttccaaaatactggcacatgtaaatcaaatctattttacctaagaagacattaatagagcgagaatacttttagcatctttacaaacacagaagttagaaccgatgtgtattcactgttcataaacttcaggctatgaaagtttgtagattggcctattacgactagacatctgcatcctttttaaactgatctagagcatacaattagcatatatactctaaagtttaaaccaaaaataaatgatgtcataccatgtaaactaaattacgaatcaaacaatatatgttcagaaaaaaaatgaaataactttcttcaaaccttgttactcagccttaaagctattctcaagcatactgcacacagagatgttgatcatatatacaaatctgaagtacaataaaactttcttgtcgagacctatcaagtttaaatacaacaaattatttacactaaaattaaaaatgctttgaatgcaaggcaacgcagaacctgtgtgtacctattttttgttggtagcaaatagcaatcaatcaaacttgagtctgagtctgcaaaaacccatctgccttcattgtctctattgcagtatactcaatctattacaatattcattagcaacaataaaatcattcatgaatatgtagaaattctggtagaaatttgtggcacctatttctctcataaaatcaatccttgatttatcaggcccgtgaagggcttttttgaaagctacacacattttcataacgaaagtgtatgatagacagaaccaactttcatatatgatagagatgtggccttgccttactaggtatttggcgttgggagaagattgattcgaaggtgaaattggccgatagcgcgtggacgtagatgtagtagtgaggcaccccctgagc

SEQ ID NO: 76379 - DNA, 1189 bp, Zea Mays
catatatgatgtcacttcacgatgtttgctctctctaggtttgttcgtgctcagaggcacacatactcgttgcattacatcgtctacgacaaatcccaggtgggtgtagagttttggcgagtataggtgggtgatgtgtttccgacgacaacgaggcggaggccatctgctactgcaaccaccaactacatgaagcaaaacagctcatcagtaggtcaaggcgaaccagttgccggtggccaacatgatcgggtacctagaagcgaagaaccacctgctccttggctattgccaggacatcgtctactacctcctccgcaaggccaaggggctctcggtggatggccaccccatcgtatggagccttatcgagattaggctgtttctggagaaggtttgcttgtacctttaatgcttattcttcattttcccaggcctgtttgctggagctactgctgcaaccttctgtgagctcattgccttatgtcgattgatggtgaaatggaaaagagtacaatataattttaccttattctattgttagcttaaggagatataacaaatggttcctaaaaagaccaacaaggcatccatgcttgatgaggccattttgtatctgaagcaattgcagctccaagtatagctaatatttatcatatgatttgaggacaaataatctgctggtgctaattataaacttaaattatgtgattttggattggcaagagtggcattcaatgacactcctacaacagtattctggatgatattattcacatatttgagctggttttctactctatggatttttgaatttgataaaaggtgtggggattaactatagtagtgattggctaggtactgactttttagcaatttaggaaattcagttgttgtaatttttttgctagacaagtggtattatttgtgttattacaacatctttattggaatctatatgaaaatgttcttatgccttgttgggaaatagacatgtcatcggctacttcatattgtgaatgctcagtctaggatgttgctgcaactgcttgtgtatttttttctataatattaatgtttgtcgttctgtatctatgttttatactaatttttaactcccgtggtaacgcatgggcacatacctagtatagacataaaaaccaaagagctaaaacaactactattttgg

SEQ ID NO: 76380 - DNA, 1195 bp, Zea Mays
agaaactagagtatcaagacagtaacctcggtgctaagaggcacacatactcgttgcattacatcgtctacgacaaatcccaggtgggtgtagagttttggcgagtataggtgggtgatgtgtttccgacgacaacgaggcggaggccatctgctactgcaaccaccaactacatgaagcaaaacagctcatcagtagatttgcagccccattgccttatggtggaatgaactctggttcgctctctcatgtgtcgataggtcaaggcgaaccagttgccggtggccaacatgatcgggtacctagaagcgaagaaccacctgctccttggctattgccaggacatcgtctactacctcctccgcaaggccaaggggctctcggtggatggccaccccatcgtatggagccttatcgagattaggctgtttctggagaaggcctgtttgctggagctactgctgcaaccttctgtgagctcattgccttatgtcgattgatggtgaaatggaaaagagtacaatataattttaccttattctattgttagcttaaggagatataacaaatggttcctaaaaagaccaacaaggcatccatgcttgatgaggccattttgtatctgaagcaattgcagctccaagtatagctaatatttatcatatgatttgaggacaaataatctgctggtgctaattataaacttaaattatgtgattttggattggcaagagtggcattcaatgacactcctacaacagtattctggatgatattattcacatatttgagctggttttctactctatggatttttgaatttgataaaaggtgtggggattaactatagtagtgattggctaggtactgactttttagcaatttaggaaattcagttgttgtaatttttttgctagacaagtggtattatttgtgttattacaacatctttattggaatctatatgaaaatgttcttatgccttgttgggaaatagacatgtcatcggctacttcatattgtgaatgctcagtctaggatgttgctgcaactgcttgtgtatttttttctataatattaatgtttgtcgttctgtatctatgttttatactaatttttaactcccgtggtaacgcatgggcacatacctagtatagacataaaaaccaaagagctaaaacaactactattttgg

SEQ ID NO: 76381 - DNA, 2168 bp, Zea Mays
cccctcgcgcccttgctgatgtgtaccttccatcaacacggtgttcctgtcgcgcaatcccacgaaatcctccgtcgacgccccgccatcatcgccccctgcgccgtcctcatgcccccgcccccgacctcgcgcaccttccttcggctccaccaccacccctggcacgccctgcctctgtgactcccgcgccccgcccggagaggaagaagagatccggagacgagcgtcgaggccggcgccacccgacccgtcccgtcgatccccatcagtattgcctccgtgaccgcctcgcgcacctctccgcctcctactcgacgaccaccagcgcaggctgttcaaagcggcaactagaggcgccctagatcacaccacagtcgcggatagagaaggaaaattacccccaaaccctagcttcggatctcgatggcgaacccccgtgtcttctccgacatgaccgtcggcagtgccccggccgaccggatcgtgatggagctgtacgccaacgtggtgcccaagaccgcggagaacttctgcgcgctgtgcacgagctggaggcgctctgcacgacgtgcttccaggtcgggcggtcatgggcgatggtgccgacgaagaggaagcgctcaacaggtgccgccgtggtcgcgacagtcgtcaagtggaaggtgggcgacctcgtgcttaccaagatgaagagcttcccggcctggctggctatggtactttggtttgtcaacaactcgagtaacgaacaagtcaacaaatggagaagggtgtgacatgaaaaatcacaattccccaacatcacacctgaattcatcattgaatcttcattccacatctggaggaacaatttcacagaaagcaaacaaagacaacgacgacgacttcagcccttgaggatcttccatgcctgcaaggacatgaggagcttgatggagccagcttacgggaacatgaagaattcacaatggtgaaaaaatatcacaaaggttaaactggggagatatgagatagatacatcatacatgttttaacctaggtgctagactggacactcagagacaatgaagcagaaactagagtatcaagacagtaacctcggtgctaagaggcacacatactcgttgcattacatcgtctacgacaaatcccaggtgggtgtagagttttggcgagtataggtgggtgatgtgtttccgacgacaacgaggcggaggccatctgctactgcaaccaccaactacatgaagcaaaacagctcatcagtaggtcaaggcgaaccagttgccggtggccaacatgatcgggtacctagaagcgaagaaccacctgctccttggctattgccaggacatcgtctactacctcctccgcaaggccaaggggctctcggtggatggccaccccatcgcctgtttgctggagctactgctgcaaccttctgtgagctcattgccttatgtcgattgatggtgaaatggaaaagagtacaatataattttaccttattctattgttagcttaaggagatataacaaatggttcctaaaaagaccaacaaggcatccatgcttgatgaggccattttgtatctgaagcaattgcagctccaagtatagctaatatttatcatatgatttgaggacaaataatctgctggtgctaattataaacttaaattatgtgattttggattggcaagagtggcattcaatgacactcctacaacagtattctggatgatattattcacatatttgagctggttttctactctatggatttttgaatttgataaaaggtgtggggattaactatagtagtgattggctaggtactgactttttagcaatttaggaaattcagttgttgtaatttttttgctagacaagtggtattatttgtgttattacaacatctttattggaatctatatgaaaatgttcttatgccttgttgggaaatagacatgtcatcggctacttcatattgtgaatgctcagtctaggatgttgctgcaactgcttgtgtatttttttctataatattaatgtttgtcgttctgtatctatgttttatactaatttttaactcccgtggtaacgcatgggcacatacctagtatagacataaaaaccaaagagctaaaacaactactattttgg

SEQ ID NO: 76382 - DNA, 2163 bp, Zea Mays
cccctcgcgcccttgctgatgtgtaccttccatcaacacggtgttcctgtcgcgcaatcccacgaaatcctccgtcgacgccccgccatcatcgccccctgcgccgtcctcatgcccccgcccccgacctcgcgcaccttccttcggctccaccaccacccctggcacgccctgcctctgtgactcccgcgccccgcccggagaggaagaagagatccggagacgagcgtcgaggccggcgccacccgacccgtcccgtcgatccccatcagtattgcctccgtgaccgcctcgcgcacctctccgcctcctactcgacgaccaccagcgcaggctgttcaaagcggcaactagaggcgccctagatcacaccacagtcgcggatagagaaggaaaattacccccaaaccctagcttcggatctcgatggcgaacccccgtgtcttctccgacatgaccgtcggcagtgccccggccgaccggatcgtgatggagctgtacgccaacgtggtgcccaagaccgcggagaacttctgcgcgctgtgcacgagctggaggcgctctgcacgacgtgcttccaggtcgggcggtcatgggcgatggtgccgacgaagaggaagcgctcaacaggtgccgccgtggtcgcgacagtcgtcaagtggaaggtgggcgacctcgtgcttaccaagatgaagagcttcccggcctggctggctatggtactttggtttgtcaacaactcgagtaacgaacaagtcaacaaatggagaagggtgtgacatgaaaaatcacaattccccaacatcacacctgaattcatcattgaatcttcattccacatctggaggaacaatttcacagaaagcaaacaaagacaacgacgacgacttcagcccttgaggatcttccatgcctgcaaggacatgaggagcttgatggagccagcttacgggaacatgaagaattcacaatggtgaaaaaatatcacaaagcttcatgaagcgcaaagaattagcttcagaggcacatgttttaacctaggtgctagactggacactcagagacaatgaagcagaaactagagtatcaagacagtaacctcggtgctaagaggcacacatactcgttgcattacatcgtctacgacaaatcccaggtgggtgtagagttttggcgagtataggtgggtgatgtgtttccgacgacaacgaggcggaggccatctgctactgcaaccaccaactacatgaagcaaaacagctcatcagtcaaggcgaaccagttgccggtggccaacatgatcgggtacctagaagcgaagaaccacctgctccttggctattgccaggacatcgtctactacctcctccgcaaggccaaggggctctcggtggatggccaccccatcgcctgtttgctggagctactgctgcaaccttctgtgagctcattgccttatgtcgattgatggtgaaatggaaaagagtacaatataattttaccttattctattgttagcttaaggagatataacaaatggttcctaaaaagaccaacaaggcatccatgcttgatgaggccattttgtatctgaagcaattgcagctccaagtatagctaatatttatcatatgatttgaggacaaataatctgctggtgctaattataaacttaaattatgtgattttggattggcaagagtggcattcaatgacactcctacaacagtattctggatgatattattcacatatttgagctggttttctactctatggatttttgaatttgataaaaggtgtggggattaactatagtagtgattggctaggtactgactttttagcaatttaggaaattcagttgttgtaatttttttgctagacaagtggtattatttgtgttattacaacatctttattggaatctatatgaaaatgttcttatgccttgttgggaaatagacatgtcatcggctacttcatattgtgaatgctcagtctaggatgttgctgcaactgcttgtgtatttttttctataatattaatgtttgtcgttctgtatctatgttttatactaatttttaactcccgtggtaacgcatgggcacatacctagtatagacataaaaaccaaagagctaaaacaactactattttgg

SEQ ID NO: 76383 - DNA, 2464 bp, Zea Mays
cccctcgcgcccttgctgatgtgtaccttccatcaacacggtgttcctgtcgcgcaatcccacgaaatcctccgtcgacgccccgccatcatcgccccctgcgccgtcctcatgcccccgcccccgacctcgcgcaccttccttcggctccaccaccacccctggcacgccctgcctctgtgactcccgcgccccgcccggagaggaagaagagatccggagacgagcgtcgaggccggcgccacccgacccgtcccgtcgatccccatcagtattgcctccgtgaccgcctcgcgcacctctccgcctcctactcgacgaccaccagcgcaggctgttcaaagcggcaactagaggcgccctagatcacaccacagtcgcggatagagaaggaaaattacccccaaaccctagcttcggatctcgatggcgaacccccgtgtcttctccgacatgaccgtcggcagtgccccggccgaccggatcgtgatggagctgtacgccaacgtggtgcccaagaccgcggagaacttctgcgcgctgtgcacgagctggaggcgctctgcacgacgtgcttccaggtcgggcggtcatgggcgatggtgccgacgaagaggaagcgctcaacaggtgccgccgtggtcgcgacagtcgtcaagtggaaggtgggcgacctcgtgcttaccaagatgaagagcttcccggcctggctggctatggtactttggtttgtcaacaactcgagtaacgaacaagtcaacaaatggagaagggtgtgacatgaaaaatcacaattccccaacatcacacctgaattcatcattgaatcttcattccacatctggaggaacaatttcacagaaagcaaacaaagacaacgacgacgacttcagcccttgaggatcttccatgcctgcaaggacatgaggagcttgatggagccagcttacgggaacatgaagaattcacaatggtgaaaaaatatcacaaaggttaaactggggagatatgagatagatacatcatacatggtatttctctccttttccactagattataatttccttccaaaactattttttgtgaatttttcctcagcttcatgaagcgcaaagaattagcttcagaggcacatggtgagctatacttgtttgtgctttataccttgcctatttgttagatacatgctactaacatgagattaaaaactggtttatttagctcgattcttatttgtctaaactcatctatcatcaatttctatttagttttaacctaggtgctagactggacactcagagacaatgaagcagaaactagagtatcaagacagtaacctcggtgctaagaggcacacatactcgttgcattacatcgtctacgacaaatcccaggtgggtgtagagttttggcgagtataggtgggtgatgtgtttccgacgacaacgaggcggaggccatctgctactgcaaccaccaactacatgaagcaaaacagctcatcaatttgcagccccattgccttatggtggaatgaactctggttcgctctctcatgtgtcgataggtcaaggcgaaccagttgccggtggccaacatgatcgggtacctagaagcgaagaaccacctgctccttggctattgccaggacatcgtctactacctcctccgcaaggccaaggggctctcggtggatggccaccccatcgcctgtttgctggagctactgctgcaaccttctgtgagctcattgccttatgtcgattgatggtgaaatggaaaagagtacaatataattttaccttattctattgttagcttaaggagatataacaaatggttcctaaaaagaccaacaaggcatccatgcttgatgaggccattttgtatctgaagcaattgcagctccaagtatagctaatatttatcatatgatttgaggacaaataatctgctggtgctaattataaacttaaattatgtgattttggattggcaagagtggcattcaatgacactcctacaacagtattctggatgatattattcacatatttgagctggttttctactctatggatttttgaatttgataaaaggtgtggggattaactatagtagtgattggctaggtactgactttttagcaatttaggaaattcagttgttgtaatttttttgctagacaagtggtattatttgtgttattacaacatctttattggaatctatatgaaaatgttcttatgccttgttgggaaatagacatgtcatcggctacttcatattgtgaatgctcagtctaggatgttgctgcaactgcttgtgtatttttttctataatattaatgtttgtcgttctgtatctatgttttatactaatttttaactcccgtggtaacgcatgggcacatacctagtatagacataaaaaccaaagagctaaaacaactactattttgg

SEQ ID NO: 76384 - DNA, 2087 bp, Zea Mays
cccctcgcgcccttgctgatgtgtaccttccatcaacacggtgttcctgtcgcgcaatcccacgaaatcctccgtcgacgccccgccatcatcgccccctgcgccgtcctcatgcccccgcccccgacctcgcgcaccttccttcggctccaccaccacccctggcacgccctgcctctgtgactcccgcgccccgcccggagaggaagaagagatccggagacgagcgtcgaggccggcgccacccgacccgtcccgtcgatccccatcagtattgcctccgtgaccgcctcgcgcacctctccgcctcctactcgacgaccaccagcgcaggctgttcaaagcggcaactagaggcgccctagatcacaccacagtcgcggatagagaaggaaaattacccccaaaccctagcttcggatctcgatggcgaacccccgtgtcttctccgacatgaccgtcggcagtgccccggccgaccggatcgtgatggagctgtacgccaacgtggtgcccaagaccgcggagaacttctgcgcgctgtgcacgagctggaggcgctctgcacgacgtgcttccaggtcgggcggtcatgggcgatggtgccgacgaagaggaagcgctcaacaggtgccgccgtggtcgcgacagtcgtcaagtggaaggtgggcgacctcgtgcttaccaagatgaagagcttcccggcctggctggctatggtactttggtttgtcaacaactcgagtaacgaacaagtcaacaaatggagaagggtgtgacatgaaaaatcacaattccccaacatcacacctgaattcatcattgaatcttcattccacatctggaggaacaatttcacagaaagcaaacaaagacaacgacgacgacttcagcccttgaggatcttccatgcctgcaaggacatgaggagcttgatggagccagcttacgggaacatgaagaattcacaatggtgaaaaaatatcacaaaggttaaactggggagatatgagatagatacatcatacatgaggcacacatactcgttgcattacatcgtctacgacaaatcccaggtgggtgtagagttttggcgagtataggtgggtgatgtgtttccgacgacaacgaggcggaggccatctgctactgcaaccaccaactacatgaagcaaaacagctcatcagtaggtcaaggcgaaccagttgccggtggccaacatgatcgggtacctagaagcgaagaaccacctgctccttggctattgccaggacatcgtctactacctcctccgcaaggccaaggggctctcggtggatggccaccccatcgcctgtttgctggagctactgctgcaaccttctgtgagctcattgccttatgtcgattgatggtgaaatggaaaagagtacaatataattttaccttattctattgttagcttaaggagatataacaaatggttcctaaaaagaccaacaaggcatccatgcttgatgaggccattttgtatctgaagcaattgcagctccaagtatagctaatatttatcatatgatttgaggacaaataatctgctggtgctaattataaacttaaattatgtgattttggattggcaagagtggcattcaatgacactcctacaacagtattctggatgatattattcacatatttgagctggttttctactctatggatttttgaatttgataaaaggtgtggggattaactatagtagtgattggctaggtactgactttttagcaatttaggaaattcagttgttgtaatttttttgctagacaagtggtattatttgtgttattacaacatctttattggaatctatatgaaaatgttcttatgccttgttgggaaatagacatgtcatcggctacttcatattgtgaatgctcagtctaggatgttgctgcaactgcttgtgtatttttttctataatattaatgtttgtcgttctgtatctatgttttatactaatttttaactcccgtggtaacgcatgggcacatacctagtatagacataaaaaccaaagagctaaaacaactactattttgg

SEQ ID NO: 76385 - DNA, 2449 bp, Zea Mays
cacggttctgcctcgcgcctgcgctccccctcgcgcccttgctgatgtgtaccttccatcaacacggtgttcctgtcgcgcaatcccacgaaatcctccgtcgacgccccgccatcatcgccccctgcgccgtcctcatgcccccgcccccgacctcgcgcaccttccttcggctccaccaccacccctggcacgccctgcctctgtgactcccgcgccccgcccggagaggaagaagagatccggagacgagcgtcgaggccggcgccacccgacccgtcccgtcgatccccatcagtattgcctccgtgaccgcctcgcgcacctctccgcctcctactcgacgaccaccagcgcaggctgttcaaagcggcaactagaggcgccctagatcacaccacagtcgcggatagagaaggaaaattacccccaaaccctagcttcggatctcgatggcgaacccccgtgtcttctccgacatgaccgtcggcagtgccccggccgaccggatcgtgatggagctgtacgccaacgtggtgcccaagaccgcggagaacttctgcgcgctgtgcacgagctggaggcgctctgcacgacgtgcttccaggtcgggcggtcatgggcgatggtgccgacgaagaggaagcgctcaacaggtgccgccgtggtcgcgacagtcgtcaagtggaaggtgggcgacctcgtgcttaccaagatgaagagcttcccggcctggctggctatgcaaggacatgaggagcttgatggagccagcttacgggaacatgaagaattcacaatggtgaaaaaatatcacaaagctagatgcaatttgatgtttgaaactatccccaagtttgctagatgcaaccttatgcttcagtcttatattgaggtagagtttatacatttcagctaggagtgcttgtgccttccttgctgcattgccacattcttgctaggaaaacattgaccttggtagaccagtgctcactacaacaaatttctaattatgcacaaagaggcacgagctgcttgcttgttttagtacagtgtacaagagatagacggattgcctttaatgctaaagattttcctatttttcttgtagctcgtatgacaaattgattttttagacaatatatatgttttctctggtctgtaattatccttttatatgtgtacattttaatagtatcattttgtttttgtttctttcctcccttgccaggctgctggatactattttaacatatcgattcttgataaaattagagaatagaagattgttactagatgtttctaataaaaaccgcagaagatatgatgcacactaaatgtttttctaaacatgacagaggcacacatactcgttgcattacatcgtctacgacaaatcccaggtgggtgtagagttttggcgagtataggtgggtgatgtgtttccgacgacaacgaggcggaggccatctgctactgcaaccaccaactacatgaagcaaaacagctcatcagtcaaggcgaaccagttgccggtggccaacatgatcgggtacctagaagcgaagaaccacctgctccttggctattgccaggacatcgtctactacctcctccgcaaggccaaggggctctcggtggatggccaccccatcgtatggagccttatcgagattaggctgtttctggagaaggcctgtttgctggagctactgctgcaaccttctgtgagctcattgccttatgtcgattgatggtgaaatggaaaagagtacaatataattttaccttattctattgttagcttaaggagatataacaaatggttcctaaaaagaccaacaaggcatccatgcttgatgaggccattttgtatctgaagcaattgcagctccaagtatagctaatatttatcatatgatttgaggacaaataatctgctggtgctaattataaacttaaattatgtgattttggattggcaagagtggcattcaatgacactcctacaacagtattctggatgatattattcacatatttgagctggttttctactctatggatttttgaatttgataaaaggtgtggggattaactatagtagtgattggctaggtactgactttttagcaatttaggaaattcagttgttgtaatttttttgctagacaagtggtattatttgtgttattacaacatctttattggaatctatatgaaaatgttcttatgccttgttgggaaatagacatgtcatcggctacttcatattgtgaatgctcagtctaggatgttgctgcaactgcttgtgtatttttttctataatattaatgtttgtcgttctgtatctatgttttatactaatttttaactcccgtggtaacgcatgggcacatacctagtatagacataaaaaccaaagagctaaaacaactactattttgg

SEQ ID NO: 76386 - DNA, 1512 bp, Zea Mays
cccctcgcgcccttgctgatgtgtaccttccatcaacacggtgttcctgtcgcgcaatcccacgaaatcctccgtcgacgccccgccatcatcgccccctgcgccgtcctcatgcccccgcccccgacctcgcgcaccttccttcggctccaccaccacccctggcacgccctgcctctgtgactcccgcgccccgcccggagaggaagaagagatccggagacgagcgtcgaggccggcgccacccgacccgtcccgtcgatccccatcagtattgcctccgtgaccgcctcgcgcacctctccgcctcctactcgacgaccaccagcgcaggctgttcaaagcggcaactagaggcgccctagatcacaccacagtcgcggatagagaaggaaaattacccccaaaccctagcttcggatctcgatggcgaacccccgtgtcttctccgacatgaccgtcggcagtgccccggccgaccggatcgtgatggagctgtacgccaacgtggtgcccaagaccgcggagaacttctgcgcgctgtgcacgagctggaggcgctctgcacgacgtgcttccaggtcgggcggtcatgggcgatggtgccgacgaagaggaagcgctcaacaggtgccgccgtggtcgcgacagtcgtcaagtggaaggtgggcgacctcgtgcttaccaagatgaagagcttcccggcctggctggctatggtactttggtttgtcaacaactcgagtaacgaacaagtcaacaaatggagaagggtgtgacatgaaaaatcacaattccccaacatcacacctgaattcatcattgaatcttcattccacatctggaggaacaatttcacagaaagcaaacaaagacaacgacgacgacttcagcccttgaggatcttccatgcctgcaaggacatgaggagcttgatggagccagcttacgggaacatgaagaattcacaatggtgaaaaaatatcacaaaggttaaactggggagatatgagatagatacatcatacatgttttaacctaggtgctagactggacactcagagacaatgaagcagaaactagagtatcaagacagtaacctcggtgctaagaggcacacatactcgttgcattacatcgtctacgacaaatcccaggtgggtgtagagttttggcgagtataggtgggtgatgtgtttccgacgacaacgaggcggaggccatctgctactgcaaccaccaactacatgaagcaaaacagctcatcagtaggtcaaggcgaaccagttgccggtggccaacatgatcgggtacctagaagcgaagaaccacctgctccttggctattgccaggacatcgtctactacctcctccgcaaggccaaggggctctcggtggatggccaccccatcgtatggagccttatcgagattaggctgtttctggagaaggcctgtttgctggagctactgctgcaaccttctgtgagctcattgccttatgtcgattga

SEQ ID NO: 76387 - DNA, 771 bp, Zea Mays
acaccttacaaaggataaggattacgaggatccaccagactctgcatcggcgtgcccgcgcgctagatggccattgaggagacactaccgatggaggcgccatctttggtagctgaggacaaattaaattttgccttcctatgaagtttctaccttttccaaatttaaagtcattaagagatttatgtggtactggatgggaatggatgtttctaagagtctgttaaccctcctcttcagttcaagattgtgatgatttgtagtactgaattggaggcttttatcccatgcaatttatgtggtacaagtaagggtgttgtgtgagaaggtgaaggagattctagtggaggaaagaaatgttcagtttgtgggtagatgtggatcataatcagctactctatctgtaatagtgtgagtatttccaacaccaacaccgacgatccagagcccagggaaagtagcaagattctgagctcctacagttagacatccgccagacccagtcacgacgactgatgttgaaaactagcagctcgcctacttcagttgagtgcaaagctgccaacatctgatccatgcttttgggttctttgtatctgtatctatcaattcattaagtgcaggacaatccacgtttctgccaccaaatggggcatcttttccctgtggtccagttttaacttgagaacaattgaacaaatgtccaatgtgatgtctgatttctcaacattgtctttcccaaatgtaaagaaaatatgtatgatagcgcac

SEQ ID NO: 76388 - DNA, 2411 bp, Zea Mays
gccattttcgtgcctggatagatcgtagatctacgaggtagcatcgaatggctctcccgtaggaagggtagagcctccgtgtggtggcctccagatcgcaactccggttcttcttcccaccccgcggcgcatcgacggaccgaattttggcgaagagaacgcttggagcgcctctatcccctccacgatggaggccaggtacacagcaaccgtgccagggaacaacaccgttttgatgtcgttttggaggtgaggatctacgccctcgtggcatgcttggtggccggacttgccctcacctctatcccctctaggcctctgtgatggaggctgggtactcagcggccatggcccaattcgccgctctcgtgaccggggacgccgatgtactaagggtggttgtgggttgatctctgcaacaccaacatcatgctcgcctcttctccgtctctgtccccccgcgtctaccgtgctcctcgcccctcctaatgtcgtcctctccatctagcgccacagccgatgcacgcctccgggctcacgccgtgccccgcgtctaccgtgctcctctcccctcctaatgtcgtcctctccatctagcgccacagccgatgcacgcctccgggctcacgccgcgccaagcccgtggggaggcggatctcgcccacaggccgcagatctccttccaaactaagaggcaacagataggcggcccccttccacaaaggacacaatttcaccccttccatatttggcggccatggcatgcactacgcccccttcctcgccctcattccaaattcagcccacaactgcgcatgcacccacctcaatggactgctattgtctgcatcggaagtgctattgttctggttggttggaacatgaggaggtgcgcaaaggattccctcttcttggacctactgaaataggtcaaggtggtttttctagaacaacatttaatcttgccatcagtgagatttggacaccttacaaaggataaggattacgaggatccaccagactctgcatcggcgtgcccgcgcgctagatggccattgaggagacactaccgatggaggcgccatctttggtagctgaggacaaattaaattttgccttcctatgaagtttctaccttttccaaatttaaagtcattaagaggttagtgccctgttccatcttggcagaacctgccttacaatttgagccccacattttgttgaagaaatgcacatgtgtgaagcttcagttctgcttcagctctgcttcagttatggtaatctgcaaaagctatttagggtcaatccttgttgcagattaggatatgatcctccctttaattcaagcctgacatcaactgtattttcttggccgtcattctattgaacatcatgtcttgatttatagagccgaaagtaatatctcactgcatttttttgttttatattttgagatattgatgatttggtctgtaattctgtgatttcaggtggggtctgaaaccaaatatttagctattatgaatgcttgtattgtttcttatctcagattggctctttatcacgttttaaaagcatatggcagtattaggaagttgggcgtttgattggttccgctgtgaggatttgtacatgctttcgacgcataattttctcttttttctacttttttgtttttctctggttcttttttcattttactttgttggatctgattctttcctctagagttcagaaccattgcatcacctagcaggctacaatcgcaaagtgatcactagattgttcgatgactatttagtgactgcttctcttcccagatttatgtggtactggatgggaatggatgtttctaagagtctgttaaccctcctcttcagttcaagattgtgatgatttgtagtactgaattggaggcttttatcccatgcaatttatgtggtacaagtaagggtgttgtgtgagaaggtgaaggagattctagtggaggaaagaaatgttcagtttgtgggtagatgtggatcataatcagctactctatctgtaatagtgtgagtatttccaacaccaacaccgacgatccagagcccagggaaagtagcaagattctgagctcctacagttagacatccgccagacccagtcacgacgactgatgttgaaaactagcagctcgcctacttcagttgagtgcaaagctgccaacatctgatccatgcttttgggttctttgtatctgtatctatcaattcattaagtgcaggacaatccacgtttctgccaccaaatggggcatcttttccctgtggtccagttttaacttgagaacaattgaacaaatgtccaatgtgatgtctgatttctcaacattgtctttcccaaatgtaaagaaaatatgtatgatagcgcac

SEQ ID NO: 76389 - DNA, 2401 bp, Zea Mays
gccattttcgtgcctggatagatcgtagatctacgaggtagcatcgaatggctctcccgtaggaagggtagagcctccgtgtggtggcctccagatcgcaactccggttcttcttcccaccccgcggcgcatcgacggaccgaattttggcgaagagaacgcttggagcgcctctatcccctccacgatggaggccaggtacacagcaaccgtgccagggaacaacaccgttttgatgtcgttttggaggtgaggatctacgccctcgtggcatgcttggtggccggacttgccctcacctctatcccctctaggcctctgtgatggaggctgggtactcagcggccatggcccaattcgccgctctcgtgaccggggacgccgatgtactaagggtggttgtgggttgatctctgcaacaccaacatcatgctcgcctcttctccgtctctgtccccccgcgtctaccgtgctcctcgcccctcctaatgtcgtcctctccatctagcgccacagccgatgcacgcctccgggctcacgccgtgccccgcgtctaccgtgctcctctcccctcctaatgtcgtcctctccatctagcgccacagccgatgcacgcctccgggctcacgccgcgccaagcccgtggggaggcggatctcgcccacaggccgcagatctccttccaaactaagaggcaacagataggcggcccccttccacaaaggacacaatttcaccccttccatatttggcggccatggcatgcactacgcccccttcctcgccctcattccaaattcagcccacaactgcgcatgcacccacctcaatggactgctattgtctgcatcggaagtgctattgttctggttggttggaacatgaggaggattccctcttcttggacctactgaaataggtcaaggtggtttttctagaacaacatttaatcttgccatcagtgagatttggacaccttacaaaggataaggattacgaggatccaccagactctgcatcggcgtgcccgcgcgctagatggccattgaggagacactaccgatggaggcgccatctttggtagctgaggacaaattaaattttgccttcctatgaagtttctaccttttccaaatttaaagtcattaagaggttagtgccctgttccatcttggcagaacctgccttacaatttgagccccacattttgttgaagaaatgcacatgtgtgaagcttcagttctgcttcagctctgcttcagttatggtaatctgcaaaagctatttagggtcaatccttgttgcagattaggatatgatcctccctttaattcaagcctgacatcaactgtattttcttggccgtcattctattgaacatcatgtcttgatttatagagccgaaagtaatatctcactgcatttttttgttttatattttgagatattgatgatttggtctgtaattctgtgatttcaggtggggtctgaaaccaaatatttagctattatgaatgcttgtattgtttcttatctcagattggctctttatcacgttttaaaagcatatggcagtattaggaagttgggcgtttgattggttccgctgtgaggatttgtacatgctttcgacgcataattttctcttttttctacttttttgtttttctctggttcttttttcattttactttgttggatctgattctttcctctagagttcagaaccattgcatcacctagcaggctacaatcgcaaagtgatcactagattgttcgatgactatttagtgactgcttctcttcccagatttatgtggtactggatgggaatggatgtttctaagagtctgttaaccctcctcttcagttcaagattgtgatgatttgtagtactgaattggaggcttttatcccatgcaatttatgtggtacaagtaagggtgttgtgtgagaaggtgaaggagattctagtggaggaaagaaatgttcagtttgtgggtagatgtggatcataatcagctactctatctgtaatagtgtgagtatttccaacaccaacaccgacgatccagagcccagggaaagtagcaagattctgagctcctacagttagacatccgccagacccagtcacgacgactgatgttgaaaactagcagctcgcctacttcagttgagtgcaaagctgccaacatctgatccatgcttttgggttctttgtatctgtatctatcaattcattaagtgcaggacaatccacgtttctgccaccaaatggggcatcttttccctgtggtccagttttaacttgagaacaattgaacaaatgtccaatgtgatgtctgatttctcaacattgtctttcccaaatgtaaagaaaatatgtatgatagcgcac

SEQ ID NO: 76390 - DNA, 2228 bp, Zea Mays
gttattttctcttaaatatgcttgttagaagagcgattggggaagaggtctcacttattgctgggagcataagctttcattaaaaaagggcgtttacatctttaagctcaaagagaaaggattatgaaaatggcgcacttgatcactaattgcagctttcagacattctcgagttctcctaattactgccgcaatattgggcaactacagaactcaaaatcttcaaatctgtccctcaaatcttgttccaggagacaaaagaagtcatatgttacctgtgctagcgctgccgtacaaggacagacacaaacacctcttactggtagccagcaagcttatgagcattcatcctccaaacctaaaaaggtaatggttattggtggagatggatactgtgggtgggcaacagcacttcatctctcaaacaaaggttatgaggttgcgattgttgataatcttgtccgccgtgcttttgataaccaactcggtcttgattcccttacccccataacctccatccagaatcgtgtccgtagatggaagtctctcactgctaagacaatccagctctttatcggtgacatatgtgattttgaattcctctcagaagccttcaagtcttttgagccggatgccgctgtccactttggcgagcaaagatccgcgccatactctatgattgatcgttcgcgggcagtctacacacagcataacaatgtcattgggacacttaatgtcttgtttgccataaaggaatacagtgaagagtgccatcttgttaagctaggaactatgggtgagtatggaacaccaaacattgacatcgaagaggggtttatcactattactcacaatggaagaacagacaccttgccttatccaaaacaagccagctctttctatcatctgagcaaagtgcatgattcccacaacatagcatttacatgcaaggcttggggtataagggccactgatcttaaccaaggtgtggtctatggtgtcagaacagatgaaactgcaatgcacgaagagctatctaacagatttgattacgatggggtctttgggaccgcactaaataggttctgtgttcaggctgctgttgggcatccacttacagtttatggaaaaggtggtcagacccggggatatctggacatcagagacactgtacagtgcgtggagctagcaatagccaacccagccaaacctggcgagttcagagtcttcaaccagttcaccgagcagttctctgtcaatgagctagccaaactggtgactgcggcaggagcgaagcttgggctagaagtggagaccaaatcgatacccaacccacgagtcgaggctgaggagcactactacaacgccaagcacacgaagcttattgagctcggcctggtgccccacctgctctcggactccctgctcgactcgcttctcaattttgccattcaatacaaggatcgggtcgacacggcacagatcatgcccagtgtgtcgtggaagaagatgggtgccaagccacggacagtctctgtttagagggtgattcaacttcccctgggttataatatcaaccatggcattgacattattgacatatgtaatgtaataattatgcacgttagtatgatttgctaggtagtgaggtgtttattacgatattaaattatattgttgcccgtgcaactcaagagttcatgtcagttgattctgctgctcactcgagccgccttgaggtcttacaatgctcctgagggttaagctgtcacctgtcacatgttgccatttcgctgatcgaactctggtggaacagatatagatcaagatcttgcaagaattgttattagttttttcggataatggaaattgtattccagcttttttgcattgtcatgcagacagccaacacgaaaacaaaacactaatcagaacatatcaccaacatcaaagaagagagaaacactggttttaaacaatatgaatttaaggagcttcaattcttgcattagatcgccatccatggcctgcgaatatgggcaaatggggaaatagtgtttctagctttagcaaacaatgaaccatgtcacacccggatttaaggacaaatttaggcgcgaatcaaatgtgtgttagaatcaaatctcacacatatgatgacccatgttacagaaacgaatgccacatctttaatatataatagagttttgtacaaaatagtaaaataa

SEQ ID NO: 76391 - DNA, 2099 bp, Zea Mays
gtcggatcgcgcttgcggcttgccgcagtcgatccgaatcgcaacgcccgaatataccactcctccctgcttgcctcccgctgatatgatatccgtccattccaatccccctcttccgctccgcctccctctagctcctctccctctcgcagccatcctcgtccccccaagaatccggacgtcgtttgtcccctccttttctgggcgtttacatctttaagctcaaagagaaaggattatgaaaatggcgcacttgatcactaattgcagctttcagacattctcgagttctcctaattactgccgcaatattgggcaactacagaactcaaaatcttcaaatctgtccctcaaatcttgttccaggagacaaaagaagtcatatgttacctgtgctagcgctgccgtacaaggacagacacaaacacctcttactggtagccagcaagcttatgagcattcatcctccaaacctaaaaagccttcaagtcttttgagccggatgccgctgtccactttggcgagcaaagatccgcgccatactctatgattgatcgttcgcgggcagtctacacacagcataacaatgtcattgggacacttaatgtcttgtttgccataaaggaatacagtgaagagtgccatcttgttaagctaggaactatgggtgagtatggaacaccaaacattgacatcgaagaggggtttatcactattactcacaatggaagaacagacaccttgccttatccaaaacaagccagctctttctatcatctgagcaaagtgcatgattcccacaacatagcatttacatgcaaggcttggggtataagggccactgatcttaaccaaggtgtggtctatggtgtcagaacagatgaaactgcaatgcacgaagagctatctaacagatttgattacgatggggtctttgggaccgcactaaataggttctgtgttcaggctgctgttgggcatccacttacagtttatggaaaaggtggtcagacccggggatatctggacatcagagacactgtacagtgcgtggagctagcaatagccaacccagccaaacctggcgagttcagagtcttcaaccagttcaccgagcagttctctgtcaatgagctagccaaactggtgactgcggcaggagcgaagcttgggctagaagtggagaccaaatcgatacccaacccacgagtcgaggctgaggagcactactacaacgccaagcacacgaagcttattgagctcggcctggtgccccacctgctctcggactccctgctcgactcgcttctcaattttgccattcaatacaaggatcgggtcgacacggcacagatcatgcccagtgtgtcgtggaagaagatgggtgccaagccacggacagtctctgtttagagggtgattcaacttcccctgggttataatatcaaccatggcattgacattattgacatatgtaatgtaataattatgcacgttagtatgatttgctaggtagtgaggtgtttattacgatattaaattatattgttgcccgtgcaactcaagagttcatgtcagttgattctgctgctcactcgagccgccttgaggtcttacaatgctcctgagggttaagctgtcacctgtcacatgttgccatttcgctgatcgaactctggtggaacagatatagatcaagatcttgcaagaattgttattagttttttcggataatggaaattgtattccagcttttttgcattgtcatgcagacagccaacacgaaaacaaaacactaatcagaacatatcaccaacatcaaagaagagagaaacactggttttaaacaatatgaatttaaggagcttcaattcttgcattagatcgccatccatggcctgcgaatatgggcaaatggggaaatagtgtttctagctttagcaaacaatgaaccatgtcacacccggatttaaggacaaatttaggcgcgaatcaaatgtgtgttagaatcaaatctcacacatatgatgacccatgttacagaaacgaatgccacatctttaatatataatagagttttgtacaaaatagtaaaataa

SEQ ID NO: 76392 - DNA, 2046 bp, Zea Mays
gtcggatcgcgcttgcggcttgccgcagtcgatccgaatcgcaacgcccgaatataccactcctccctgcttgcctcccgctgatatgatatccgtccattccaatccccctcttccgctccgcctccctctagctcctctccctctcgcagccatcctcgtccccccaagaatccggacgtcgtttgtcccctccttttctgggcgtttacatctttaagctcaaagagaaaggattatgaaaatggcgcacttgatcactaattgcagctttcagacacaaacacctcttactggtagccagcaagcttatgagcattcatcctccaaacctaaaaagaatcgtgtccgtagatggaagtctctcactgctaagacaatccagctctttatcggtgacatatgtgattttgaattcctctcagaagccttcaagtcttttgagccggatgccgctgtccactttggcgagcaaagatccgcgccatactctatgattgatcgttcgcgggcagtctacacacagcataacaatgtcattgggacacttaatgtcttgtttgccataaaggaatacagtgaagagtgccatcttgttaagctaggaactatgggtgagtatggaacaccaaacattgacatcgaagaggggtttatcactattactcacaatggaagaacagacaccttgccttatccaaaacaagccagctctttctatcatctgagcaaagtgcatgattcccacaacatagcatttacatgcaaggcttggggtataagggccactgatcttaaccaaggtgtggtctatggtgtcagaacagatgaaactgcaatgcacgaagagctatctaacagatttgattacgatggggtctttgggaccgcactaaataggttctgtgttcaggctgctgttgggcatccacttacagtttatggaaaaggtggtcagacccggggatatctggacatcagagacactgtacagtgcgtggagctagcaatagccaacccagccaaacctggcgagttcagagtcttcaaccagttcaccgagcagttctctgtcaatgagctagccaaactggtgactgcggcaggagcgaagcttgggctagaagtggagaccaaatcgatacccaacccacgagtcgaggctgaggagcactactacaacgccaagcacacgaagcttattgagctcggcctggtgccccacctgctctcggactccctgctcgactcgcttctcaattttgccattcaatacaaggatcgggtcgacacggcacagatcatgcccagtgtgtcgtggaagaagatgggtgccaagccacggacagtctctgtttagagggtgattcaacttcccctgggttataatatcaaccatggcattgacattattgacatatgtaatgtaataattatgcacgttagtatgatttgctaggtagtgaggtgtttattacgatattaaattatattgttgcccgtgcaactcaagagttcatgtcagttgattctgctgctcactcgagccgccttgaggtcttacaatgctcctgagggttaagctgtcacctgtcacatgttgccatttcgctgatcgaactctggtggaacagatatagatcaagatcttgcaagaattgttattagttttttcggataatggaaattgtattccagcttttttgcattgtcatgcagacagccaacacgaaaacaaaacactaatcagaacatatcaccaacatcaaagaagagagaaacactggttttaaacaatatgaatttaaggagcttcaattcttgcattagatcgccatccatggcctgcgaatatgggcaaatggggaaatagtgtttctagctttagcaaacaatgaaccatgtcacacccggatttaaggacaaatttaggcgcgaatcaaatgtgtgttagaatcaaatctcacacatatgatgacccatgttacagaaacgaatgccacatctttaatatataatagagttttgtacaaaatagtaaaataa

SEQ ID NO: 76393 - DNA, 1287 bp, Zea Mays
gtcggatcgcgcttgcggcttgccgcagtcgatccgaatcgcaacgcccgaatataccactcctccctgcttgcctcccgctgatatgatatccgtccattccaatccccctcttccgctccgcctccctctagctcctctccctctcgcagccatcctcgtccccccaagaatccggacgtcgtttgtcccctccttttctgggcgtttacatctttaagctcaaagagaaaggattatgaaaatggcgcacttgatcactaattgcagctttcagacattctcgagttctcctaattactgccgcaatattgggcaactacagaactcaaaatcttcaaatctgtccctcaaatcttgttccaggagacaaaagaagtcatatgttacctgtgctagcgctgccgtacaaggacagacacaaacacctcttactggtagccagcaagcttatgagcattcatcctccaaacctaaaaaggtaatggttattggtggagatggatactgtgggtgggcaacagcacttcatctctcaaacaaaggttatgaggttgcgattgttgataatcttgtccgccgtgcttttgataaccaactcggtcttgattcccttacccccataacctccatccagaatcgtgtccgtagatggaagtctctcactgctaagacaatccagctctttatcggtgacatatgtgattttgaattcctctcagaagccttcaagtcttttgagccggatgccgctgtccactttggcgagcaaagatccgcgccatactctatgattgatcgttcgcgggcagtctacacacagcataacaatgtcattgggacacttaatgtcttgtttgccataaaggaatacagtgaagagtgccatcttgttaagctaggaactatgggtgagtatggaacaccaaacattgacatcgaagaggggtttatcactattactcacaatggaagaacagacaccttgccttatccaaaacaagccagctctttctatcatctgagcaaagtgcatgattcccacaacatagcatttacatgcaaggcttggggtataagggccactgatcttaaccaaggtgtggtctatggtgtcagaacagatgaaactgcaatgcacgaagagctatctaacagatttgattacgatggggtctttgggaccgcactaaataggttctgtgttcaggctgctgttgggcatccacttacagtttatggaaaaggtggtcaggtcgcctatttgggagaactccgcaacagttt

SEQ ID NO: 76394 - DNA, 1286 bp, Zea Mays
atggcgacggccttctcgccgtgggacccatgcccatccggggccggctcctggtgccaaaactggatggcacccgcggacgacacgggcggattgccgtggccgccggaggcggcgtctgcgttgacgaggccgagcgccgcggcggcggcggcggcagcggcagcagccgcggcctggcgcgacgccgcggagccccagagccctgccgccagcgaggcgccagacgaggcggaggcggcgccggcattgaaacccagcgagaggtcgtccccccggccggcgccggcgggcgacggaagccagctcgcgatcgccgtggtgtccgacgggaagcgccgccccgacggcgacggcgacgccacgcttactcgtggagggcagagcggacgttctgagctgacaggatcaggcacagtggtcgtctaggctacgcggaaggaaggagagcttcctagctagaaagcgcaagaacacaaggtgctctctataggaggagctactagctaggagtacactgcactccttttctccgtccctcgcatcacctccactccactataaagaaatctctgtctagttgcgggagcactcaaaagacctagtccctagcctagaagctagggagcgacgcctacatactagctagctagggcctaggagcagtacccctaggtgcttcgtctctctctatacgcggggtcagctgtcaattgaagtactactactacttttctctgtccttttcttccttgcttttccatagattaacgggtgaagggcgtggtagtgaacgaccggacgaagaggatcgaatcgtcggcgtggggaccgcctctgagaaattcctctgcgcggcccgggatcgctcgccacccggcctctgccccttgggtagacacgagctctgccttgctgctgccgccgcctgcagtgcaggcccaggtcaggcgtgcaggcgcagcgcgcagggtggcgctggctggactgctctgccgcggggcgcgttaaaggctgtcgctgcggcgcgtccggctgcgcaaaggacatgcgcgccaggcactaggacggcagcctagttgccgcctagatcggcagcagcgcgccccttccaggcgagcttatccgtcttcgcaactcgcagtgaccgtaccaccggctgcggctgggcaatgcgatgcgcgctctgctgtctgctcgcctgcccgggaacacagaacacggctgggtcgctcctcccgggtggtgctgcgggttaatggcgcggcagggtagatccttttttt

SEQ ID NO: 76395 - DNA, 1477 bp, Zea Mays
cccatcacctgctatcccgccgggatcgtacgccaattcgccaaaacgatggcggcggcggcggcggcgggcgcggcatcttccatcctctcgtccacgcccccgcgccgcctcaccttccctcccgcccacatccgcaaacccctcgccgcggccgcccccaaggccctcaacctgtcatcgcagaaactccccccgctctcttcatctgccacggcctcgccaccacctccgcccgacggggacgataagccggaccccatcaagctcgctttcgcccgcgctgccgcatacaagaaggggagggacagtcacagcccgagcccgagcccggcgccggccccgcctcccacgccgccgccacagtcttcaccaccgtcgcagccgcaggcttcggtcagtgagcccggcagtaaggaggcttttaagcgggcgttggagtaccgaaacggcaacggggccggagcgggcgcggctggtggtgactccccgctgctgggaggctcgccggattttggtcagaatgccctaattagtgaagaagtctcgtttggcaagagaggagggtacgagtttgatgaggctgattttttgggtctcgacttctttgagaaaaaacgttctaaaggtctaccacctgggctggctccagcttttgagcctttacgagatgacgattttcctgaggtggacataatagttggagaccccagcaaatttgacaagtctcctcgccgaactgaaatccaaccggtagacaacggggagtcaggggaagcatctcaatcgactactaaaccaaatgaagctgacaaggctgggatagcacccccttcaactgttattgagactgaagaagatgaagatgtttatagacccacagttagatcatggggaatgtttccgaggccacaaaatatttcaaaggcgtatggcggtggaagaaatatacgccttggtggagagactcaaagtgcagaagaaaaggcagccaaagataagcgcaccaaagagctaatagctgcatataggaatcgacagaacatggtaatcgatgcaaagacaaaagcagagtgcatcaaggtccaaggaagcaatgagcatgtatagcaaacttaaaaaccacccgaatagtgagatcagcaagaaagcaaacatgttcgtgttcagctttcaggcaatggatttcatgaaggtgagcagcattccagtgcccaaaagcacaggctacgagacgtacttcaccaaatttggcagcaagaagaattactacgcgagcttagaagagccggagaaatcatggacgagttgctgaggttttaataccgtataggagcacatagcttggcaatagaagattattattatgatttttttgttttcatcaaaagagcaaattattttgtgtagctgagctagggactaatttttaatcccttttctttaggccctgttccaatcctataagataaatttt

SEQ ID NO: 76396 - DNA, 1591 bp, Zea Mays
gcgcgggcaacggataacaaacgctcggcttgtcgccgtccgtcccctgccgccacccatcacctgctatcccgccgggatcgtacgccaattcgccaaaacgatggcggcggcggcggcggcgggcgcggcatcttccatcctctcgtccacgcccccgcgccgcctcaccttccctcccgcccacatccgcaaacccctcgccgcggccgcccccaaggccctcaacctgtcatcgcagaaactccccccgctctcttcatctgccacggcctcgccaccacctccgcccgacggggacgataagccggaccccatcaagctcgctttcgcccgcgctgccgcatacaagaaggggagggacagtcacagcccgagcccgagcccggcgccggccccgcctcccacgccgccgccacagtcttcaccaccgtcgcagccgcaggcttcggtcagtgagcccggcagtaaggaggcttttaagcgggcgttggagtaccgaaacggcaacggggccggagcgggcgcggctggtggtgactccccgctgctgggaggctcgccggattttggtcagaatgccctaattagtgaagaagtctcgtttggcaagagaggagggtacgagtttgatgaggctgattttttgggtctcgacttctttgagaaaaaacgttctaaaggtctaccacctgggctggctccagcttttgagcctttacgagatgacgattttcctgaggtggacataatagttggagaccccagcaaatttgacaagtctcctcgccgaactgaaatccaaccggtagacaacggggagtcaggggaagcatctcaatcgactactaaaccaaatgaagctgacaaggctgggatagcacccccttcaactgttattgagactgaagaagatgaagatgtttatagacccacagttagatcatggggaatgtttccgaggccacaaaatatttcaaaggcgtatggcggtggaagaaatatacgccttggtggagagactcaaagtgcagaagaaaaggcagccaaagataagcgcaccaaagagctaatagctgcatataggaatcgacagaacatggtaatcgatgcaaagacaaaagcagagtgcatcaagactgaatttcatggaagggctgctctgcaatggtccatctgtcttgattcactttgcaggtccaaggaagcaatgagcatgtatagcaaacttaaaaaccacccgaatagtgagatcagcaagaaagcaaacatgttcgtgttcagctttcaggcaatggatttcatgaaggtgagcagcattccagtgcccaaaagcacaggctacgagacgtacttcaccaaatttggcagcaagaagaattactacgcgagcttagaagagccggagaaatcatggacgagttgctgaggttttaataccgtataggagcacatagcttggcaatagaagattattattatgatttttttgttttcatcaaaagagcaaattattttgtgtagctgagctagggactaatttttaatcccttttctttaggccctgttccaatcctataagataaatttt

SEQ ID NO: 76397 - DNA, 1388 bp, Zea Mays
cgagtcttccccgcgccgcgcgggcaacggataacaaacgctcggcttgtcgccgtccgtcccctgccgccacccatcacctgctatcccgccgggatcgtacgccaattcgccaaaacgatggcggcggcggcggcggcgggcgcggcatcttccatcctctcgtccacgcccccgcgccgcctcaccttccctcccgcccacatccgcaaacccctcgccgcggccgcccccaaggccctcaacctgtcatcgcagaaactccccccgctctcttcatctgccacggcctcgccaccacctccgcccgacggggacgataagccggaccccatcaagctcgctttcgcccgcgctgccgcatacaagaaggggagggacagtcacagcccgagcccgagcccggcgccggccccgcctcccacgccgccgccacagtcttcaccaccgtcgcagccgcaggcttcggtcagtgagcccggcagtaaggaggcttttaagcgggcgttggagtaccgaaacggcaacggggccggagcgggcgcggctggtggtgactccccgctgctgggaggctcgccggattttgtatggcggtggaagaaatatacgccttggtggagagactcaaagtgcagaagaaaaggcagccaaagataagcgcaccaaagagctaatagctgcatataggaatcgacagaacatggtaatcgatgcaaagacaaaagcagagtgcatcaaggccttgagggaaggtgatgagatgatgaatactggaaggcttaaacaagcattaccttattatgaaaaagtgatggacgctgtggactttaagactgaatttcatggaagggctgctctgcaatggtccatctgtcttgattcactttgcaggtccaaggaagcaatgagcatgtatagcaaacttaaaaaccacccgaatagtgagatcagcaagaaagcaaacatgttcgtgttcagctttcaggcaatggatttcatgaaggtgagcagcattccagtgcccaaaagcacaggctacgagacgtacttcaccaaatttggcagcaagaagaattactacgcgagcttagaagagccggaggtgggaatcgagcagatcgtcccgtacatcatctttcttgtttcgccgatatttttagttgcttttgttgcactgagaaaatccttccaactatgaacagaaatcatggacgagttgctgaggttttaataccgtataggagcacatagcttggcaatagaagattattattatgatttttttgttttcatcaaaagagcaaattattttgtgtagctgagctagggactaatttttaatcccttttctttaggccctgttccaatcctataagataaatttt

SEQ ID NO: 76398 - DNA, 1774 bp, Zea Mays
aaatcgtgcctcgagtcttccccgcgccgcgcgggcaacggataacaaacgctcggcttgtcgccgtccgtcccctgccgccacccatcacctgctatcccgccgggatcgtacgccaattcgccaaaacgatggcggcggcggcggcggcgggcgcggcatcttccatcctctcgtccacgcccccgcgccgcctcaccttccctcccgcccacatccgcaaacccctcgccgcggccgcccccaaggccctcaacctgtcatcgcagaaactccccccgctctcttcatctgccacggcctcgccaccacctccgcccgacggggacgataagccggaccccatcaagctcgctttcgcccgcgctgccgcatacaagaaggggagggacagtcacagcccgagcccgagcccggcgccggccccgcctcccacgccgccgccacagtcttcaccaccgtcgcagccgcaggcttcggtcagtgagcccggcagtaaggaggcttttaagcgggcgttggagtaccgaaacggcaacggggccggagcgggcgcggctggtggtgactccccgctgctgggaggctcgccggattttggtcagaatgccctaattagtgaagaagtctcgtttggcaagagaggagggtacgagtttgatgaggctgattttttgggtctcgacttctttgagaaaaaacgttctaaaggtctaccacctgggctggctccagcttttgagcctttacgagatgacgattttcctgaggtggacataatagttggagaccccagcaaatttgacaagtctcctcgccgaactgaaatccaaccggtagacaacggggagtcaggggaagcatctcaatcgactactaaaccaaatgaagctgacaaggctgggatagcacccccttcaactgttattgagactgaagaagatgaagatgtttatagacccacagttagatcatggggaatgtttccgaggccacaaaatatttcaaaggcgtatggcggtggaagaaatatacgccttggtggagagactcaaagtgcagaagaaaaggcagccaaagataagcgcaccaaagagctaatagctgcatataggaatcgacagaacatggtaatcgatgcaaagacaaaagcagagtgcatcaagttttcatctttgctttaatgcacatgtatttgttacgtatttgtaaaattgtcatatggaaggccttgagggaaggtgatgagatgatgaatactggaaggcttaaacaagcattaccttattatgaaaaagtgatggacgctgtggactttaagactgaatttcatggaagggctgctctgcaatggtccatctgtcttgattcactttgcaggtccaaggaagcaatgagcatgtatagcaaacttaaaaaccacccgaatagtgagatcagcaagaaagcaaacatgttcgtgttcagctttcaggcaatggatttcatgaaggtgagcagcattccagtgcccaaaagcacaggctacgagacgtacttcaccaaatttggcagcaagaagaattactacgcgagcttagaagagccggagaaatcatggacgagttgctgaggttttaataccgtataggagcacatagcttggcaatagaagattattattatgatttttttgttttcatcaaaagagcaaattattttgtgtagctgagctagggactaatttttaatcccttttctttaggccctgttccaatcctataagataaatttt

SEQ ID NO: 76399 - DNA, 1656 bp, Zea Mays
aaaaaatcgtgcctcgagtcttccccgcgccgcgcgggcaacggataacaaacgctcggcttgtcgccgtccgtcccctgccgccacccatcacctgctatcccgccgggatcgtacgccaattcgccaaaacgatggcggcggcggcggcggcgggcgcggcatcttccatcctctcgtccacgcccccgcgccgcctcaccttccctcccgcccacatccgcaaacccctcgccgcggccgcccccaaggccctcaacctgtcatcgcagaaactccccccgctctcttcatctgccacggcctcgccaccacctccgcccgacggggacgataagccggaccccatcaagctcgctttcgcccgcgctgccgcatacaagaaggggagggacagtcacagcccgagcccgagcccggcgccggccccgcctcccacgccgccgccacagtcttcaccaccgtcgcagccgcaggcttcggtcagtgagcccggcagtaaggaggcttttaagcgggcgttggagtaccgaaacggcaacggggccggagcgggcgcggctggtggtgactccccgctgctgggaggctcgccggattttggtcagaatgccctaattagtgaagaagtctcgtttggcaagagaggagggtacgagtttgatgaggctgattttttgggtctcgacttctttgagaaaaaacgttctaaaggtctaccacctgggctggctccagcttttgagcctttacgagatgacgattttcctgaggtggacataatagttggagaccccagcaaatttgacaagtctcctcgccgaactgaaatccaaccggtagacaacggggagtcaggggaagcatctcaatcgactactaaaccaaatgaagctgacaaggctgggatagcacccccttcaactgttattgagactgaagaagatgaagatgtttatagacccacagttagatcatggggaatgtttccgaggccacaaaatatttcaaaggcgtatggcggtggaagaaatatacgccttggtggagagactcaaagtgcagaagaaaaggcagccaaagataagcgcaccaaagagctaatagctgcatataggaatcgacagaacatggtaatcgatgcaaagacaaaagcagagtgcatcaaggccttgagggaaggtgatgagatgatgaatactggaaggcttaaacaagcattaccttattatgaaaaagtgatggacgctgtggactttaaggtccaaggaagcaatgagcatgtatagcaaacttaaaaaccacccgaatagtgagatcagcaagaaagcaaacatgttcgtgttcagctttcaggcaatggatttcatgaaggtgagcagcattccagtgcccaaaagcacaggctacgagacgtacttcaccaaatttggcagcaagaagaattactacgcgagcttagaagagccggagaaatcatggacgagttgctgaggttttaataccgtataggagcacatagcttggcaatagaagattattattatgatttttttgttttcatcaaaagagcaaattattttgtgtagctgagctagggactaatttttaatcccttttctttaggccctgttccaatcctataagataaatttt

SEQ ID NO: 76400 - DNA, 494 bp, Zea Mays
ggcaggccttgaacaaggtggggttgcatcacttgactccaggattgacagcatcaatatttcaggattggtggaaagaagctgagtgtcaggtttcaacaaatcctagtgctgttgggggctgcagctgcaagagttctttcatggtgaaatagcttcaattaccttgaagagatcaataattggaaatagcattctgtagcgaatcatacgctttggatctgagtgtacaattgttattttttggtagttctgaagacgtttcttttttagttttgttactgttggaaacatcatcacaaactgtctggttcaatctgtacccctctaacttgtgatagttgtgatatgatgacaagtttatgtacataatcttgtagctattaacagttgactttatgttgctccttataaaattgcaaaataagacgaacagtatttttgtattgatatgactgaatatactgaaaatgtttttagtattaatcttcact

SEQ ID NO: 76401 - DNA, 1218 bp, Zea Mays
gtgactcaaattcgagcacttatttcaaactagacatataccttcatctaataatgtagcttcgtcgctaaccggtaatataagacaaacataggttaaacttttaaatgaacggttttatctaagcacatgggttaaatctgatttctcacaaaaaccgcttaaacacaaaagcacgatttttataattaatcatgatacatttctaactgcttctggagttcttcagccatggagttgcccggatccagatgtcctcaccacccaccacccacagggcacaaggccaccactcaccagataccgaagccgtagcaaagcaaactagcaaatcaaggcaagtctggaacggccccaccgatccgacccaaagcccaaatcggattcccctcgtttctcatcacgccaccgtttacccgccgccgcactggcagcggcgatggcgtcgtcgtcgtcgcggcccctgctctgccgcctcgcggaactggccagcggccgcgtccgcgccaactaccgcatgctctcatccgccttttcatccactgcctccaccgagagggtttcgcagtcgccggcggagcccgaggcggtgctcatgacggaaggttgcgtccgggtaagatgctgcgcttaagcgttgaagctggtggatgttctgggtttcaatattctttcgctcttgatgacaagaaaaactcagatgatagggtttttgagactgatggtgttaaattggtcgtggatgacatctcatatgactttgtaaaaggtgccactgtggattatgaggaggaacttatacgttcagcgttcgtggtttcaacaaatcctagtgctgttgggggctgcagctgcaagagttctttcatggtgaaatagcttcaattaccttgaagagatcaataattggaaatagcattctgtagcgaatcatacgctttggatctgagtgtacaattgttattttttggtagttctgaagacgtttcttttttagttttgttactgttggaaacatcatcacaaactgtctggttcaatctgtacccctctaacttgtgatagttgtgatatgatgacaagtttatgtacataatcttgtagctattaacagttgactttatgttgctccttataaaattgcaaaataagacgaacagtatttttgtattgatatgactgaatatactgaaaatgtttttagtattaatcttcact

SEQ ID NO: 76402 - DNA, 1463 bp, Zea Mays
gtcagatcagatcaaaccaactctcaacctcctctgcttcttgttccttgacttccttcacactccttctagaaccctctagaagcaatcgcaaaaatgccgctccatcaccctaagcaccgccaccatgacgaagatctcctcccctaccgccgctccgatgacgaggccaagccgcgccggccgtacacccccaccttcccctcctcccccgcctctaccaaccgcctcctcctcttcttcgccgtcgcctgcctcgtcctcgccgctgcctccttcgccttcgccgtttccaccagccgcaaccgtcagtccctgccgcagcctccgcctactgtcgccttccgctgtggccgcgccgaggattcgctccgttccttcctagcggcctcctcgcacggcaacttctctgccggcgacagggagaaggtgctcgctgtcgttggcgtacacacggagcatgggaatttctccgctgcccgacgcgctgcgctccgcgctacctggttcccgctcaaccccgaaggcatctttagaacatggaactggattatcatttaggtttgtcgctagacggccaaaggacaaagataaaatggaagatcttcagaaagaggcggatacttatcatgactttttgtttattgatgctgatgaggccacaaagcccccacagacgatcatttttcaaagcagcttaccacatgttcaatgcagaattctatgtcaaagctagtgatgatatctacctgcgcccaggtacgaaagttcttgggaactgttgggtaacgagtacttcatgcatgcatctggttcactatatgctctttcttctgaggtggttgaagctctagctactgcaaagagtgatagcttaaggatgtttgattatgaagatgttacaatcggcgcatggatgcttgctatgaatgtaaagcatgaagacaaccgagcaatgtgtgattcagtatgtacccctacctccatcgctgtatgggacagtaagaaatgctcaggtacttgtaacgtcgctgacaaaataaagcagctccataacaccactgtgtgctcaaagagcccaacgttgccacctgaggtggaggaggaagaatagaaaccgaaacagttttggcccttgaaaaagctatggcggtgatactccaattagagcactggttttgtcgtcgactgcatttccatactgctgtatcattagtgacctttcaacaccagcgatggagagttcttggagaatcgacaccatcacattacatgtagtatttcgagtctacccaatatgggttcagatgacgtgttgtacttgtaccttttactaatcggtggaaccaatgagggcacagagacattcttggctgtatgatgtagtataaattgtacacagagtgacctatgtggtttcattcttcgctgaccagacggtgggcattccatggtttgttttc

SEQ ID NO: 76403 - DNA, 1545 bp, Zea Mays
gtcagatcagatcaaaccaactctcaacctcctctgcttcttgttccttgacttccttcacactccttctagaaccctctagaagcaatcgcaaaaatgccgctccatcaccctaagcaccgccaccatgacgaagatctcctcccctaccgccgctccgatgacgaggccaagccgcgccggccgtacacccccaccttcccctcctcccccgcctctaccaaccgcctcctcctcttcttcgccgtcgcctgcctcgtcctcgccgctgcctccttcgccttcgccgtttccaccagccgcaaccgtcagtccctgccgcagcctccgcctactgtcgccttccgctgtggccgcgccgaggattcgctccgttccttcctagcggcctcctcgcacggcaacttctctgccggcgacagggagaaggtgctcgctgtcgttggcgtacacacggagcatgggaatttctccgctgcccgacgcgctgcgctccgcgctacctggttcccgctcaaccccgaaggcatctttagaacatggaactggattatcatttaggtttgtcgctagacggccaaaggacaaagataaaatggaagatcttcagaaagaggcggatacttatcatgactttttgtttattgatgctgatgaggccacaaagcccccacagacgatgttagcatttttcaaagcagcttaccacatgttcaatgcagaattctatgtcaaagctagtgatgatatctacctgcgcccagatagacttgctgctcttcttgcaaaagaaagacctcagcacaagacatacatcggttgcatgaaaaaaggaccagttgtcaatgatccaaatttgaaatggtacgaaagttcttgggaactgttgggtaacgagtacttcatgcatgcatctggttcactatatgctctttcttctgaggtggttgaagctctagctactgcaaagagtgatagatgttacaatcggcgcatggatgcttgctatgaatgtaaagcatgaagacaaccgagcaatgtgtgattcagtatgtacccctacctccatcgctgtatgggacagtaagaaatgctcaggtacttgtaacgtcgctgacaaaataaagcagctccataacaccactgtgtgctcaaagagcccaacgttgccacctgaggtggaggaggaagaatagaaaccgaaacagttttggcccttgaaaaagctatggcggtgatactccaattagagcactggttttgtcgtcgactgcatttccatactgctgtatcattagtgacctttcaacaccagcgatggagagttcttggagaatcgacaccatcacattacatgtagtatttcgagtctacccaatatgggttcagatgacgtgttgtacttgtaccttttactaatcggtggaaccaatgagggcacagagacattcttggctgtatgatgtagtataaattgtacacagagtgacctatgtggtttcattcttcgctgaccagacggtgggcattccatggtttgttttc

SEQ ID NO: 76404 - DNA, 1473 bp, Zea Mays
gtcagatcagatcaaaccaactctcaacctcctctgcttcttgttccttgacttccttcacactccttctagaaccctctagaagcaatcgcaaaaatgccgctccatcaccctaagcaccgccaccatgacgaagatctcctcccctaccgccgctccgatgacgaggccaagccgcgccggccgtacacccccaccttcccctcctcccccgcctctaccaaccgcctcctcctcttcttcgccgtcgcctgcctcgtcctcgccgctgcctccttcgccttcgccgtttccaccagccgcaaccgtcagtccctgccgcagcctccgcctactgtcgccttccgctgtggccgcgccgaggattcgctccgttccttcctagcggcctcctcgcacggcaacttctctgccggcgacagggagaaggtgctcgctgtcgttggcgtacacacggagcatgggaatttctccgctgcccgacgcgctgcgctccgcgctacctggttcccgctcaaccccgaaggcatcgtaagtttagaacatggaactggattatcatttaggtttgtcgctagacggccaaaggacaaagataaaatggaagatcttcagaaagaggcggatacttatcatgactttttgtttattgatgctgatgaggccacaaagcccccacagacgatgttagcatttttcaaagcagcttaccacatgttcaatgcagaattctatgtcaaagctagtgatgatatctacctgcgcccaggtacgaaagttcttgggaactgttgggtaacgagtacttcatgcatgcatctggttcactatatgctctttcttctgaggtggttgaagctctagctactgcaaagagtgatagcttaaggatgtttgattatgaagatgttacaatcggcgcatggatgcttgctatgaatgtaaagcatgaagacaaccgagcaatgtgtgattcagtatgtacccctacctccatcgctgtatgggacagtaagaaatgctcaggtacttgtaacgtcgctgacaaaataaagcagctccataacaccactgtgtgctcaaagagcccaacgttgccacctgaggtggaggaggaagaatagaaaccgaaacagttttggcccttgaaaaagctatggcggtgatactccaattagagcactggttttgtcgtcgactgcatttccatactgctgtatcattagtgacctttcaacaccagcgatggagagttcttggagaatcgacaccatcacattacatgtagtatttcgagtctacccaatatgggttcagatgacgtgttgtacttgtaccttttactaatcggtggaaccaatgagggcacagagacattcttggctgtatgatgtagtataaattgtacacagagtgacctatgtggtttcattcttcgctgaccagacggtgggcattccatggtttgttttc

SEQ ID NO: 76405 - DNA, 643 bp, Zea Mays
cagtgatgtttcttaggaggtgatgcgtggttggccggctctgccggacagctttggagaaccctgatatattgtttctaaaagtgaattttgatgaaaacaaacctatgtgcaaacgactgaatgtcaaagtccttcctttcttccatttttatcgtggagctgacgggctacttgaggctttctcctgttccttagctaagtttcagaagctgaaggatgccattgcaatgcacaacactgctcgttgcagcattggtccacctgttggagttggcgatgttgacttgctggataacgcgagccctcaagagaaacctgcagaagctagcccacggtagattcatgagaatgagctccacctcatccacttctacgtcctgctcattgttttcttcactatagatctcaatgtaatcagttgtggagaacataagtagcctcggttcatgaatcagatgtatggattattgtaacgcattcttgaaagggaaaaacatgtattatagcgtgataactgtaccttttgtgtttgttgtacagaaccatagaattgtacttcattttaggtgaagacgcctttgaacatttaagctcccttgtgggccgttttatagagtcagtcagtccagtatttttgcgc

SEQ ID NO: 76406 - DNA, 955 bp, Zea Mays
cgcagattttttctggcatcgttatctcctggccgcttcccgcttcttcttcatacgtatgccggcgttctcatctccagccgttgccatctcccttcgtcttctccctccgcctcgcgctgtcgagcttcctccatgcgcagtgcgcccagtcgagcggtccctgctgcgcgccgcggtcttccagtgttccctctgcctgctcgagcgcacgcccagcgccctggattccttggccttcgcgccctggtcctttgcccggaggtccctgttccgctcggcgctctccctgctcgctctggacgcgcagctcccttcgtcgcgcccaggccgcatccagctccagctcgccgaagtccctcccacggccgtctccctcaagccgccgtgagctccatggctgctgcgttcctctctgccgcgcgcccctggagcttcttcgcctgcgcgctcctctgcgtcgagctccctgcgcagcggcttccattccccgctgcaactccagcttcttccttgggccgccgcatcccttgcttttccctggtcggttcctgcacatctcagccatggatgccgtgggcttgttcctaatcacgttagggctagcgcgcaggtctccctcgcctccagcaaccctggtcgctgcatcatccagcgccgagatccttcatctcacccctcccaagaccgagcttgccaaactcctcaatctttttttttctctctgtgtattggttgcgggctggctgatgttcagagctgcatatgacactccttagttgttcgatgaaatgtcccagttaagcttcatcaccgatctcatgaattccgatcgaattggatattggtacgtgaattaaccacgtgatgcgaagaaccagaactgagtcgaccacaagatggtgctgatgaacggaactgaagatgggcagacgaaacaagtatcagaacaaag

SEQ ID NO: 76407 - DNA, 1150 bp, Zea Mays
tccaaatctattgttgttttgtgcagatgtcattttttagtgtcaacaagatgataaacccttcactgcttttcaattgacaaatgctccagacttacctggctgataatgcccaaaagcatgtgtgtgctttaaccgactgatagaagatgagcaatagaaggttcacatgtaaacatgaagttggctgaagtgtcttcctaccacttaacacagcggataacttgggtgttcatgtggtggaatctcaaaattggactgggacacaagaatgagaattgcacttgaagcagccaaaggtttggaatatcttcatgaacatgttaatccacctgttatacatagagacttcaagagtagcaatattctcctggacaaggacttccatgcaagaatttcagactttggtctagccaaacttggatctgatagagctggtggtcatgtctcaactcgagttttgggcacacaaggctatgttgcaccagagtatgcattggctgggcatttgactaccaaatcagatgtgtacagttatggtgttgtgcttttggaattgcttactggcagagtaccagttgatatgaagaggtctcctggagaaggtgttttagttaactgggcattgcctatgctcactgaccgagataaagttgtgcggatcttggatccagcatcggaaggtcaatattccttgaaagatgctgtccaagtggctgctattgctgccatgtgtgttcaaccagaggctgactataggccattaatggctgatgttgtccaatcgctggttccacttgtcaagaaccgttataatcagaaatcttgcaatcccaatgtgcaaccatcgaagccacttgactaggagaaaagctagtgtttgatctgcagtttgtgctcgtccttctggaacccttctcgagttctcgtctataacgaactactgttgagacagattcacacgcttcctaacaatgatttcgtctgctggtgccctcctgattttgttgttttttgtaggggtgtgttgtgtgcaggtaggttgcaaatttaaaggggatatagttgaacggtcctgagaacttatttgagtctgaaggcaagtttctgtcacctaaaattaggtgcatgttgatggtgggctgttggg

SEQ ID NO: 76408 - DNA, 1336 bp, Zea Mays
ttgggggttcccgtggttgttcacttaaagatcatatcctctttctaaacatggaccagtaacagagtaacttgtggtggagttgctgagtaggctccgatcaccgtatttattgggcctgattggccattgttcggaaggtgaacactgtctacttgtatatgagttcatggccaatgggggtctccaggagcatctctatccaaacagagacttacctggctgataatgcccaaaagcatgtgtgtgctttaaccgactgatagaagatgagcaatagaaggttatgtacttttattgtgttgatgtgctgctttttgctaatatacgaagtaaataacctttttttaggttcacatgtaaacatgaagttggctgaagtgtcttcctaccacttaacacagcggataacttgggttcatgtggtggaatctcaaaattggactgggacacaagaatgagaattgcacttgaagcagccaaaggtttggaatatcttcatgaacatgttaatccacctgttatacatagagacttcaagagtagcaatattctcctggacaaggacttccatgcaagaatttcagactttggtctagccaaacttggatctgatagagctggtggtcatgtctcaactcgagttttgggcacacaaggctatgttgcaccagagtatgcattggctgggcatttgactaccaaatcagatgtgtacagttatggtgttgtgcttttggaattgcttactggcagagtaccagttgatatgaagaggtctcctggagaaggtgttttagttaactgggcattgcctatgctcactgaccgagataaagttgtgcggatcttggatccagcatcggaaggtcaatattccttgaaagatgctgtccaagtggctgctattgctgccatgtgtgttcaaccagaggctgactataggccattaatggctgatgttgtccaatcgctggttccacttgtcaagaaccgttataatcagaaatcttgcaatcccaatgtgcaaccatcgaagccacttgactaggagaaaagctagtgtttgatctgcagtttgtgctcgtccttctggaacccttctcgagttctcgtctataacgaactactgttgagacagattcacacgcttcctaacaatgatttcgtctgctggtgccctcctgattttgttgttttttgtaggggtgtgttgtgtgcaggtaggttgcaaatttaaaggggatatagttgaacggtcctgagaacttatttgagtctgaaggcaagtttctgtcacctaaaattaggtgcatgttgatggtgggctgttggg

SEQ ID NO: 76409 - DNA, 1189 bp, Zea Mays
gtgaagctctgccgtccacatcagtgattatcgttagtgcaaatgggtcactgtgcgttgggggttcccgtggttgttcacttaaagatcatatcctctttctaaacatggaccagtaacagagtaacttgtggtggagttgctgagtaggctccgatcaccgtatttattgggcctgattggccattgttcggaaggtgaacactgtctacttgtatatgagttcatggccaatgggggtctccaggagcatctctatccaaacagaggttcatgtggtggaatctcaaaattggactgggacacaagaatgagaattgcacttgaagcagccaaaggtttggaatatcttcatgaacatgttaatccacctgttatacatagagacttcaagagtagcaatattctcctggacaaggacttccatgcaagaatttcagactttggtctagccaaacttggatctgatagagctggtggtcatgtctcaactcgagttttgggcacacaaggctatgttgcaccagagtatgcattggctgggcatttgactaccaaatcagatgtgtacagttatggtgttgtgcttttggaattgcttactggcagagtaccagttgatatgaagaggtctcctggagaaggtgttttagttaactgggcattgcctatgctcactgaccgagataaagttgtgcggatcttggatccagcatcggaaggtcaatattccttgaaagatgctgtccaagtggctgctattgctgccatgtgtgttcaaccagaggctgactataggccattaatggctgatgttgtccaatcgctggttccacttgtcaagaaccgttataatcagaaatcttgcaatcccaatgtgcaaccatcgaagccacttgactaggagaaaagctagtgtttgatctgcagtttgtgctcgtccttctggaacccttctcgagttctcgtctataacgaactactgttgagacagattcacacgcttcctaacaatgatttcgtctgctggtgccctcctgattttgttgttttttgtaggggtgtgttgtgtgcaggtaggttgcaaatttaaaggggatatagttgaacggtcctgagaacttatttgagtctgaaggcaagtttctgtcacctaaaattaggtgcatgttgatggtgggctgttggg

SEQ ID NO: 76410 - DNA, 1826 bp, Zea Mays
aaagcctgtctagaaccaaacacccctctccaccgactgcaaataatccgactcccactgctgggtgccctgtcccctacctcgggttccgcgcagaggaaggtgagacaccaattccactcccaaaccccacgaaaaccctcgccgtcttcgtccaaatcactcgcttgatctctcctctccgaacccggcaaccccttgaactagggttccagcgacccaatgacggacggcgacgacgagtacaagcgcgaggagtcggtggccctgctggtcatcgtcttcctcgccgcgctctcgctcctttccgtcatcgctgccttcgcctactactgctacattactcgcaaggtctcccgtcgcctccaggcgttccatatccccaagcgttccagctcccatcatacgcttcctccccgggccctgccgccgcagcagcaggggacggacaacccgtccagtaactccaccagagatggtgtcggagcggcggcgatgtcggtggtggctgctggggagaggggcgtgcaggtgttcagctaccggcagcttcacgcggccacgggtgggtttgaccgggcgcacatggttgggcagggcagcttcgggaccgtgtaccgcggggtgctccccgacgggaggaaggtcgcggtcaagctcatggaccgcccagggaaacagggagaagatgagtttgagatggaggtggagttgctgagtaggctccgatcaccgtatttattgggcctgattggccattgttcggaaggtgaacactgtctacttgtatatgagttcatggccaatgggggtctccaggagcatctctatccaaacagaggttcacatgtaaacatgaagttggctgaagtgtcttcctaccacttaacacagcggataacttgggttcatgtggtggaatctcaaaattggactgggacacaagaatgagaattgcacttgaagcagccaaaggtttggaatatcttcatgaacatgttaatccacctgttatacatagagacttcaagagtagcaatattctcctggacaaggacttccatgcaagaatttcagactttggtctagccaaacttggatctgatagagctggtggtcatgtctcaactcgagttttgggcacacaaggctatgttgcaccagagtatgcattggctgggcatttgactaccaaatcagatgtgtacagttatggtgttgtgcttttggaattgcttactggcagagtaccagttgatatgaagaggtctcctggagaaggtgttttagttaactgggcattgcctatgctcactgaccgagataaagttgtgcggatcttggatccagcatcggaaggtcaatattccttgaaagatgctgtccaagtggctgctattgctgccatgtgtgttcaaccagaggctgactataggccattaatggctgatgttgtccaatcgctggttccacttgtcaagaaccgttataatcagaaatcttgcaatcccaatgtgcaaccatcgaagccacttgactaggagaaaagctagtgtttgatctgcagtttgtgctcgtccttctggaacccttctcgagttctcgtctataacgaactactgttgagacagattcacacgcttcctaacaatgatttcgtctgctggtgccctcctgattttgttgttttttgtaggggtgtgttgtgtgcaggtaggttgcaaatttaaaggggatatagttgaacggtcctgagaacttatttgagtctgaaggcaagtttctgtcacctaaaattaggtgcatgttgatggtgggctgttggg

SEQ ID NO: 76411 - DNA, 1832 bp, Zea Mays
aaagcctgtctagaaccaaacacccctctccaccgactgcaaataatccgactcccactgctgggtgccctgtcccctacctcgggttccgcgcagaggaaggtgagacaccaattccactcccaaaccccacgaaaaccctcgccgtcttcgtccaaatcactcgcttgatctctcctctccgaacccggcaaccccttgaactagggttccagcgacccaatgacggacggcgacgacgagtacaagcgcgaggagtcggtggccctgctggtcatcgtcttcctcgccgcgctctcgctcctttccgtcatcgctgccttcgcctactactgctacattactcgcaaggtctcccgtcgcctccaggcgttccatatccccaagcgttccagctcccatcatacgcttcctccccgggccctgccgccgcagcagcaggggacggacaacccgtccagtaactccaccagagatggtgtcggagcggcggcgatgtcggtggtggctgctggggagaggggcgtgcaggtgttcagctaccggcagcttcacgcggccacgggtgggtttgaccgggcgcacatggttgggcagggcagcttcgggaccgtgtaccgcggggtgctccccgacgggaggaaggtcgcggtcaagctcatggaccgcccagggaaacagggagaagatgagtttgagatggaggtggagttgctgagtaggctccgatcaccgtatttattgggcctgattggccattgttcggaaggtgaacactgtctacttgtatatgagttcatggccaatgggggtctccaggagcatctctatccaaacagagacttacctggctgataatgcccaaaagcatgtgtgtgctttaaccgactgatagaagatgagcaatagaaggttcatgtggtggaatctcaaaattggactgggacacaagaatgagaattgcacttgaagcagccaaaggtttggaatatcttcatgaacatgttaatccacctgttatacatagagacttcaagagtagcaatattctcctggacaaggacttccatgcaagaatttcagactttggtctagccaaacttggatctgatagagctggtggtcatgtctcaactcgagttttgggcacacaaggctatgttgcaccagagtatgcattggctgggcatttgactaccaaatcagatgtgtacagttatggtgttgtgcttttggaattgcttactggcagagtaccagttgatatgaagaggtctcctggagaaggtgttttagttaactgggcattgcctatgctcactgaccgagataaagttgtgcggatcttggatccagcatcggaaggtcaatattccttgaaagatgctgtccaagtggctgctattgctgccatgtgtgttcaaccagaggctgactataggccattaatggctgatgttgtccaatcgctggttccacttgtcaagaaccgttataatcagaaatcttgcaatcccaatgtgcaaccatcgaagccacttgactaggagaaaagctagtgtttgatctgcagtttgtgctcgtccttctggaacccttctcgagttctcgtctataacgaactactgttgagacagattcacacgcttcctaacaatgatttcgtctgctggtgccctcctgattttgttgttttttgtaggggtgtgttgtgtgcaggtaggttgcaaatttaaaggggatatagttgaacggtcctgagaacttatttgagtctgaaggcaagtttctgtcacctaaaattaggtgcatgttgatggtgggctgttggg

SEQ ID NO: 76412 - DNA, 1965 bp, Zea Mays
aaagcctgtctagaaccaaacacccctctccaccgactgcaaataatccgactcccactgctgggtgccctgtcccctacctcgggttccgcgcagaggaaggtgagacaccaattccactcccaaaccccacgaaaaccctcgccgtcttcgtccaaatcactcgcttgatctctcctctccgaacccggcaaccccttgaactagggttccagcgacccaatgacggacggcgacgacgagtacaagcgcgaggagtcggtggccctgctggtcatcgtcttcctcgccgcgctctcgctcctttccgtcatcgctgccttcgcctactactgctacattactcgcaaggtctcccgtcgcctccaggcgttccatatccccaagcgttccagctcccatcatacgcttcctccccgggccctgccgccgcagcagcaggggacggacaacccgtccagtaactccaccagagatggtgtcggagcggcggcgatgtcggtggtggctgctggggagaggggcgtgcaggtgttcagctaccggcagcttcacgcggccacgggtgggtttgaccgggcgcacatggttgggcagggcagcttcgggaccgtgtaccgcggggtgctccccgacgggaggaaggtcgcggtcaagctcatggaccgcccagggaaacagggagaagatgagtttgagatggaggtggagttgctgagtaggctccgatcaccgtatttattgggcctgattggccattgttcggaaggtgaacactgtctacttgtatatgagttcatggccaatgggggtctccaggagcatctctatccaaacagagacttacctggctgataatgcccaaaagcatgtgtgtgctttaaccgactgatagaagatgagcaatagaaggttatgtacttttattgtgttgatgtgctgctttttgctaatatacgaagtaaataacctttttttaggttcacatgtaaacatgaagttggctgaagtgtcttcctaccacttaacacagcggataacttgggttcatgtggtggaatctcaaaattggactgggacacaagaatgagaattgcacttgaagcagccaaaggtttggaatatcttcatgaacatgttaatccacctgttatacatagagacttcaagagtagcaatattctcctggacaaggacttccatgcaagaatttcagactttggtctagccaaacttggatctgatagagctggtggtcatgtctcaactcgagttttgggcacacaaggctatgttgcaccagagtatgcattggctgggcatttgactaccaaatcagatgtgtacagttatggtgttgtgcttttggaattgcttactggcagagtaccagttgatatgaagaggtctcctggagaaggtgttttagttaactgggcattgcctatgctcactgaccgagataaagttgtgcggatcttggatccagcatcggaaggtcaatattccttgaaagatgctgtccaagtggctgctattgctgccatgtgtgttcaaccagaggctgactataggccattaatggctgatgttgtccaatcgctggttccacttgtcaagaaccgttataatcagaaatcttgcaatcccaatgtgcaaccatcgaagccacttgactaggagaaaagctagtgtttgatctgcagtttgtgctcgtccttctggaacccttctcgagttctcgtctataacgaactactgttgagacagattcacacgcttcctaacaatgatttcgtctgctggtgccctcctgattttgttgttttttgtaggggtgtgttgtgtgcaggtaggttgcaaatttaaaggggatatagttgaacggtcctgagaacttatttgagtctgaaggcaagtttctgtcacctaaaattaggtgcatgttgatggtgggctgttggg

SEQ ID NO: 76413 - DNA, 1158 bp, Zea Mays
aaagcctgtctagaaccaaacacccctctccaccgactgcaaataatccgactcccactgctgggtgccctgtcccctacctcgggttccgcgcagaggaaggtggagttgctgagtaggctccgatcaccgtatttattgggcctgattggccattgttcggaaggtgaacactgtctacttgtatatgagttcatggccaatgggggtctccaggagcatctctatccaaacagaggttcatgtggtggaatctcaaaattggactgggacacaagaatgagaattgcacttgaagcagccaaaggtttggaatatcttcatgaacatgttaatccacctgttatacatagagacttcaagagtagcaatattctcctggacaaggacttccatgcaagaatttcagactttggtctagccaaacttggatctgatagagctggtggtcatgtctcaactcgagttttgggcacacaaggctatgttgcaccagagtatgcattggctgggcatttgactaccaaatcagatgtgtacagttatggtgttgtgcttttggaattgcttactggcagagtaccagttgatatgaagaggtctcctggagaaggtgttttagttaactgggcattgcctatgctcactgaccgagataaagttgtgcggatcttggatccagcatcggaaggtcaatattccttgaaagatgctgtccaagtggctgctattgctgccatgtgtgttcaaccagaggctgactataggccattaatggctgatgttgtccaatcgctggttccacttgtcaagaaccgttataatcagaaatcttgcaatcccaatgtgcaaccatcgaagccacttgactaggagaaaagctagtgtttgatctgcagtttgtgctcgtccttctggaacccttctcgagttctcgtctataacgaactactgttgagacagattcacacgcttcctaacaatgatttcgtctgctggtgccctcctgattttgttgttttttgtaggggtgtgttgtgtgcaggtaggttgcaaatttaaaggggatatagttgaacggtcctgagaacttatttgagtctgaaggcaagtttctgtcacctaaaattaggtgcatgttgatggtgggctgttggg

SEQ ID NO: 76414 - DNA, 567 bp, Zea Mays
gcagagggcacaactacaaatggggattatctccttccattcaaaacaggtgcttttcttgcaaaggcaccagttcaaccagtcattttgagatatccttacaaaagatttaatgcagcatgggattccatgtcaggggcacgtcatgtatttctgctgctctgtcaatttgtaaattacctagaggtggtccgcttaccagtttactatccttctgagcaagaaaaggatgatcctaagctctatgcaaacaatgtacggaaactgatggcagtggagggaaacttgattctttcagaccttgggctggcggagaagcgagtgtaccatgccgcactgaatgtgatccggtgtgtggcgccaccggtggtgccagagccggacagggacgtcgcggcccccgtgggcggcggtgaccggaaggcggctaagctcgggagctagagcagcatgagcagcaaccgcgacagtaagaagtgaaagagcagcagcagcagcttcgggaggagatccacatccacctgcgaggaaaggcagggggtcttccgcatgctcatgagctggaac

SEQ ID NO: 76415 - DNA, 599 bp, Zea Mays
gcagagggcacaactacaaatggggattatctccttccattcaaaacaggtgcttttcttgcaaaggcaccagttcaaccagtcattttgagatatccttacaaaagatttaatgcagcatgggattccatgtcaggggcacgtcatgtatttctgctgctctgtcaatttgtaaattacctagaggtggtccgcttaccagtttactatccttctgagcaagaaaaggatgatcctaagctctatgcaaacaatgtacggaaactgatggcagtggagggaaacttgattctttcagaccttgggctggcggagaagcgagtgtaccatgccgcactgaatgtgaggaacaggccgtcgaggaagacggctggggcagtggcgccgatgcggatggttgttgcagaggagccgaggcagacgactggggcggtggcgacgaggcgaacgactggggcggtggcgacgaggcgaacggctggggcggtggcgacgaggcgaacgactggggcaacgacgaggaggacatctggtccggcggcgtcgacgtggatggcaggggtggtggtaacgaggagggcgatcgtggcaactgttga

SEQ ID NO: 76416 - DNA, 1063 bp, Zea Mays
tacaaatggggattatctccttccattcaaaacaggatgatcctaagctctatgcaaacaatgtacggaaactgatggcagtggagggaaacttgattctttcagaccttgggctggcggagaagcgagtgtaccatgccgcactgaatggtaatagtctagctcgtgctttacatcagaaagatgattgaaatgccatgctatcgtgcttccataatactggcttgcttgtaactgtgtgcttgcttgtgcatcgtcatggttgagaggaatgtcgtgaatatactatccggcataaatctgtaaagtaatttaccaactgtcatagttcagtaattatgttggttatactcctacatggttgggcatccgcacatttgatcctgtggtcaatccatgtgagccttttttactatcgatgttcaccaaactgaaccatctacttggtcttccctgcaggattgttgtgtcaaagctattttggataaaatttggaaatgaaagcagttagtttttcctagttgtccctgtaccattgcagtaggagaaaaaggaatcaaattttgttgtcactaatctttctcattaaagaccatctgtagataaccacaccgttttgctgcaaagatcaaatagacgttaatcaagctaggcatagcgtaaaaaatgctgttttcttactctcgtcaccgcagttcatgtgctgtgttttgagttgacatgatgtacttgatgtgtccgttgactaacatatggttgtctaacatatataatagcgttccattttgttcttaaaccatgcaggcttatcaagtattctaacaatgtttctgcagaacattgcaaacatgttaaataattcttgcttaacaacttcttccacccctcaatataagtgttcttggctatccaactggataagcatttgttcacatgcttagccaaaatccgttgtatttcggaatggaggtggcagtgtttacattgtgtgctggaactagggtggtaataagctctaaattttacaatataaaataaaattgaaggatcaagctttatttct

SEQ ID NO: 76417 - DNA, 1219 bp, Zea Mays
ctacaaatggggattatctccttccattcaaaacaggtgcttttcttgcaaaggcaccagttcaaccagtcattttgagatatccttacaaaagatttaatgcagcatgggattccatgtcaggggcacgtcatgtatttctgctgctctgtcaatttgtaaattacctagaggtggtccgcttaccagtttactatccttctgagcaagaaaaggatgatcctaagctctatgcaaacaatggaaacttgattctttcagaccttgggctggcggagaagcgagtgtaccatgccgcactgaatggtaatagtctagctcgtgctttacatcagaaagatgattgaaatgccatgctatcgtgcttccataatactggcttgcttgtaactgtgtgcttgcttgtgcatcgtcatggttgagaggaatgtcgtgaatatactatccggcataaatctgtaaagtaatttaccaactgtcatagttcagtaattatgttggttatactcctacatggttgggcatccgcacatttgatcctgtggtcaatccatgtgagccttttttactatcgatgttcaccaaactgaaccatctacttggtcttccctgcaggattgttgtgtcaaagctattttggataaaatttggaaatgaaagcagttagtttttcctagttgtccctgtaccattgcagtaggagaaaaaggaatcaaattttgttgtcactaatctttctcattaaagaccatctgtagataaccacaccgttttgctgcaaagatcaaatagacgttaatcaagctaggcatagcgtaaaaaatgctgttttcttactctcgtcaccgcagttcatgtgctgtgttttgagttgacatgatgtacttgatgtgtccgttgactaacatatggttgtctaacatatataatagcgttccattttgttcttaaaccatgcaggcttatcaagtattctaacaatgtttctgcagaacattgcaaacatgttaaataattcttgcttaacaacttcttccacccctcaatataagtgttcttggctatccaactggataagcatttgttcacatgcttagccaaaatccgttgtatttcggaatggaggtggcagtgtttacattgtgtgctggaactagggtggtaataagctctaaattttacaatataaaataaaattgaaggatcaagctttatttct

SEQ ID NO: 76418 - DNA, 947 bp, Zea Mays
gcagagggcacaactacaaatggggattatctccttccattcaaaacaggtgcttttcttgcaaaggcaccagttcaaccagtcattttgagatatccttacaaaagatttaatgcagcatgggattccatgtcaggggcacgtcatgtatttctgctgctctgtcaatttgtaaattacctagaggtggtccgcttaccagtttactatccttctgagcaagaaaaggatgatcctaagctctatgcaaacaatgtacggaaactgatggcagtggagggaaacttgattctttcagaccttgggctggcggagaagcgagtgtaccatgccgcactgaatggattgttgtgtcaaagctattttggataaaatttggaaatgaaagcagttagtttttcctagttgtccctgtaccattgcagtaggagaaaaaggaatcaaattttgttgtcactaatctttctcattaaagaccatctgtagataaccacaccgttttgctgcaaagatcaaatagacgttaatcaagctaggcatagcgtaaaaaatgctgttttcttactctcgtcaccgcagttcatgtgctgtgttttgagttgacatgatgtacttgatgtgtccgttgactaacatatggttgtctaacatatataatagcgttccattttgttcttaaaccatgcaggcttatcaagtattctaacaatgtttctgcagaacattgcaaacatgttaaataattcttgcttaacaacttcttccacccctcaatataagtgttcttggctatccaactggataagcatttgttcacatgcttagccaaaatccgttgtatttcggaatggaggtggcagtgtttacattgtgtgctggaactagggtggtaataagctctaaattttacaatataaaataaaattgaaggatcaagctttatttct

SEQ ID NO: 76419 - DNA, 1256 bp, Zea Mays
gcagagggcacaactacaaatggggattatctccttccattcaaaacaggtgcttttcttgcaaaggcaccagttcaaccagtcattttgagatatccttacaaaagatttaatgcagcatgggattccatgtcaggggcacgtcatgtatttctgctgctctgtcaatttgtaaattacctagaggtggtccgcttaccagtttactatccttctgagcaagaaaaggatgatcctaagctctatgcaaacaatgtacggaaactgatggcagtggagggaaacttgattctttcagaccttgggctggcggagaagcgagtgtaccatgccgcactgaatggtaatagtctagctcgtgctttacatcagaaagatgattgaaatgccatgctatcgtgcttccataatactggcttgcttgtaactgtgtgcttgcttgtgcatcgtcatggttgagaggaatgtcgtgaatatactatccggcataaatctgtaaagtaatttaccaactgtcatagttcagtaattatgttggttatactcctacatggttgggcatccgcacatttgatcctgtggtcaatccatgtgagccttttttactatcgatgttcaccaaactgaaccatctacttggtcttccctgcaggattgttgtgtcaaagctattttggataaaatttggaaatgaaagcagttagtttttcctagttgtccctgtaccattgcagtaggagaaaaaggaatcaaattttgttgtcactaatctttctcattaaagaccatctgtagataaccacaccgttttgctgcaaagatcaaatagacgttaatcaagctaggcatagcgtaaaaaatgctgttttcttactctcgtcaccgcagttcatgtgctgtgttttgagttgacatgatgtacttgatgtgtccgttgactaacatatggttgtctaacatatataatagcgttccattttgttcttaaaccatgcaggcttatcaagtattctaacaatgtttctgcagaacattgcaaacatgttaaataattcttgcttaacaacttcttccacccctcaatataagtgttcttggctatccaactggataagcatttgttcacatgcttagccaaaatccgttgtatttcggaatggaggtggcagtgtttacattgtgtgctggaactagggtggtaataagctctaaattttacaatataaaataaaattgaaggatcaagctttatttct

SEQ ID NO: 76420 - DNA, 858 bp, Zea Mays
gcagagggcacaactacaaatggggattatctccttccattcaaaacaggcacgtcatgtatttctgctgctctgtcaatttgtaaattacctagaggtggtccgcttaccagtttactatccttctgagcaagaaaaggatgatcctaagctctatgcaaacaatgtacggaaactgatggcagtggagggaaacttgattctttcagaccttgggctggcggagaagcgagtgtaccatgccgcactgaatggattgttgtgtcaaagctattttggataaaatttggaaatgaaagcagttagtttttcctagttgtccctgtaccattgcagtaggagaaaaaggaatcaaattttgttgtcactaatctttctcattaaagaccatctgtagataaccacaccgttttgctgcaaagatcaaatagacgttaatcaagctaggcatagcgtaaaaaatgctgttttcttactctcgtcaccgcagttcatgtgctgtgttttgagttgacatgatgtacttgatgtgtccgttgactaacatatggttgtctaacatatataatagcgttccattttgttcttaaaccatgcaggcttatcaagtattctaacaatgtttctgcagaacattgcaaacatgttaaataattcttgcttaacaacttcttccacccctcaatataagtgttcttggctatccaactggataagcatttgttcacatgcttagccaaaatccgttgtatttcggaatggaggtggcagtgtttacattgtgtgctggaactagggtggtaataagctctaaattttacaatataaaataaaattgaaggatcaagctttatttct

SEQ ID NO: 76421 - DNA, 2353 bp, Zea Mays
ctacactctaccatcctccttcctccatggccgttaagcccacacccgccgccgccgccgccctccatggagaccagcaagttgccgccgctctactcgccgccgcgggagccctctgcgactacggtgatgttgtgcccgtgcctggcgttcttcctccttgccctcatcgtcatctccatcgcactcactgtccactttcgcctctactgccacacccctcttgcacacctcatctccccgcaccgctgtccccaccgcatctgacctccggctccgcccgcacctctgccgtcgtcctgcttcccagaggtgcgctccctctgctgccgccgagacgccgatcccttacgggttcccctcaactcgcgacgccggcatgcggggcttacgacgtgctctggggcttcgcggccggaaggttcctctccacctcgtctgcctccgatgaagacgggggttcgttggagcaggaggatgcggcgacgagcaacccggagggagtgggccgcgtctgcgcggccatcgcggacgtcatcgccgccggcgccgacgcgaacctggaggctgcgctatccgcgctctcgccaccgctctgtgaggctgtcgtgctcgctgtgctccaccgcttcaagcacgcacacaggccgtcgtaccgcttcttcaggtgggccaccgcgtccggcggattcacccacaccaccattacctactgcaagatgttactcatcttaggcaagacgaggcagttcgagtcgatggttgcattgctccaagagatggggaaggcggggaccctgtccatggacgccttcaaggttgccattaagtccttcgctgcggctggtgagattaagaatgcagtcggcgtgttcgagttgatgaggaagaacggttttgatgatggggtggagtcattcaattgcttgctcgttgctttggccaatgagggattgggcagggaggccaggcaggtgtttgacaaaatgcttggccagtactctccagacctgcgctcttatactgcactgatgctggcatggtgcaatgcgaggaatctggttgaggctgggcgggtttggaatgagatgctggagaagggaatgaagccagatgttgtcgtccacaacacaatgattgaagggttgctgcgtgggcagaggcaacatgaggccgtgaagatgtttgagctgatgaaggcaaaggggcctccaccaaatgtgtggacttacacaatgttgatatgcaatcattgtaagcgagggaagatggacatggcaatggagtgctttgaggagatgcaggaagccagatgccaaccagatgttgctacctatacatgtttgcttgttggatatgggaatgcaaagcgaatggacagagtgactgctgtgttggaggagatgacacagaagggatgcccccctgatgctcggacttacaatgcactgattaagctgctaacaaataggaaaatgccagatgatgctgcaaggatatacaagaagatgatcaagaaaggacttgatcccacaattcatacttacaacatgatgatgaaatcatatttccttggtgataggaactatgccatgggttgtgcagtgtgggaggagatgcaccggaggggtatttgtcctgatgttaactcttacacggtgttcattagtggacatatacgtcatggcaggccagaggaggcatacaagtatattgaggagatgattaataaagggatgaaggctccacagatagactgtaataagtttgctgcagatttatcgaaggctgggaaactagatatgttgtatgagttggctcagaaagtgaaatttgcagggaaattcgatgtatctaatgcgttttatcagtgggcagatagaatgaagagtcaggtcaagagaaatgtatctaatcagattggcaatagaatgttctaagattactacgctgccagcaggaatgtagcatgctgtcatggtgcttgaaatttgattactaaggagagctgttacctttttcccctttttgatggtatggtaatgtgtcattgaagagtacgtgactggttggccgccaatattttcattgggatatgcaataatgatctgtttgaacattccctaatagcataatgaacgttcagaaaaagcaggaataaaatggtgctgtttttccctgcaccaactgtatgtatactaaatgtttacagatgatgttctgtttgaaagtttccacgaaacagagataaaaaagacgagaaagctcagcacgttttaatccggctataatcggcgccctcaagaaaccagtgaacaggagccaggactaacctccagcagctgcagcccat

SEQ ID NO: 76422 - DNA, 2171 bp, Zea Mays
ctacactctaccatcctccttcctccatggccgttaagcccacacccgccgccgccgccgccctccatggagaccagcaagttgccgccgctctactcgccgccgcgggagccctctgcgactacggtgatgttgtgcccgtgcctggcgttcttcctccttgccctcatcgtcatctccatcgcactcactgtccactttcgcctctactgccacacccctcttgcacacctcatctccccgcaccgctgtccccaccgcatctgacctccggctccgcccgcacctctgccgtcgtcctgcttcccagaggtgcgctccctctgctgccgccgagacgccgatcccttacgggttcccctcaactcgcgacgccggcatgcggggcttacgacgtgctctggggcttcgcggccggaaggttcctctccacctcgtctgcctccgatgaagacgggggttcgttggagcaggaggatgcggcgacgagcaacccggagggagtgggccgcgtctgcgcggccatcgcggacgtcatcgccgccggcgccgacgcgaacctggaggctgcgctatccgcgctctcgccaccgctctgtgaggctgtcgtgctcgctgtgctccaccgcttcaagcacgcacacaggccgtcgtaccgcttcttcaggtgggccaccgcgtccggcggattcacccacaccaccattacctactgcaagatgttactcatcttaggcaagacgaggcagttcgagtcgatggttgcattgctccaagagatggggaaggcggggaccctgtccatggacgccttcaaggttgccattaagtccttcgctgcggctggtgagattaagaatgcagtcggcgtgttcgagttgatgaggaagaacggttttgatgatggggtggagtcattcaattgcttgctcgttgctttggccaatgagggattgggcagggaggccaggcaggtgtttgacaaaatgcttggccagtactctccagacctgcgctcttatactgcactgatgctggcatggtgcaatgcgaggaatctggttgaggctgggcgggtttggaatgagatgctggagaagggaatgaagccagatgttgtcgtccacaacacaatgattgaagggttgctgcgtgggcagaggcaacatgaggccgtgaagatgtttgagctgatgaaggcaaaggggcctccaccaaatgtgtggacttacacaatgttgatatgcaatcattgtaagcgagggaagatggacatggcaatggagtgctttgaggagatgcaggaagccagatgccaaccagatgttgctacctatacatgtttgcttgttggatatgggaatgcaaagcgaatggacagagtgactgctgtgttggaggagatgacacagaagggatgcccccctgatgctcggacttacaatgcactgattaagctgctaacaaataggaaaatgccagatgatgctgcaaggatatacaagaagatgatcaagaaaggacttgatcccacaattcatacttacaacatgatgatgaaatcatatttccttggtgataggaactatgccatgggttgtgcagtgtgggaggagatgcaccggaggggtatttgtcctgatgttaactcttacacggtgttcattagtggacatatacgtcatggcaggccagaggaggcatacaagtatattgaggagatgattaataaagggatgaaggctccacagatagactgtaataagtttgctgcagatttatcgaaggctgggaaactagatatgttgtatgagttggctcagaaagtgaaatttgcagggaaattcgatgtatctaatgcgttttatcagtgggcagatagaatgaagagtcaggtcaagagaaatgtatctaatcagattggcaatagaatgttctaagattactacgctgccagcaggaatgtagcatgctgtcatggtgcttgaaatttgattactaaggagagctgttacctttttcccctttttgatggtatggtaatgtgtcattgaagaaaacagagataaaaaagacgagaaagctcagcacgttttaatccggctataatcggcgccctcaagaaaccagtgaacaggagccaggactaacctccagcagctgcagcccat

SEQ ID NO: 76423 - DNA, 2112 bp, Zea Mays
cgataatctcctacagaacctgaatcccgcctcccgggagggatcctgttcgctcgtgcccaggtgccaaatctggtgcttagcacatgccccctatattttgggaaagctaagcaaaccaaaagcacctgatacaagctgtaaacaactcgatgtgaaactatcggttctctaatcatcttgccatacactaggatgatatagattcaggaaacgaccattcaatgccttgggaagctcatcatcttacaacctttgtaacatattttgcctaggaaacctaatagcattcaggcttatctcctcaaacaaaatagcttcctgcccatacacaagctcggaaggagagactttagtagcatggtgcttagatattctatgagcccgtaaatgtgaatgtgttcatcagcataccatatgatggataggctagtgatgacccatttataaccgatggatcgaggaaaggtggctctgtatttggttcatatgaggggaagcttgggacaatagatttttcatatgaacatgttaatctcttaatatattcatctatatattgttttaaatgattccctcgctgatctacgtaagattttaaagatggatctagattacttatagtaggggtctaaggtgaagccaggagagatgccatctcaatctccccttgccggataatcttctggcggcaatccaccatgaagtgcgatatgtatttctcctttgccttctcatgctgttcggcatactgtcacaacacttcttcctctttttgctacatgaagttctcaaagcgttgttgatcatcaactgatagttcctctaaggtcggcttgatgatgttgctgatggagacctcagtgtgatctttagaactggccattgaaagttgatttttagtagatctaaacacccttgtccccagcggagttgccaacaagctgtattgtcactattttgggccaatcaactaatgcaccatgatcacgcttgcagggagcgaggactcggggtactctcctatagaacctggatcctaccttccaaaagggaccttgtcggggaggaaagattctagggttgccttgggatcgacatgccacccaagacgtctctaaataatgtcgagctgaggagaggtaaagattatgaatgtagaagactaatctaggctaagttactgctactcgtagggcaagaatgtaaaggtaatggtactagattgatttgatcgattggttggtgcctcaattggccatacccctgcatatatatagggggtctggacccgttcctagatttttcccaacagattcttacacgatttgatacacccagcgcaggtggggttggccgaggcccaataaattagggttgcccagagcccaacagttcattaagcacacccaactcagggaaagacctaatcaccccaaaagactagtccaataggggaagggtgaccctcccttttaaggtgacttccttctcccaagttaagtgaggcgggatagttctaaggctcacacggtcgtcgtccgactacagttgagccaactgagccaattgcgtctttgccaacgggtaatagtggaagatatcctcatcattctcacctttttaaaatggaccctagctctgatactagatgatacacccaacctaggtggggttggccgaggcacaacaaattagggttgtccggagcccaacagttcattaagcacacccaactcagggaaaggctcaatcgccccaaaagactagtctaatagggaagtgtgtccctcccttttaaagtgacttccttctcctaagttaagcaaggtgggataattctgaggctcacacggtcgacgtccaactacagttggaccaactagaccaattgcatttttgccaacgggtaatagtggaagatgtcctcgtcacgattacttagataagcatgcacaggataaggactctcgtctgcattaatctaattgcggaccgtccatgctacacctatggaccgtccaaccacgcctaggtgtcaaatctgttgctcaacaaggtgtttggttgtaatcctaaagactatgttttttaaaacttttttttctaaat

SEQ ID NO: 76424 - DNA, 1955 bp, Zea Mays
aatctcagttgtccttgtcccctcgaacgcgcactgttcaaacaaaccctccactgccctccccactctccccttcaccgcgccgcactcccaagtcccaactcccaacaggcctaaatggcggcggccggaacaattcccggcgccgccgcagccattggcgcttctgtgtcccaacgccaacgtcgcgtcggcgctccttctttcgtagctgcctacgtctccgagggcacccgcctcgtctgccggaggcagctccgtccggctccggtcctcgcttcttccttcatctccctttctcatccagcgaggcggcggttcctctgcgatgctgcggccggagcctcctcaggtcccgctggagaagccaagccccagggatttgcagagagatacccagctcttgtcacaggtttcttcttcttcttgtggtattttctgaatgtaatatttaacatcctcaacaagaagatcttcgactacttcccctatccatattttgtgtcagtgagccatctttttattggagtactatactgccttattggctggagcttcggcatcccaaagcgcgcgccaatcaactcaacacttctgaagcagcttgttccagttgcggtttgccatgccattggccatgtaacaagcactgtgtcatttgctgctgtagctgtgtcatttgcccacactattaaagctctcgagccattcttcaatgcggctgcttcccagtttatccttggacaaccagttccattgacactctggctgtctcttgttccagtggtgtctcggtagcatccctcactgaactctcatttaattggactggcttcattaatgccatgatctcaaatatttctttcacctaccgaagcatctattctaagaaggctatgactgacatggatagtaccaacttgtatgcatacatatcaataattgctctctttgtctgcatcccccctgcaattattattgaaggacctcaattagtgcagcatggttttaaagatgcaattgccaaagttggattaacaaagttgatttctaatttttttgtggtgggcttattctatcacctttataaccaggttgctacaaacacattggagcgggtagcccctttaacacatgccatcggcaatgtgttgaaacgtgttttcgtcattggcttttccatcatcgcattcggcaacaagatcaccacacagactggaattggcacttccattgctgtttctggtgttgccctctactcatttataaaggctaagattgaggagaaaaagcaaataaagagtgcataaggtgttggctgatgtggatgcggttggtttgtcgctttgatggacctctattctctcggtgaacgaacaaacttgcaagatggataaaatcttgctatctcctagtacatttgattgttattcccagtctggtactgaggtgtgcggttgttgttggctaacttgtttatttgaagcaaatttgagcaatgctcagtggcatggaatttccatttctgttttccttcgctcatttattctgacttgacatggtgctattgtaatcttaagcagtagtgtctctagaatgttttccccaaggagatttcagtaccaaatttgaacaatcctcaaactagaaattttgatttccatgcaccccactcagcaattctgacatacaatggtgttcatgtaatcttaagcagtagtgtctcctgatctttccaaggagattttcagtatcgttgatagtacattacgataaaaagcaaaatgcagtgagagcaatgttgccaatcgtgtgatataacctatttgtactaaggtatcattgttgacaggagcaaattaattgtaccaggttgcaaacatgtagcatgcagtttaaatgttacacttatgacatgggtcacatgtgtagatagacaggctaaggtggaattt

SEQ ID NO: 76425 - DNA, 2185 bp, Zea Mays
ctttggtatagctctttgaacgactctcgctttggctcatcgcaaagctctgcaaatagttaaaaaaacggtttctcatcaagagtacttcaagaatcaaagccgttttttgtgtgtgttgggacttgggagcaaaaaaaaaaaaaaaaaactgtttaccaaacgaactgaggtgccggagccttgccaacggagcccggcaaaaggcctactgctatcacatttccataatctcagttgtccttgtcccctcgaacgcgcactgttcaaacaaaccctccactgccctccccactctccccttcaccgcgccgcactcccaagtcccaactcccaacaggcctaaatggcggcggccggaacaattcccggcgccgccgcagccattggcgcttctgtgtcccaacgccaacgtcgcgtcggcgctccttctttcgtagctgcctacgtctccgagggcacccgcctcgtctgccggaggcagctccgtccggctccggtcctcgcttcttccttcatctccctttctcatccagcgaggcggcggttcctctgcgatgctgcggccggagcctcctcaggtcccgctggagaagccaagccccagggatttgcagagagatacccagctcttgtcacaggtttcttcttcttcttgtggtattttctgaatgtaatatttaacatcctcaacaagaagatcttcgactacttcccctatccatattttgtgtcagtgagccatctttttattggagtactatactgccttattggctggagcttcggcatcccaaagcgcgcgccaatcaactcaacacttctgaagcagcttgttccagttgcggtttgccatgccattggccatgtaacaagcactgtgtcatttgctgctgtagctgtgtcatttgcccacactattaaagctctcgagccattcttcaatgcggctgcttcccagtttatccttggacaaccagttccattgacactctggctgtctcttgttccagtggtgattggtgtctcggtagcatccctcactgaactctcatttaattggactggcttcattaatgccatgatctcaaatatttctttcacctaccgaagcatctattctaagaagactgacatggatagtaccaacttgtatgcatacatatcaataattgctctctttgtctgcatcccccctgcaattattattgaaggacctcaattagtgcagcatggttttaaagatgcaattgccaaagttggattaacaaagttgatttctaatttttttgtggtgggcttattctatcacctttataaccaggttgctacaaacacattggagcgggtagcccctttaacacatgccatcggcaatgtgttgaaacgtgttttcgtcattggcttttccatcatcgcattcggcaacaagatcaccacacagactggaattggcacttccattgctgtttctggtgttgccctctactcatttataaaggctaagattgaggagaaaaagcaaataaagagtgcataaggtgttggctgatgtggatgcggttggtttgtcgctttgatggacctctattctctcggtgaacgaacaaacttgcaagatggataaaatcttgctatctcctagtacatttgattgttattcccagtctggtactgaggtgtgcggttgttgttggctaacttgtttatttgaagcaaatttgagcaatgctcagtggcatggaatttccatttctgttttccttcgctcatttattctgacttgacatggtgctattgtaatcttaagcagtagtgtctctagaatgttttccccaaggagatttcagtaccaaatttgaacaatcctcaaactagaaattttgatttccatgcaccccactcagcaattctgacatacaatggtgttcatgtaatcttaagcagtagtgtctcctgatctttccaaggagattttcagtatcgttgatagtacattacgataaaaagcaaaatgcagtgagagcaatgttgccaatcgtgtgatataacctatttgtactaaggtatcattgttgacaggagcaaattaattgtaccaggttgcaaacatgtagcatgcagtttaaatgttacacttatgacatgggtcacatgtgtagatagacaggctaaggtggaattt

SEQ ID NO: 76426 - DNA, 1257 bp, Zea Mays
cataatctcagttgtccttgtcccctcgaacgcgcactgttcaaacaaaccctccactgccctccccactctccccttcaccgcgccgcactcccaagtcccaactcccaacaggcctaaatggcggcggccggaacaattcccggcgccgccgcagccattggcgcttctgtgtcccaacgccaacgtcgcgtcggcgctccttctttcgtagctgcctacgtctccgagggcacccgcctcgtctgccggaggcagctccgtccggctccggtcctcgcttcttccttcatctccctttctcatccagcgaggcggcggttcctctgcgatgctgcggccggagcctcctcaggtcccgctggagaagccaagccccagggatttgcagagagatacccagctcttgtcacaggtttcttcttcttcttgtggtattttctgaatgtaatatttaacatcctcaacaagaagatcttcgactacttcccctatccatattttgtgtcagtgagccatctttttattggagtactatactgccttattggctggagcttcggcatcccaaagcgcgcgccaatcaactcaacacttctgaagcagcttgttccagttgcggtttgccatgccattggccatgtaacaagcactgtgtcatttgctgctgtagctgtgtcatttgcccacactattaaagttttacaaattacaacacagctctcgagccattcttcaatgcggctgcttcccagtttatccttggacaaccagttccattgacactctggctgtctcttgttccagtggtgattggtgtctcggtagcatccctcactgaactctcatttaattggactggcttcattaatgccatgatctcaaatatttctttcacctaccgaagcatctattctaagaaggctatgactgacatggatagtaccaacttgtatgcatacatatcaataattgctctctttgtctgcatcccccctgcaattattattgaaggacctcaattagtgcagcatggttttaaagatgcaattgccaaagttggattaacaaagttgatttctaatttttttgtggtgggcttattctatcacctttataaccaggttgctacaaacacattggagcgggtagcccctttaacacatgccatcggcaatgtgttgaaacgtgttttcgtcattggcttttccatcatcgcattcgtgttttcacataacacacggtgagcttaatgtt

SEQ ID NO: 76427 - DNA, 1248 bp, Zea Mays
cagcgatcctgatccggtagcaggcaggccctcctcttccttctccgccgggcggccgggcccaaccccaaccccacgcgagcgaggcgcggccatcataacgctcttccgctccactccaaatccttgctcccatttcaaaacctcttcctcctctcctcgccgcagctcccaccattcccgcagacgccttgtccccttcccagcttcccctccccaccccgtctgctacaacgcctacggcgtcttcaaagacagggacatgtacgagcgcgtcttcggcgacggcgaccgcctcgcgcgcttcctccgctggcgcgtccaggtcatggagcgtggcgtgcgcgcgctcaccctgaggcccgggggcgtcaacgccatcatacaggtcaccgacctcaaggacatgccaaagcgggagctcagagccgccagcaaccagatcctctccctcttccaggacaactacccggagatggtagcgcggaaggtgttcattaacgtgccgtggtacttctccgtgctcttctccatgatctcgcccttcctcacggagcgcaccaagagcaagttcgtcatcgcgcgcgagggcaacgtcgccgagacactctacaagttcatccggccggagctggtgcctgtgcagtacggcgggctgagccgcaccggtgacctcgagaacggaccaccgaagccggcgtccgagttcaccatcaagggtggcgagaaggtcttcctggagatcgacggtatcgaggccggtgcaacgataacgtgggatctggtcgtcgggggctgggacctcgagtacggagccgagtacgtgccggcggccgaggacagctacacgctctgcgtggagaagacgaggatggtctcggccaccgccgaggagcccgtgcacaatgccttcacggctagggaagccggcaagatggtgctgtccatagacaattctggttcccggaagcgcaaggttgccgcctacaggtacttcgtgcgcaagtcgtcggcgtaggcatgctgatgtcttgtggtggtcgtcgcggccggcaccttgccggcaggtagccgcgagggggaggttaacgtcaagttaggctgtttaattattagtgctataacgacatgcatgtattatgccatatgtagaatataatgtactccgtaagagctgttgcacttttgtcatcaccactgttataaagctaatgatgagttaagttttttgggctactcgcctctctc

SEQ ID NO: 76428 - DNA, 805 bp, Zea Mays
agcagcgatcctgatccggtagcaggcaggccctcctcttccttctccgccgggcggccgggcccaaccccaaccccacgcgagcgaggcgcggccatcataacgctcttccgctccactccaaatccttgctcccatttcaaaacctcttcctcctctcctcgccgcagctcccaccattcccgcagacgccttgtccccttcccagcttcccctccccaccccgtctgctacaacgcctacggcgtcttcaaagacagggacatgtacgagcgcgtcttcggcgacggcgaccgcctcgcgcgcttcctccgctggcgcgtccaggtcatggagcgtggcgtgcgcgcgctcaccctgaggcccgggggcgtcaacgccatcatacaggtcaccgacctcaaggacatgccaaagcgggagctcagagccgccagcaaccagatcctctccctcttccaggacaactacccggagatggtagcgcggaaggtgttcattaacgtgccgtggtacttctccgtgctcttctccatgatctcgcccttcctcacggagcgcaccaagagcaagttcgtcatcgcgcgcgagggcaacgtcgccgagacactctacaagttcatccggccggagctggtgcctgtgcagtacggcgggctgagccgcaccggtgacctcgagaacggaccaccgaagccggcgtccgagttcaccatcaagggtggcgagaaggtcttcctggagatcgacggtatcgaggtacaaacaaatgcagattccagtggatgcaaagaaaccacatggt

SEQ ID NO: 76429 - DNA, 1850 bp, Zea Mays
taaatgttgcccttgatctacttaagaaagttgatatctcagctgccatatttgctcctggatgggtatatgaaactaagcaaccacctgactttcagagagcgcagaatcattggtggggccttgttgaaaaatcatggggtattcttcggagctatccagaacagttaccattctactcggattttaatcagggtcatggttatcaggtatccgttgaagggctgcaaatctccaatgattcatggaacaatatttcttgccaaagttttcagcctatgcttaaatacaccagagatcaagttcatctgcaagcctatacggatttcaaggctgaaccttacagtggagggaattgtttgacagtcaaaggatctcttcagcagaacattattttctcagaacagctttttaatggaggacttgccatggaagatggacctgttcatctattttattcggttcggaaaaaaaattacattcattgtgttaccttaactgtctccttactgatcatctaattccttggaaatactaaactgaatcacatgaactatattggttctttattgttcccaacattgacacaacccactgaatgtgtacagagaaatgtgttgacagtagtactgcactagtgcatgagctcccttagtccctttgtgttctgtttctcaatggatccttgtctttccagcctcatgattttgcatttctttcggcggtttgtttcagataagagccaatgcaagttctgctttagggttgtccctggatctgtcttctagaaacaagcagggtacttcaaaaattctggttgcagaggacatagcaacattcaccagaaagaaacaaaatcacaagtatggatcatatgttaaagccgataaggtggagctacacgctccagataaccacggttgggtcctttacaaagcaactgtttcttccagtgctgggcacacattaactggtatcaacattgtctgcacattgaaatttactggcgaaatcagtccagaatcagaagatggtagcatcttggtagaagatgtcgatggaacttcactgtatcaggcatcactaggccacctcagtattcgaaatactgacaaaaacacagagttccctccagcagaatcttggataactgaaggagattacatctcgtggtcaaaatgctctaacggatctgaactcgtgaatctgaaaatcagctggaagctgaagaaccctgatcaaccacaaccaccattcagcaagtacaatatctatgtggagaagttaacggcagattcagacttgaaagttcccagtcccaaaagctatcttggagttgctagtgtcgatgccttctatgtgtcgggcttagaggtctccaacgaagtcaccggtctgaaattctttatccaagcgtttgcacacgatggaagctggcaagaacttgaggaatgtccaaagttctttttattccctgttcactctgaatgagtgacattcatttactctggtgcgcttcattctgttacctttgacatatgttaaaggctcccacagaataatctaatgttatcattacagaaataagaagggaaaaacaaataatattgcattttttctctgctcatgttgtttatgtacacccattatttttttttctttcatctgagtacaaaagatctgtaaatttggtggtactagttggagaggtttcttctttcttgtcaacacatgcaaccgcagattctccggaaacaatgaatttgttggtggttgaaagcatccttgtgggctttatgaggacaccataggtgttcagcactgtgtttccgcctgtgatcgatcccctc

SEQ ID NO: 76430 - DNA, 2458 bp, Zea Mays
cccttcgccgcggagccggaggtgtccgacggagacgctgccgcgggcgccgaccgccgcgcgtgggagccgcccttcgacgcgtcctcgcccgcgccgcccatgtcctacccgatcacgggcctcgccgcgctcgcctctcgcgcttacctgtccgccgaagccaacttccacctccccttcaacagggcttccgttcccgcgccagcctcgccgctcccgcagcgccgccgcgtcctcgtctgccacgacatggaaggcggataccgcaacgacgcggcaccgcagggcggggacaagccggacgcctacgcgctctggcactggcacctcgtcgacgtcttcgtctacttctcgcactacctcgtcacgctcccgccaccctgctggatcaacgccgcccaccttcacggcgtcaagggacgttcatcgcggagtgggatgagggcgtgaagatttgcaaggagatgctcgcgaccgaggcttctgcacagatgtatgcggaaaggctcacagagctggctcataccttgggatttgatggttggctgattaacattgaggtcaatcttgacgttcacttcatcgataacctgaaagagttcgtcaagcatctaaccatgacaatgcacgatgcagttcctggctctttagtcatatggtatgacgcaatcactgtgaatggtgaccttgattggcaggataagctcaacaagtacaataagccattctttgatgtatgtgatgggctattttctaactatacatggaaggaaaatgacccacaagattcagctacagttgctggcgacagaaaatatgatgtatacatgggtattgatgtttttggacgaaatacatttggtggtggtcaatggactacaaatgttgcccttgatctacttaagaaagttgatatctcagctgccatatttgctcctggatgggtatatgaaactaagcaaccacctgactttcagagagcgcagaatcattggtggggccttgttgaaaaatcatggggtattcttcggagctatccagaacagttaccattctactcggattttaatcagggtcatggttatcaggtatccgttgaagggctgcaaatctccaatgattcatggaacaatatttcttgccaaagttttcagcctatgcttaaatacaccagagatcaagttcatctgcaagcctatacggatttcaaggctgaaccttacagtggagggaattgtttgacagtcaaaggatctcttcagcagaacattattttctcagaacagctttttaatggaggacttgccatggaagatggacctgttcatctattttattcgataagagccaatgcaagttctgctttagggttgtccctggatctgtcttctagaaacaagcagggtacttcaaaaattctggttgcagaggacatagcaacattcaccagaaagaaacaaaatcacaagtatggatcatatgttaaagccgataaggtggagctacacgctccagataaccacggttgggtcctttacaaagcaactgtttcttccagtgctgggcacacattaactggtatcaacattgtctgcacattgaaatttactggcgaaatcagtccagaatcagaagatggtagcatcttggtagaagatgtcgatggaacttcactgtatcaggcatcactaggccacctcagtattcgaaatactgacaaaaacacagagttccctccagcagaatcttggataactgaaggagattacatctcgtggtcaaaatgctctaacggatctgaactcgtgaatctgaaaatcagctggaagctgaagaaccctgatcaaccacaaccaccattcagcaagtacaatatctatgtggagaagttaacggcagattcagacttgaaagttcccagtcccaaaagctatcttggagttgctagtgtcgatgccttctatgtgtcgggcttagaggtctccaacgaagtcaccggtctgaaattctttatccaagcgtttgcacacgatggaagctggcaagaacttgaggaatgtccaaagttctttttattccctgttcactctgaatgagtgacattcatttactctggtgcgcttcattctgttacctttgacatatgttaaaggctcccacagaataatctaatgttatcattacagaaataagaagggaaaaacaaataatattgcattttttctctgctcatgttgtttatgtacacccattatttttttttctttcatctgagtacaaaagatctgtaaatttggtggtactagttggagaggtttcttctttcttgtcaacacatgcaaccgcagattctccggaaacaatgaatttgttggtggttgaaagcatccttgtgggctttatgaggacaccataggtgttcagcactgtgtttccgcctgtgatcgatcccctc

SEQ ID NO: 76431 - DNA, 2460 bp, Zea Mays
cgtctctccgcgccgccacctccgccgtattgcccgtcgtgtccgagccatgcttcccttcgccgcggagccggaggtgtccgacggagacgctgccgcgggcgccgaccgccgcgcgtgggagccgcccttcgacgcgtcctcgcccgcgccgcccatgtcctacccgatcacgggcctcgccgcgctcgcctctcgcgcttacctgtccgccgaagccaacttccacctccccttcaacagggcttccgttcccgcgccagcctcgccgctcccgcagcgccgccgcgtcctcgtctgccacgacatggaaggcggataccgcaacgacgcggcaccgcagggcggggacaagccggacgcctacgcgctctggcactggcacctcgtcgacgtcttcgtctacttctcgcactacctcgtcacgctcccgccaccctgctggatcaacgccgcccaccttcacggcgtcaaggttttagggacgttcatcgcggagtgggatgagggcgtgaagatttgcaaggagatgctcgcgaccgaggcttctgcacagatgtatgcggaaaggctcacagagctggctcataccttgggatttgatggttggctgattaacattgaggtcaatcttgacgttcacttcatcgataacctgaaagagtatgacgcaatcactgtgaatggtgaccttgattggcaggataagctcaacaagtacaataagccattctttgatgtatgtgatgggctattttctaactatacatggaaggaaaatgacccacaagattcagctacagttgctggcgacagaaaatatgatgtatacatgggtattgatgtttttggacgaaatacatttggtggtggtcaatggactacaaatgttgcccttgatctacttaagaaagttgatatctcagctgccatatttgctcctggatgggtatatgaaactaagcaaccacctgactttcagagagcgcagaatcattggtggggccttgttgaaaaatcatggggtattcttcggagctatccagaacagttaccattctactcggattttaatcagggtcatggttatcaggtatccgttgaagggctgcaaatctccaatgattcatggaacaatatttcttgccaaagttttcagcctatgcttaaatacaccagagatcaagttcatctgcaagcctatacggatttcaaggctgaaccttacagtggagggaattgtttgacagtcaaaggatctcttcagcagaacattattttctcagaacagctttttaatggaggacttgccatggaagatggacctgttcatctattttattcgataagagccaatgcaagttctgctttagggttgtccctggatctgtcttctagaaacaagcagggtacttcaaaaattctggttgcagaggacatagcaacattcaccagaaagaaacaaaatcacaagtatggatcatatgttaaagccgataaggtggagctacacgctccagataaccacggttgggtcctttacaaagcaactgtttcttccagtgctgggcacacattaactggtatcaacattgtctgcacattgaaatttactggcgaaatcagtccagaatcagaagatggtagcatcttggtagaagatgtcgatggaacttcactgtatcaggcatcactaggccacctcagtattcgaaatactgacaaaaacacagagttccctccagcagaatcttggataactgaaggagattacatctcgtggtcaaaatgctctaacggatctgaactcgtgaatctgaaaatcagctggaagctgaagaaccctgatcaaccacaaccaccattcagcaagtacaatatctatgtggagaagttaacggcagattcagacttgaaagttcccagtcccaaaagctatcttggagttgctagtgtcgatgccttctatgtgtcgggcttagaggtctccaacgaagtcaccggtctgaaattctttatccaagcgtttgcacacgatggaagctggcaagaacttgaggaatgtccaaagttctttttattccctgttcactctgaatgagtgacattcatttactctggtgcgcttcattctgttacctttgacatatgttaaaggctcccacagaataatctaatgttatcattacagaaataagaagggaaaaacaaataatattgcattttttctctgctcatgttgtttatgtacacccattatttttttttctttcatctgagtacaaaagatctgtaaatttggtggtactagttggagaggtttcttctttcttgtcaacacatgcaaccgcagattctccggaaacaatgaatttgttggtggttgaaagcatccttgtgggctttatgaggacaccataggtgttcagcactgtgtttccgcctgtgatcgatcccctc

SEQ ID NO: 76432 - DNA, 2551 bp, Zea Mays
gcactcaagggagcgaggtaccatcaacgccgggccggcgcatgcccgtctctccgcgccgccacctccgccgtattgcccgtcgtgtccgagccatgcttcccttcgccgcggagccggaggtgtccgacggagacgctgccgcgggcgccgaccgccgcgcgtgggagccgcccttcgacgcgtcctcgcccgcgccgcccatgtcctacccgatcacgggcctcgccgcgctcgcctctcgcgcttacctgtccgccgaagccaacttccacctccccttcaacagggcttccgttcccgcgccagcctcgccgctcccgcagcgccgccgcgtcctcgtctgccacgacatggaaggcggataccgcaacgacgcggcaccgcagggcggggacaagccggacgcctacgcgctctggcactggcacctcgtcgacgtcttcgtctacttctcgcactacctcgtcacgctcccgccaccctgctggatcaacgccgcccaccttcacggcgtcaaggttttagggacgttcatcgcggagtgggatgagggcgtgaagatttgcaaggagatgctcgcgaccgaggcttctgcacagatgtatgcggaaaggctcacagagctggctcataccttgggatttgatggttggctgattaacattgaggtcaatcttgacgttcacttcatcgataacctgaaagagttcgtcaagcatctaaccatgacaatgcacgatgcagttcctggctctttagtcatatggtatgacgcaatcactgtgaatggtgaccttgattggcaggataagctcaacaagtacaataagccattctttgatgtatgtgatgggctattttctaactatacatggaaggaaaatgacccacaagattcagctacagttgctggcgacagaaaatatgatgtatacatgggtattgatgtttttggacgaaatacatttggtggtggtcaatggactacaaatgttgcccttgatctacttaagaaagttgatatctcagctgccatatttgctcctggatgggtatatgaaactaagcaaccacctgactttcagagagcgcagaatcattggtggggccttgttgaaaaatcatggggtattcttcggagctatccagaacagttaccattctactcggattttaatcaggtatccgttgaagggctgcaaatctccaatgattcatggaacaatatttcttgccaaagttttcagcctatgcttaaatacaccagagatcaagttcatctgcaagcctatacggatttcaaggctgaaccttacagtggagggaattgtttgacagtcaaaggatctcttcagcagaacattattttctcagaacagctttttaatggaggacttgccatggaagatggacctgttcatctattttattcgataagagccaatgcaagttctgctttagggttgtccctggatctgtcttctagaaacaagcagggtacttcaaaaattctggttgcagaggacatagcaacattcaccagaaagaaacaaaatcacaagtatggatcatatgttaaagccgataaggtggagctacacgctccagataaccacggttgggtcctttacaaagcaactgtttcttccagtgctgggcacacattaactggtatcaacattgtctgcacattgaaatttactggcgaaatcagtccagaatcagaagatggtagcatcttggtagaagatgtcgatggaacttcactgtatcaggcatcactaggccacctcagtattcgaaatactgacaaaaacacagagttccctccagcagaatcttggataactgaaggagattacatctcgtggtcaaaatgctctaacggatctgaactcgtgaatctgaaaatcagctggaagctgaagaaccctgatcaaccacaaccaccattcagcaagtacaatatctatgtggagaagttaacggcagattcagacttgaaagttcccagtcccaaaagctatcttggagttgctagtgtcgatgccttctatgtgtcgggcttagaggtctccaacgaagtcaccggtctgaaattctttatccaagcgtttgcacacgatggaagctggcaagaacttgaggaatgtccaaagttctttttattccctgttcactctgaatgagtgacattcatttactctggtgcgcttcattctgttacctttgacatatgttaaaggctcccacagaataatctaatgttatcattacagaaataagaagggaaaaacaaataatattgcattttttctctgctcatgttgtttatgtacacccattatttttttttctttcatctgagtacaaaagatctgtaaatttggtggtactagttggagaggtttcttctttcttgtcaacacatgcaaccgcagattctccggaaacaatgaatttgttggtggttgaaagcatccttgtgggctttatgaggacaccataggtgttcagcactgtgtttccgcctgtgatcgatcccctc

SEQ ID NO: 76433 - DNA, 2560 bp, Zea Mays
caggcttccagctccagctgcggaattactgccttccctttccctttgcccgcactcaagggagcgaggtaccatcaacgccgggccggcgcatgcccgtctctccgcgccgccacctccgccgtattgcccgtcgtgtccgagccatgcttcccttcgccgcggagccggaggtgtccgacggagacgctgccgcgggcgccgaccgccgcgcgtgggagccgcccttcgacgcgtcctcgcccgcgccgcccatgtcctacccgatcacgggcctcgccgcgctcgcctctcgcgcttacctgtccgccgaagccaacttccacctccccttcaacagggcttccgttcccgcgccagcctcgccgctcccgcagcgccgccgcgtcctcgtctgccacgacatggaaggcggataccgcaacgacgcggcaccgcagggcggggacaagccggacgcctacgcgctctggcactggcacctcgtcgacgtcttcgtctacttctcgcactacctcgtcacgctcccgccaccctgctggatcaacgccgcccaccttcacggcgtcaaggttttagggacgttcatcgcggagtgggatgagggcgtgaagatttgcaaggagatgctcgcgaccgaggcttctgcacagatgtatgcggaaaggctcacagagctggctcataccttgggatttgatggttggctgattaacattgaggtcaatcttgacgttcacttcatcgataacctgaaagagttcgtcaagcatctaaccatgacaatgcacgatgcagttcctggctctttagtcatatggtatgacgcaatcactgtgaatggtgaccttgattggcaggataagctcaacaagtacaataagccattctttgatgtatgtgatgggctattttctaactatacatggaaggaaaatgacccacaagattcagctacagttgctggcgacagaaaatatgatacaaatgttgcccttgatctacttaagaaagttgatatctcagctgccatatttgctcctggatgggtatatgaaactaagcaaccacctgactttcagagagcgcagaatcattggtggggccttgttgaaaaatcatggggtattcttcggagctatccagaacagttaccattctactcggattttaatcagggtcatggttatcaggtatccgttgaagggctgcaaatctccaatgattcatggaacaatatttcttgccaaagttttcagcctatgcttaaatacaccagagatcaagttcatctgcaagcctatacggatttcaaggctgaaccttacagtggagggaattgtttgacagtcaaaggatctcttcagcagaacattattttctcagaacagctttttaatggaggacttgccatggaagatggacctgttcatctattttattcgataagagccaatgcaagttctgctttagggttgtccctggatctgtcttctagaaacaagcagggtacttcaaaaattctggttgcagaggacatagcaacattcaccagaaagaaacaaaatcacaagtatggatcatatgttaaagccgataaggtggagctacacgctccagataaccacggttgggtcctttacaaagcaactgtttcttccagtgctgggcacacattaactggtatcaacattgtctgcacattgaaatttactggcgaaatcagtccagaatcagaagatggtagcatcttggtagaagatgtcgatggaacttcactgtatcaggcatcactaggccacctcagtattcgaaatactgacaaaaacacagagttccctccagcagaatcttggataactgaaggagattacatctcgtggtcaaaatgctctaacggatctgaactcgtgaatctgaaaatcagctggaagctgaagaaccctgatcaaccacaaccaccattcagcaagtacaatatctatgtggagaagttaacggcagattcagacttgaaagttcccagtcccaaaagctatcttggagttgctagtgtcgatgccttctatgtgtcgggcttagaggtctccaacgaagtcaccggtctgaaattctttatccaagcgtttgcacacgatggaagctggcaagaacttgaggaatgtccaaagttctttttattccctgttcactctgaatgagtgacattcatttactctggtgcgcttcattctgttacctttgacatatgttaaaggctcccacagaataatctaatgttatcattacagaaataagaagggaaaaacaaataatattgcattttttctctgctcatgttgtttatgtacacccattatttttttttctttcatctgagtacaaaagatctgtaaatttggtggtactagttggagaggtttcttctttcttgtcaacacatgcaaccgcagattctccggaaacaatgaatttgttggtggttgaaagcatccttgtgggctttatgaggacaccataggtgttcagcactgtgtttccgcctgtgatcgatcccctc

SEQ ID NO: 76434 - DNA, 2590 bp, Zea Mays
cacttccaggcttccagctccagctgcggaattactgccttccctttccctttgcccgcactcaagggagcgaggtaccatcaacgccgggccggcgcatgcccgtctctccgcgccgccacctccgccgtattgcccgtcgtgtccgagccatgcttcccttcgccgcggagccggaggtgtccgacggagacgctgccgcgggcgccgaccgccgcgcgtgggagccgcccttcgacgcgtcctcgcccgcgccgcccatgtcctacccgatcacgggcctcgccgcgctcgcctctcgcgcttacctgtccgccgaagccaacttccacctccccttcaacagggcttccgttcccgcgccagcctcgccgctcccgcagcgccgccgcgtcctcgtctgccacgacatggaaggcggataccgcaacgacgcggcaccgcagggcggggacaagccggacgcctacgcgctctggcactggcacctcgtcgacgtcttcgtctacttctcgcactacctcgtcacgctcccgccaccctgctggatcaacgccgcccaccttcacggcgtcaaggttttagggacgttcatcgcggagtgggatgagggcgtgaagatttgcaaggagatgctcgcgaccgaggcttctgcacagatgtatgcggaaaggctcacagagctggctcataccttgggatttgatggttggctgattaacattgaggtcaatcttgacgttcacttcatcgataacctgaaagagttcgtcaagcatctaaccatgacaatgtatgacgcaatcactgtgaatggtgaccttgattggcaggataagctcaacaagtacaataagccattctttgatgtatgtgatgggctattttctaactatacatggaaggaaaatgacccacaagattcagctacagttgctggcgacagaaaatatgatgtatacatgggtattgatgtttttggacgaaatacatttggtggtggtcaatggactacaaatgttgcccttgatctacttaagaaagttgatatctcagctgccatatttgctcctggatgggtatatgaaactaagcaaccacctgactttcagagagcgcagaatcattggtggggccttgttgaaaaatcatggggtattcttcggagctatccagaacagttaccattctactcggattttaatcagggtcatggttatcaggtatccgttgaagggctgcaaatctccaatgattcatggaacaatatttcttgccaaagttttcagcctatgcttaaatacaccagagatcaagttcatctgcaagcctatacggatttcaaggctgaaccttacagtggagggaattgtttgacagtcaaaggatctcttcagcagaacattattttctcagaacagctttttaatggaggacttgccatggaagatggacctgttcatctattttattcgataagagccaatgcaagttctgctttagggttgtccctggatctgtcttctagaaacaagcagggtacttcaaaaattctggttgcagaggacatagcaacattcaccagaaagaaacaaaatcacaagtatggatcatatgttaaagccgataaggtggagctacacgctccagataaccacggttgggtcctttacaaagcaactgtttcttccagtgctgggcacacattaactggtatcaacattgtctgcacattgaaatttactggcgaaatcagtccagaatcagaagatggtagcatcttggtagaagatgtcgatggaacttcactgtatcaggcatcactaggccacctcagtattcgaaatactgacaaaaacacagagttccctccagcagaatcttggataactgaaggagattacatctcgtggtcaaaatgctctaacggatctgaactcgtgaatctgaaaatcagctggaagctgaagaaccctgatcaaccacaaccaccattcagcaagtacaatatctatgtggagaagttaacggcagattcagacttgaaagttcccagtcccaaaagctatcttggagttgctagtgtcgatgccttctatgtgtcgggcttagaggtctccaacgaagtcaccggtctgaaattctttatccaagcgtttgcacacgatggaagctggcaagaacttgaggaatgtccaaagttctttttattccctgttcactctgaatgagtgacattcatttactctggtgcgcttcattctgttacctttgacatatgttaaaggctcccacagaataatctaatgttatcattacagaaataagaagggaaaaacaaataatattgcattttttctctgctcatgttgtttatgtacacccattatttttttttctttcatctgagtacaaaagatctgtaaatttggtggtactagttggagaggtttcttctttcttgtcaacacatgcaaccgcagattctccggaaacaatgaatttgttggtggttgaaagcatccttgtgggctttatgaggacaccataggtgttcagcactgtgtttccgcctgtgatcgatcccctc

SEQ ID NO: 76435 - DNA, 2625 bp, Zea Mays
cccacttccaggcttccagctccagctgcggaattactgccttccctttccctttgcccgcactcaagggagcgaggtaccatcaacgccgggccggcgcatgcccgtctctccgcgccgccacctccgccgtattgcccgtcgtgtccgagccatgcttcccttcgccgcggagccggaggtgtccgacggagacgctgccgcgggcgccgaccgccgcgcgtgggagccgcccttcgacgcgtcctcgcccgcgccgcccatgtcctacccgatcacgggcctcgccgcgctcgcctctcgcgcttacctgtccgccgaagccaacttccacctccccttcaacagggcttccgttcccgcgccagcctcgccgctcccgcagcgccgccgcgtcctcgtctgccacgacatggaaggcggataccgcaacgacgcggcaccgcagggcggggacaagccggacgcctacgcgctctggcactggcacctcgtcgacgtcttcgtctacttctcgcactacctcgtcacgctcccgccaccctgctggatcaacgccgcccaccttcacggcgtcaaggttttagggacgttcatcgcggagtgggatgagggcgtgaagatttgcaaggagatgctcgcgaccgaggcttctgcacagatgtatgcggaaaggctcacagagctggctcataccttgggatttgatggttggctgattaacattgaggtcaatcttgacgttcacttcatcgataacctgaaagagttcgtcaagcatctaaccatgacaatgcacgatgcagttcctggctctttagtcatatggtatgacgcaatcactgtgaatggtgaccttgattggcaggataagctcaacaagtacaataagccattctttgatgtatgtgatgggctattttctaactatacatggaaggaaaatgacccacaagattcagctacagttgctggcgacagaaaatatgatgtatacatgggtattgatgtttttggacgaaatacatttggtggtggtcaatggactacaaatgttgcccttgatctacttaagaaagttgatatctcagctgccatatttgctcctggatgggtatatgaaactaagcaaccacctgactttcagagagcgcagaatcattggtggggccttgttgaaaaatcatggggtattcttcggagctatccagaacagttaccattctactcggattttaatcagggtcatggttatcaggtatccgttgaagggctgcaaatctccaatgattcatggaacaatatttcttgccaaagttttcagcctatgcttaaatacaccagagatcaagttcatctgcaagcctatacggatttcaaggctgaaccttacagtggagggaattgtttgacagtcaaaggatctcttcagcagaacattattttctcagaacagctttttaatggaggacttgccatggaagatggacctgttcatctattttattcgataagagccaatgcaagttctgctttagggttgtccctggatctgtcttctagaaacaagcagggtacttcaaaaattctggttgcagaggacatagcaacattcaccagaaagaaacaaaatcacaagtatggatcatatgttaaagccgataaggtggagctacacgctccagataaccacggttgggtcctttacaaagcaactgtttcttccagtgctgggcacacattaactggtatcaacattgtctgcacattgaaatttactggcgaaatcagtccagaatcagaagatggtagcatcttggtagaagatgtcgatggaacttcactgtatcaggcatcactaggccacctcagtattcgaaatactgacaaaaacacagagttccctccagcagaatcttggataactgaaggagattacatctcgtggtcaaaatgctctaacggatctgaactcgtgaatctgaaaatcagctggaagctgaagaaccctgatcaaccacaaccaccattcagcaagtacaatatctatgtggagaagttaacggcagattcagacttgaaagttcccagtcccaaaagctatcttggagttgctagtgtcgatgccttctatgtgtcgggcttagaggtctccaacgaagtcaccggtctgaaattctttatccaagcgtttgcacacgatggaagctggcaagaacttgaggaatgtccaaagttctttttattccctgttcactctgaatgagtgacattcatttactctggtgcgcttcattctgttacctttgacatatgttaaaggctcccacagaataatctaatgttatcattacagaaataagaagggaaaaacaaataatattgcattttttctctgctcatgttgtttatgtacacccattatttttttttctttcatctgagtacaaaagatctgtaaatttggtggtactagttggagaggtttcttctttcttgtcaacacatgcaaccgcagattctccggaaacaatgaatttgttggtggttgaaagcatccttgtgggctttatgaggacaccataggtgttcagcactgtgtttccgcctgtgatcgatcccctc

SEQ ID NO: 76436 - DNA, 485 bp, Zea Mays
agaacatattagatggtgacaatggaggcgaattgaaagaatccattttgtttgatatgatgatgctgggagcttgaaacacgtggtgcatttgttgtcattccagaatctaatggatccttattgctgtgattgcttattttctgatgttcactacttgattgcgtcaatggggcttcaaatgctgtggagtttcggacttgcatgtcttgatggatatgccattagagccaataaagatctcaccagtcccattctattgagcttgtttgtcgttggagactgggtaacagcaatcctgtcattcgccgcatcaagctcagctgccggtgtagtaatcctatttcaaaaggacgtgctcttctgcagaaggtatccccagctcccctgcggaaaatacgagctcgccacggcgttcgccttcctgtcttgggcgctcagtgcgacatcagcattgatcatgttttggctcctggctgcgttct

SEQ ID NO: 76437 - DNA, 1337 bp, Zea Mays
aaccgacccggcctagcggcggcggcccactccagtacgcgtacgccaccacgcgcacgccaccctccaacccaagcaatcaggcgccgcgcagaggtagtaaggcaaggaacgcggggccgcggcacacgcaaaattccccatcccccaaggaagccacgccctcgcgcaccagcgcgaccggaccacaccggcaccgcccgtctgaccgacgcaacccagccgtccagacgcgccgccgaccgtccttccaccaccacgcccgcgccgtcgcacgctccctagggttccgcagggccggggatcgccggagatggactggagcgcggtgacggcggaggacttggtggacgcgctgcgggaggtggactggtccatgccgccgcggcctgtcccggagttcttctcccgcttcaccgtcccacgctcctactccaagtggaccagccgcctcaagtgcaacctctactactacaggacaaactatttcatcttgatcatgttcatccttgggatgggcttcctttggaagccagttgctatagttgctgcttttatgactggacttagcatcgcatttctcaatgatagttttgcagtcactttcaatgagaaagtcacaaggaccgtaagacaattttcaccacatttagctgcaaagttgaggccacctataactcctgttcttcgcggtcgaccaagctctaagagatcaattcatatttgtgggcgacctcgctgggtgtttgtcctgttcttttctgcagtgagctgtatactctggttgacctcatgcagtcttctcacagtcctctgggcacttctcattgctctatttgcaactgtgctccatgcaagcttcagaacaccaaatctcaaagcacgtctgaatacattcagagaggaattccgggctgtttggcggaattatagtgagctttaagggtttcctttgtttctctcatgttcatgggtaatgaaggtgtctggtgccgttgtttgtgagctgtgctaggagatctagttgaaggtgaaacgccattgcacattacatggactacttgctctcttgggaggtgggattctggttgggttgactccgaatgcgatgctatgccagcacacgatccttcaagaacagtagttttctttcgtacttctccctaaccgagcattagagagaggacagcatgtaaaggatgtaaaaatgtacttgttctcgatcaaaaagtatgttgtttgttgaaattattactaatttgtattgcatcctcttttggatcatttgttaggtgactatcattttgcttcagcatttttgtcgagttaaaaaaaaa

SEQ ID NO: 76438 - DNA, 953 bp, Zea Mays
ctcgtgctaatccacgatctgcccaggactcgcttactgtattcaatttgaagggtttcgctacaggacaaactatttcatcttgatcatgttcatccttgggatgggcttcctttggaagccagttgctatagttgctgcttttatgactggacttagcatcgcatttctcaatgatagttttgcagtcactttcaatgagaaagtcacaaggaccgtaagacaattttcaccacatttagctgcaaagttgaggccacctataactcctgttcttcgcggtcgaccaagctctaagagatcaattcatatttgtgggcgacctcgctgggtgtttgtcctgttcttttctgcagtgagctgtatactctggttgacctcatgcagtcttctcacagtcctctgggcacttctcattgctctatttgcaactgtgctccatgcaagcttcagaacaccaaatctcaaagcacgtctgaatacattcagagaggaattccgggctgtttggcggaattatagtgagctttaagggtttcctttgtttctctcatgttcatgggtaatgaaggtgtctggtgccgttgtttgtgagctgtgctaggagatctagttgaaggtgaaacgccattgcacattacatggactacttgctctcttgggaggtgggattctggttgggttgactccgaatgcgatgctatgccagcacacgatccttcaagaacagtagttttctttcgtacttctccctaaccgagcattagagagaggacagcatgtaaaggatgtaaaaatgtacttgttctcgatcaaaaagtatgttgtttgttgaaattattactaatttgtattgcatcctcttttggatcatttgttaggtgactatcattttgcttcagcatttttgtcgagttagttacatcaaataaatcaaaaattctaactctatt

SEQ ID NO: 76439 - DNA, 1275 bp, Zea Mays
aaccgacccggcctagcggcggcggcccactccagtacgcgtacgccaccacgcgcacgccaccctccaacccaagcaatcaggcgccgcgcagaggtagtaaggcaaggaacgcggggccgcggcacacgcaaaattccccatcccccaaggaagccacgccctcgcgcaccagcgcgaccggaccacaccggcaccgcccgtctgaccgacgcaacccagccgtccagacgcgccgccgaccgtccttccaccaccacgcccgcgccgtcgcacgctccctagggttccgcagggccggggatcgccggagatggactggagcgcggtgacggcggaggacttggtggacgcgctgcgggaggtggactggtccatgccgccgcggcctgtcccggagttcttctcccgcttcaccgtcccacgctcctactccaagtggaccagccgcctcaagtgcaacctctactactacaggacaaactatttcatcttgatcatgttcatccttgggatgggcttcctttggaagccagttgctatagttgctgcttttatgactggacttagcatcgcatttctcaatgatagttttgcagtcactttcaatgagaaagtcacaaggaccgtaagacaattttcaccacatttagctgcaaagttgaggccacctataactgagctgtatactctggttgacctcatgcagtcttctcacagtcctctgggcacttctcattgctctatttgcaactgtgctccatgcaagcttcagaacaccaaatctcaaagcacgtctgaatacattcagagaggaattccgggctgtttggcggaattatagtgagctttaagggtttcctttgtttctctcatgttcatgggtaatgaaggtgtctggtgccgttgtttgtgagctgtgctaggagatctagttgaaggtgaaacgccattgcacattacatggactacttgctctcttgggaggtgggattctggttgggttgactccgaatgcgatgctatgccagcacacgatccttcaagaacagtagttttctttcgtacttctccctaaccgagcattagagagaggacagcatgtaaaggatgtaaaaatgtacttgttctcgatcaaaaagtatgttgtttgttgaaattattactaatttgtattgcatcctcttttggatcatttgttaggtgactatcattttgcttcagcatttttgtcgagttagttacatcaaataaatcaaaaattctaactctatt

SEQ ID NO: 76440 - DNA, 2278 bp, Zea Mays
ctcctccctccctcgcccgcctgcctttcgcttctttttaagcctttatttactaccactactatactcctctctctttctcactcgtcacaagctctctttcatcgcatccacaccattccacttccaccccacgaggatccagcctgcctgtccctctcgccgcacgccacgaccgtagtcgctcgccggcgtgtctagcctagccggggcctgggcctccgcgctcgtgctcccgggaaacaacgaccgacgcgtcctcatagtcatagaggcagctaaggcagccacgcattcgtcgctcgctcgaccggcgatggcgagaggtgacacggcgagcgaggcgctgacggcggactcagccgacgaggaggggcgccgcgggagcagctccagcgccagctccgacgccgcctccagcttctcctgcacgtactccccggccccgcccgacgagtggcacaaggtggccatcatcaagacctgcgtgtctgtgtcggccgacgccgcgggcggcggcggcggcaaggaccagaagccagatggagatgatgaaggagcggttctccaagctgctgctcggcgaggacatgtccgggagcggcaagggcgtctgcaccgcgctcgccatctccaacgccgtcaccaacctctgcgcgacggtgttcggccagctctggaggctggagccgctgccgccggagaagaaggccatgtggcggcgcgagttggactgcctgctctgcgtcagcgaccacatcgtggagctggtgcccacgtggcagacattcccggatggtacaaggcttgagatcatgacaagcaggccgcggtctgatctgtacatcaacctgccggcgcttcggaagctagacaacatgctcctcgaaatcctggaaggtttcagggacgtcgagttctggtacgtggaccagggcatctgtgcgccggactgcgacagctccgcgtcctaccggagaacgttccaccgccgcgacgacaagtggtggctgccggtgccgcacgtgccccacggcggtctccgcgaggccacgcggaggcagctggagcaccgtcgcgactgcgccagccagatcctcaaggccgccatggccatcaacagcaacgcactggccgagatggccgtgccggtctcctacctcgactcgctgccaaagaacgggcgcgcggcgctgggcgacgtcatctaccggtacatcacctcggaccagttctcccaggactacctcctcgactgcctcgacctgtcgtcggaataccaggcgctggagatcgccaaccgcgtcgaggcctccatctacgtgtggcgccggaaggggggcggcggcgccagatcgtcctggggcatcgtgaaggacatggtcatggacacggagaagagggacctgctcgccgagcgcgcggaggcgctgctcatgtccctcaagcagcggttccccgggctcactcagacgagcttggacatgagcaagatccagtacaacaaggacgtgggcaaatcgatcctcgagagctactcgagggtcctcgagagcctggcctccaacatcatcgcgcggatcgacgacctgctcaacgtcgacgagctgagcaagcaaccagctgacagcatcccgtccgccggagcggacgcgaaggttgcgtgcaagagcaacggcagcaagcaggccacggcggtgcctgcctcgggcacgccgtacgcgacggcgtacgccacgccgagcttctcgccggcgcagctgtcgagcccgtccaagatcgggagggccctgctggtcgaccgccggtcgcaccacgttgccggagctaagagggcaacggcgtccgcggctgatcgcgctggcgtggaggtggtcaagggaatggtggtcgacggcagcagcgccatattcgatatcatcccgatagctgtcccagcaaagatatgaagagtccgctcgtctgtgcggaccagatacgtcatacgtgttgtgttggcgtgaagtagtgggtttactgtagcatccgagggcgatttctcttgttgccgatggcagccctccgcttgcgactgtaatgcttttggtgcggtgtcgtgtagtatgttacacgtagagttttctgtatctgtcagatgttcgttggatgaaagcaccgccgacactggtcgtcggctgtcgcggagtaagattatgtcaccacactcacgatctcactcctatttcaaactactacactttacaaacattgcaatctcaaatgcaaaacaatactttgc

SEQ ID NO: 76441 - DNA, 2362 bp, Zea Mays
ctcctccctccctcgcccgcctgcctttcgcttctttttaagcctttatttactaccactactatactcctctctctttctcactcgtcacaagctctctttcatcgcatccacaccattccacttccaccccacgaggatccagcctgcctgtccctctcgccgcacgccacgaccgtagtcgctcgccggcgtgtctagcctagccggggcctgggcctccgcgctcgtgctcccgggaaacaacgaccgacgcgtcctcatagtcatagaggcagctaaggcagccacgcattcgtcgctcgctcgaccggcgatggcgagaggtgacacggcgagcgaggcgctgacggcggactcagccgacgaggaggggcgccgcgggagcagctccagcgccagctccgacgccgcctccagcttctcctgcacgtactccccggccccgcccgacgagtggcacaaggtggccatcatcaagacctgcgtgtctgtgtcggccgacgccgcgggcggcggcggcggcaaggaccagaagcctcgtgcgtgcccgcgcgtgaaatcgccagagatggagatgatgaaggagcggttctccaagctgctgctcggcgaggacatgtccgggagcggcaagggcgtctgcaccgcgctcgccatctccaacgccgtcaccaacctctgcgcgacggtgttcggccagctctggaggctggagccgctgccgccggagaagaaggccatgtggcggcgcgagttggactgcctgctctgcgtcagcgaccacatcgtggagctggtgcccacgtggcagacattcccggatggtacaaggcttgagatcatgacaagcaggccgcggtctgatctgtacatcaacctgccggcgcttcggaagctagacaacatgctcctcgaaatcctggaaggtttcagggacgtcgagttctggtacgtggaccagggcatctgtgcgccggactgcgacagctccgcgtcctaccggagaacgttccaccgccgcgacgacaagtggtggctgccggtgccgcacgtgccccacggcggtctccgcgaggccacgcggaggcagctggagcaccgtcgcgactgcgccagccagatcctcaaggccgccatggccatcaacagcaacgcactggccgagatggccgtgccggtctcctacctcgactcgctgccaaagaacgggcgcgcggcgctgggcgacgtcatctaccggtacatcacctcggaccagttctcccaggactacctcctcgactgcctcgacctgtcgtcggaataccaggcgctggagatcgccaaccgcgtcgaggcctccatctacgtgtggcgccggaaggggggcggcggcgccagatcgtcctggggcatcgtgaaggacatggtcatggacacggagaagagggacctgctcgccgagcgcgcggaggcgctgctcatgtccctcaagcagcggttccccgggctcactcagacgagcttggacatgagcaagatccagtacaacaaggttcaattcgcgatacaccgagacgagagcagcttcgttcatcgatgtttaggccgacgtgggcaaatcgatcctcgagagctactcgagggtcctcgagagcctggcctccaacatcatcgcgcggatcgacgacctgctcaacgtcgacgagctgagcaagcaaccagctgacagcatcccgtccgccggagcggacgcgaaggttgcgtgcaagagcaacggcagcaagcaggccacggcggtgcctgcctcgggcacgccgtacgcgacggcgtacgccacgccgagcttctcgccggcgcagctgtcgagcccgtccaagatcgggagggccctgctggtcgaccgccggtcgcaccacgttgccggagctaagagggcaacggcgtccgcggctgatcgcgctggcgtggaggtggtcaagggaatggtggtcgacggcagcagcgccatattcgatatcatcccgatagctgtcccagcaaagatatgaagagtccgctcgtctgtgcggaccagatacgtcatacgtgttgtgttggcgtgaagtagtgggtttactgtagcatccgagggcgatttctcttgttgccgatggcagccctccgcttgcgactgtaatgcttttggtgcggtgtcgtgtagtatgttacacgtagagttttctgtatctgtcagatgttcgttggatgaaagcaccgccgacactggtcgtcggctgtcgcggagtaagattatgtcaccacactcacgatctcactcctatttcaaactactacactttacaaacattgcaatctcaaatgcaaaacaatactttgc

SEQ ID NO: 76442 - DNA, 1964 bp, Zea Mays
cttcgccttagcgtgaagtcgtgaactctgttcatagtccagggccgccgcctcagcgtggtcttgtacaatggcggaggattctggcgccatcctccgccacatctcctccgtcaaggatatggtcgacaaggttaatgaagagattgaacaaaacatacagaagaccagggaaatagaatcagagatagtgcaacattctgaaaccgaaaagcactatctcaacaaggagtctgagttgacaaaagaagtatcagttactgagtttgaactcaatggtcttatccaagtggctgcttctgaatcagatttacttaaagtggcagagggaaatttggagttccagaaagttgctcacgatgtgattcggaaaagagtttctgataagatggaaaaattcatcaatgaatctatggggtttcaagccaatatgctcaaaagttcaaatgaggatttagttctcttactgaatgaaaaaagttcactggaggatgaaagtgcgaaattgaaagtgaagataaacagtatacatagttcatccaaggaatacattgcagagattcttgaggaagtgaatacagaaaattcagttctggagtctgagctacggtacatgatttcggaatataaggatgtccaaaaggatataaacaacctgaagattctgtttagttcaagcaattcataggacaggttcctcgcgtcactgcaggtcggatgattcctgcttctccgatcctatcacatcgcgcactaccttccagcgaatccatcacggaagaaattgttccccacccaccctagactcgccgccgtcgcaactcccacccgatccccaaattctccggcggtgatggccagcctgtggcgcgccgtgatggatagcgtcagcggctcctccccctcggcgctggacgcggccccaggtagcggcgtcgagttctggcacggcgcagagcgcgctgggtggctaaataagcagggcgagtacatcaagacgtggaggcggcggtggttcgtgctgaagcaggggaggcttttctggttcaaggaccctgcggtgacacgggcctcggtgccccgcggcgtcatccccgtcgccacctgcctcacagtcaagggcgccgaggacgtgctcaaccgccagttcgccttcgagctctccacgcctgccgagaccatgtatttcattgcggactccgagaaggacaaggaggagtggattaactccatcggtcgctccatcgtccagcactcccgctccgtcaccgacgcagaggtcgttgactacgacagccgcccccagcccccgccgcagcttatgaccagcgaagagagtgcaccagcagcttaatggcgtggtgattcctgtgaactctctcgatatggatctgacttgtagcatatgtatttccaattccatgtgattgtggccttgtgccgacgttcctcactcttgattatgtagcagtatattaactatcaacgacatggtctggtatggtaataagcgagttaataagctgtgctttcgtttatagtttgttttatatgtatatactatactacgatttgatcttggtataccctaatttacaaggtggttgaagtctggctagtttttattttttttaacagttttgaagttttggccccaatttcagaaattgtaagagattttaatcattcagtatcccattcctctcgccttttgttgtgtttgacttgttctattctaatggaattgtattgagtcgcataggattgcttaactgactccgcatttttgcagaagattccccagttttggctagtttggcaacaacattttctcaagggattaccattttcccaaatgaaaacgaactaatttctcttgggaaaatgaaaatccattggaaaaatgaggttgtcaaactagcatttagatcctagctctgactctagcgctcttatgaagtttc

SEQ ID NO: 76443 - DNA, 1847 bp, Zea Mays
aaccacttcgccttagcgtgaagtcgtgaactctgttcatagtccagggccgccgcctcagcgtggtcttgtacaatggcggaggattctggcgccatcctccgccacatctcctccgtcaaggatatggtcgacaaggttaatgaagagattgaacaaaacatacagaagaccagggaaatagaatcagagatagtgcaacattctgaaaccgaaaagcactatctcaacaaggagtctgagttgacaaaagaagtatcagttactgagtttgaactcaatggtcttatccaagtggctgcttctgaatcagatttacttaaagtggcagagggaaatttggagttccagaaagttgctcacgatgtgattcggaaaagagtttctgataagatggaaaaattcatcaatgaatctatggggtttcaagccaatatgctcaaaagttcaaatgaggatttagttctcttactgaatgaaaaaagttcactggaggatgaaagtgcgaaattgaaagtgaagataaacagtatacatagttcatccaaggaatacattgcagagattcttgaggaagtgaatacagaaaattcaggtcggatgattcctgcttctccgatcctatcacatcgcgcactaccttccagcgaatccatcacggaagaaattgttccccacccaccctagactcgccgccgtcgcaactcccacccgatccccaaattctccggcggtgatggccagcctgtggcgcgccgtgatggatagcgtcagcggctcctccccctcggcgctggacgcggccccaggtagcggcgtcgagttctggcacggcgcagagcgcgctgggtggctaaataagcagggcgagtacatcaagacgtggaggcggcggtggttcgtgctgaagcaggggaggcttttctggttcaaggaccctgcggtgacacgggcctcggtgccccgcggcgtcatccccgtcgccacctgcctcacagtcaagggcgccgaggacgtgctcaaccgccagttcgccttcgagctctccacgcctgccgagaccatgtatttcattgcggactccgagaaggacaaggaggagtggattaactccatcggtcgctccatcgtccagcactcccgctccgtcaccgacgcagaggtcgttgactacgacagccgcccccagcccccgccgcagcttatgaccagcgaagagagtgcaccagcagcttaatggcgtggtgattcctgtgaactctctcgatatggatctgacttgtagcatatgtatttccaattccatgtgattgtggccttgtgccgacgttcctcactcttgattatgtagcagtatattaactatcaacgacatggtctggtatggtaataagcgagttaataagctgtgctttcgtttatagtttgttttatatgtatatactatactacgatttgatcttggtataccctaatttacaaggtggttgaagtctggctagtttttattttttttaacagttttgaagttttggccccaatttcagaaattgtaagagattttaatcattcagtatcccattcctctcgccttttgttgtgtttgacttgttctattctaatggaattgtattgagtcgcataggattgcttaactgactccgcatttttgcagaagattccccagttttggctagtttggcaacaacattttctcaagggattaccattttcccaaatgaaaacgaactaatttctcttgggaaaatgaaaatccattggaaaaatgaggttgtcaaactagcatttagatcctagctctgactctagcgctcttatgaagtttc

SEQ ID NO: 76444 - DNA, 1318 bp, Zea Mays
gtcttgtacaatggcggaggattctggcgccatcctccgccacatctcctccgtcaaggatatggtcgacaagcttctgaatcagatttacttaaagtggcagagggaaatttggagttccagaaagttgctcacgatgtgattcggaaaagagtttctgataagatggaaaaattcatcaatgaatctatggggtttcaagccaatatgctcaaaagttcaaatgaggatttagttctcttactgaatgaaaaaagttcactggaggatgaaagtgcgaaattgaaagtgaagataaacagtatacatagttcatccaaggaatacattgcagagattcttgaggaagtgaatacagaaaattcagttctggagtctgagctacggtacatgatttcggaatataaggatgtccaaaaggatataaacaacctgaagattctgtttagttcaagcaattcataggacaggttcctcgcgtcactgcaggattgccactgacatcaagacgacaggaataaataccaaattcttcagtaacttgataggaatggcttgtacaggcttaatttatggggactttgcttgatatgttcgaatctcccttaaatatcttctttaggatgtcgcttcctcactaccttagtttaggtcacttttataaacgtaaacactagcaaactcattagttcacagattatattaatcagcaaatattaaaatcatttagtcaaatggactgagttctattttcttgcaaaatactatatccattctcgaatatttgtctctgactagtttttttttcatttagtcaaatggactgagttctattttcttgcaaaatactatatccgttctcgaatatttgtctctgactagttcttttttgaactaaaacaaagtcttgtagtcctacatgtgcacgcataaaataatataatcataaggctggtttggtggactcgaaaataaaggttatccatggagtaagaatctcctcgctgacctaagtgtgcgaggacaacatgcattgcggtaacacagacacgacacatggtaatagtcctgcagcaagtgaagcttggcctcagataatcgagccaacgaacgagggacataataggaatctggatgcttttctaggaatccggatgctgagaaaatctgactgtgtagagaatttaagtatcatgaagaatacatgcggaagaagataaaatagtctatagggtttatattgtagaaagtaacagtttcctattattggaatgactcggccgattttgttttcaagtttattttggacggttttgac

SEQ ID NO: 76445 - DNA, 1596 bp, Zea Mays
tgtattggccctaaagaaaaataggggctaccgctctgacccaacccatcaaccacttcgccttagcgtgaagtcgtgaactctgttcatagtccagggccgccgcctcagcgtggtcttgtacaatggcggaggattctggcgccatcctccgccacatctcctccgtcaaggatatggtcgacaaggttaatgaagagattgaacaaaacatacagaagaccagggaaatagaatcagagatagtgcaacattctgaaaccgaaaagcactatctcaacaaggagtctgagttgacaaaagaagtatcagttactgagtttgaactcaatggtcttatccaagtggctgcttctgaatcagatttacttaaagtggcagagggaaatttggagttccagaaagttgctcacgatgtgattcggaaaagagtttctgataagatggaaaaattcatcaatgaatctatggggtttcaagccaatatgctcaaaagttcaaatgaggatttagttctcttactgaatgaaaaaagttcactggaggatgaaagtgcgaaattgaaagtgaagataaacagtatacatagttcatccaaggaatacattgcagagattcttgaggaagtgaatacagaaaattcagttctggagtctgagctacggtacatgatttcggaatataaggatgtccaaaaggatataaacaacctgaagattctgtttagttcaagcaattcataggacaggttcctcgcgtcactgcaggattgccactgacatcaagacgacaggaataaataccaaattcttcagtaacttgataggaatggcttgtacaggcttaatttatggggactttgcttgatatgttcgaatctcccttaaatatcttctttaggatgtcgcttcctcactaccttagtttaggtcacttttataaacgtaaacactagcaaactcattagttcacagattatattaatcagcaaatattaaaatcatttagtcaaatggactgagttctattttcttgcaaaatactatatccattctcgaatatttgtctctgactagtttttttttcatttagtcaaatggactgagttctattttcttgcaaaatactatatccgttctcgaatatttgtctctgactagttcttttttgaactaaaacaaagtcttgtagtcctacatgtgcacgcataaaataatataatcataaggctggtttggtggactcgaaaataaaggttatccatggagtaagaatctcctcgctgacctaagtgtgcgaggacaacatgcattgcggtaacacagacacgacacatggtaatagtcctgcagcaagtgaagcttggcctcagataatcgagccaacgaacgagggacataataggaatctggatgcttttctaggaatccggatgctgagaaaatctgactgtgtagagaatttaagtatcatgaagaatacatgcggaagaagataaaatagtctatagggtttatattgtagaaagtaacagtttcctattattggaatgactcggccgattttgttttcaagtttattttggacggttttgac

SEQ ID NO: 76446 - DNA, 778 bp, Zea Mays
ccaacccatcaaccacttcgccttagcgtgaagtcgtgaactctgttcatagtccagggccgccgcctcagcgtggtcttgtacaatggcggaggattctggcgccatcctccgccacatctcctccgtcaaggatatggtcgacaaggttaatgaagagattgaacaaaacatacagaagaccagggaaatagaatcagagatagtgcaacattctgaaaccgaaaagcactatctcaacaaggagtctgagttgacaaaagaagtatcagttactgagtttgaactcaatggtcttatccaagtggctgcttctgaatcagatttacttaaagtggcagagggaaatttggagttccagaaagttgctcacgatgtgattcggaaaagagtttctgataagatggaaaaattcatcaatgaatctatggggtttcaagccaatatgctcaaaagttcaaatgaggatttagttctcttactgaatgaaaaaagttcactggaggatgaaagtgcgaaattgaaagtgaagataaacagtatacatagttcatccaaggaatacattgcagagattcttgaggaagtgaatacagaaaattcagctgcttgtcactcatcgcaagaagtatgaggactcatacatgtcctcagaagagggaagatactggtatgcttcgatggtgaaattggctctggcaagaagctttagtcatggtttcatggagctttcccaatatagtgaaaaatggtaaagctgaagcggaagaaaaatgtg

SEQ ID NO: 76447 - DNA, 2233 bp, Zea Mays
cggcgcggtggaccacgcgacagcccgcacgaggggcggtcgtgtagcacgtgcgtgcaacagccgttccacacccggttcggctaggtgcagatcctcgacactacttgtgtttggttcggtctccggtgagcagtgagcttcaactccatcatcggtagcctcaagctgaagctccatgcaaatgggcccaagaatacgacgcgaacaggcgagatgcagatgaacaagtgcatgtgcacggatccaagctctctggatgccttgccttgcctatataaaggtccgcagcaccacacatcaccacacacttcaattacgattattccagataagcacgatccgatgatggccccaccgatatccgccgatgccttggtggaggctgcctcggccgtcgccgcgtacccagccatcgcgccgaacagaatgctttgcaaggacgcgccggcgccggccatctctgtcgtctcgaagcagacggtccggcccgccggcgcgtcggcggcggtcggcagtggagacctcaggctctcggtgtcggacatgccgatgctatcgtgccactacatccagaaggggctgttcttcccgccgcctcctcccggcgtgctggcggcctcgctggtgtcgtcgctcgtggcggcgctctcccgcgcgctcggcgtcttccccgcgctcgccggccgcctcgtcacgctccacgacgacagcatcgtgatacggtgcggcggcgacgacgccgccgtcgagttctaccacgcggtggcgccgtctctgtcgctcggcgacttcctggtgcccggcgccgacgtgccgacccgtttgacgaacggcctgttccccatggaccggacggtgagctacggcggccacggccgcccgctcacggcgttccagctcaccgtgctcggcgacggcgccgtgttcgtcggcttcgtcgccaaccacgccgtcgtggacggcacctccttctggcacttcttcaacacgtgggcggggctgtgccgcggcgcgccggtccgggagcccgacttccgccgcaacttcttcggcgactccaccgccgtcctacgcttccccggaggcgcgagccccgccgtgacgttcgacgccgacgcgccgctccgcgagcggatcctccacttcagtgctgccgcaatcagcgagctgaaggcgacggccaaccgctcgaaaagagcaggtcaggaagccgaggctaacggcaagctcgcgcacgacgactccagacttgaagggcgttccggtgaaatctcgtcgtttcagtcgctgtgcgcgcacatctggagggcggtgacgcgcgcgcgccggctgctggctgccgacaagacgacgacgttccgcatggccgtgaactgccggcaccgtctgcgcccggcgatctccccgctctacttcggcaacgcgatccagagcgtggcgacgacggccaccgtagccgagctggcgtccaacgacctgggctgggcggccgcccggctgaacgccaccgtggcgtcgcacaaggacggcgcgatccggcgcgccgcggcggagtgggaggccgcgccccgttgcttcccgctaggcaaccccgacggggcggccctcacgatggggagctcgcctcggttcccgatgtacgacgggaacgacttcgggtggggccgcgcgctcgccgtgcggagcggccgcgcgaacaaattcgacggcaagatgtcttcgttccccggacaggctggggacggtagcatcgacgtggaggtgtgcctcgcgccagacaccatggcgcatctcctcctcgacaaggagttcttgcagtacgtgtcctcccctgcaccgtgaggcggtgacagagtgaatgtgtggcttgttgctgcgcagctacatatagtaactggatttgtaccctttcagcagatatcaagtgcttgccaactttaatgagtttgagtgaccatgtagatgtagagaggctgttctgctgtttccttcgtgatgccgttgtaggctagcagcactagttatggcttccgagcaggtgtggcaaaacggttatgacttatgatagacggatatggtttttaggctcctttgtgttaagtaaccctagttagggttatgtgcacaaatacttgctttgtccctgaggggtctcacctctctatataaggaacctatacaccccctcataatacagagaagagaaagaggccagaggtccaaccctata

SEQ ID NO: 76448 - DNA, 555 bp, Zea Mays
aaaatatttcatcaacacacaggcctactaatattctactcggtccactaattcagctaagtgatcggaatagcgcaataactcgctataactgaacctggctcaataatcgcaagaactgcaaagtcgacgagagtttcgtgactcacgcaatttatcgagcaactaatgagtatcacactagtacattaatttatttaacgatcgaaccattctaaacaatttatcagcttatcgtttccacatcagacacgaatccacgagatcggtagcgattttccgatccaggcaatttatcgagcgcttagggaatatcacgctgctagcttcgtcttcacccgattcttgggttttcttgctgacgcgcggaacgacgatggtcctaattcaggcgttttgtcgagcaccaagcaagtgttgcacggcaagatgacgtcgaggcgaggatcaaagatggacaaccggcacggcgcgatggcagcttgaacagagacgagaccgacggcgaggtcgttgaagctggagggggagccgatggcgctggggcaagggggt

SEQ ID NO: 76449 - DNA, 3006 bp, Zea Mays
ctcaaacccagaaggccagcagtgcgtgcgcccttttcttcgctcacattcatcccgcgtgctctctctctctctctctctcgggccgtggcgtcgagtgggcgaccgccgccacccccgtgccgtgcgctctctctctctctctcgtgtcgacgggtgggtgggcgaccgtaggccgccgccgccgcctaggccaggtgcccaggtcgaccttcaacagcgacgagcatccaccagacgcaatcaagtatggcttcaatggcaatcattaggagaaggaagtatttcttggatcatgttaacacacctaccatttcatcgtctgctttctttacattccaacatggaagactcggtttggaggttgagccaagaacagaacagcgatttctcgagcatagttctggggattccaaatgcgagaaggagcaacacaatatgaatttgataaaaaaggatctactaggtcttggtaatgggttttggcaacgtccatcttatgtgatttctctttctcatggtggatttggaaggaatgaatttagattgcctctgagcctgggagctagatctttgctgcagtcggtccgcacagcatcaactgcaacagcaaggcagcctaagatggatacagatgatgaacagagcgaggaccacaagcaaaataaaaggaaaaaggaggcatccccagaagaatgtgatcaggctgtggaaggcctcagcactgcaaaagctaaggctaaagctaaacaggtacaagaatctctgaaggttggccaatcaattatacagaaattttgggcaagagtcctgggtgtgggccctgctcttcgtgctgttgcttcaatgagcagggctgattgggcagcaaaacttaagcattggaaggatgaattcgtttgtacactgcagcattactggttagggacaaaactactctgggcagatgttaggatctcatcaagattgctggtgaaacttgctggggggaagagcctttcaagaagagagaggcaacagctgacacgcacaacagcagatatcttcaggctggttccgtttgctgtgttcatcattgttccattcatggaattcttactgccagtcttcctcaagttatttccaaacatgcttccatcaactttccaggacaaaatgaaggaagaggaagcattaaaaaggaaattgaaagcaaggatggagtatgcaaaatttttgcaagataccgcaaaagaaatggcaaaggaagttcaaacatctcgtagcggagaaacaaaacaaacagctgaagatctggacgaatttttgaataaggttaggagaggtggacgtgtctctaatgatgaaatcttgaattttgcaaagctattcaatgatgaacttactctggataacatgaacagaccacgcttggtaaatatgtgcaaatatatgggtatccggccttttggtacagatcactacatgaggttcatgcttcgcaaaaaacttcaggacattaagaatgatgataaactgattcaagctgagggagttgaatctctctctgaagaagagctccggcaagcctgccgggaacgtggtcatctaggcctgctgtcaactgaagagatgtgccagcagctccgagactggttggacctatcacttaatcatgctgtgccatcttcacttctcatactttcaagagcctttactgtgtctgggagaatgaagccagaggaggctgttgtagcaacactatcttctttaccagacgaagttgtggatacaattgggacagtattgccatctgaagattcagtttctgaaaggaggagaaaattagaattccttgagatgcaggaagaacttatcaaggaggaagagaaaaagaaagagaaagaagaaaaggcaaaacaaaagaaagaagaggcaaagatgaaggaaccagaaactgctgaagaagatttagctttgaaggaaatgactgatgctactgctagggaagaactgagaaaagcaaaagaacatgacaaagagaagctctgtaatatcagccgtgccttggctgtgctcgcatctgcatcttctgttagcaaggagcgtcaagagtttctgagcctcgtcaataaagagatagagctatataactccatgctcaaaaaagagggtactgaaggtgaagaagcagctaaaaaagcatatatagccgctagggaagacccagacaatgatgctgaggctgctgcagaagaaaaggtctcgtcggcgttgattgagaaggttgatgctatgcttcaagaattagaaaaggagattgatgatgtggatgcacaaattggaaaccgttggcagctgcttgatagggaccacgatggcaaggtgactcctgaggaggtggccgcagctgctgcctatctgaaggacaccatcgggaaggaaggcgtgcaagagctcatcaccaacctttcgaaggacacagaaggaaagatcctcgtggaagatatcgtgaggctagcatcgcaaacagaggaacacaacgacgacgaagagcaatcacggcagtaggtggaaacagcccgagtatctagatgggtggcctattatttcaggaagaaaactaccaacctctcagttacttgatggctgtgcctggttaatcagaaggcagtacaggcgtttttggtgcccctagtcagagaccccggtagaataactcgttgctgtaaagatggtgtgactgtgacatgcatacaagtgatagggtactctacagagttgtggttcggcaggtagttcgcaaccgaaattttgactggttgctgtgaaagtggaaatacagttcggttttgtcttaaagctaccctcaattctaaaaaaattgtcttctcttgagtctaaaagtagacgggtgactaatgtggaaatgaattaggatgtttatgtactccccctgtttaaattatagagcattttaactttttggagattcagtatcttaaatttgaccagatctatctccag

SEQ ID NO: 76450 - DNA, 2081 bp, Zea Mays
accaaccaaacagttccttcgccgatttaagccacgtgactgccaatccggccaggctctccgtgcactacttgtctcctccctcgctccgtccgatgtgcctgctggcacagcgccacctaccaccctcagctcgacccaactccctcgtcagtcgtcgccccgcgtcgcgtggtcctaatttaagccaccaactgccgatcaacggcgctcgcccgcccgcccgcccgccagcccgcgcacgccgctcgctccccactcactgccatgggcctggctcgccgcgcgacgctcccgtcgatccctgccgcgctcctctgatagtcacagctagccaggcggccccgcttgccgtgtgtcgggctcggcttgtcccacgcgcgggcgcggagcgggttgttggatcaagctgaccatggcgtcggtcaggtcgtgcgcgtccgtgaagtccgccgtgaggagtcctgtcagttacagatccacgagggccgtggcggccggctcgggaaggctgcgcgtacgctcctcgtcgctgcaggcgctcgccggctgcgccagcggcggcggcggcttcggcttgctcggcagcgatgatgggccgagggtcaggcggggcgggcgggaggtcctcgccacgtgcagcgcgagcttcgacggggtccgccccgccgtcgtggcgggcgccgccgctcagcccgggtcggcggcgttccccgagcgggccaaggtggtggcgctggtggccaccatcatgctgctctgcaacgccgaccgggtcgtcatgtccgtcgccgtcgtgccgctcgccgcccagcacggatggtccagctccttcgtcggcatcgtccaggagctttggcagacagatatggcgggaagaaggtgatggcaggtgctgctgcgctatggtccttggctacaatcctcactccgtgggcagcctctcgctccaccatcatgttgcttgctgtacgtgcactatttggcctcgcggaaggtgttgcatttccgacgatgagcaccttcttaccgaagtggttcccaacacatgagcgtgctactgccgttggcatttccatgggtggattccatcttggaaatgtcataagcttcctagcaacaccaatcatcatgtcacacataggcctctcgggaacatttgccttcttcgcatcgcttggttatttgtggatctctgtatggatgatgaacgtagaaagtgacccacttgacagccatactataagcaagtctgagttgcaattaattctagctggaagagctggatctaaagtccaaggcagtaataaattcccatcccttagggaattgttctcaaggactgaattcttggctgtcactttggccaatgtggtcaacaactggggctattttgtcctattgtcgtggatgcctgtgtacttcaaaacggtttataacgtcaatctgaaacaagcagcgtggttcagcgccataccttgggcagtcatggctatgtccggctatgttgcaggagcctctgcagatttcctgatcaaatctggtttccccataggactagttcggaaaattatgcagtccattggttttatggggccttgcgtggcattgctatgcttaaggtttgcccaaactccatcagttgctgcagttctcatgaccattgccctgagcttgagttctttcagccaagccggatacttttgcaatatacaggacattgctcccaaatacgctggatctttgcatgggatgacgaacggcatagggacggtggccgccatagttagtaccatcgggaccggctacttcgtccagtggctagggtccttccaggcattcctcaccctcacggctgcgctctacttcagcgccaccgtcttctacaacgtctacgcaaccggagacctgatttttgactgagacaagacatgctaatgctaggattctttcgtgtagacgcagaatcccaaagtgtaccaatatttattatttatttgtacctcccaaggatggaataaaatagaggctgattgtttgccaagcttaaaattcgtgtgcaaaccagggtttacaaaagc

SEQ ID NO: 76451 - DNA, 2069 bp, Zea Mays
accaaccaaacagttccttcgccgatttaagccacgtgactgccaatccggccaggctctccgtgcactacttgtctcctccctcgctccgtccgatgtgcctgctggcacagcgccacctaccaccctcagctcgacccaactccctcgtcagtcgtcgccccgcgtcgcgtggtcctaatttaagccaccaactgccgatcaacggcgctcgcccgcccgcccgcccgccagcccgcgcacgccgctcgctccccactcactgccatgggcctggctcgccgcgcgacgctcccgtcgatccctgccgcgctcctctgatagtcacagctagccaggcggccccgcttgccgtgtgtcgggctcggcttgtcccacgcgcgggcgcggagcgggttgttggatcaagctgaccatggcgtcggtcaggtcgtgcgcgtccgtgaagtccgccgtgaggagtcctgtcagttacagatccacgagggccgtggcggccggctcgggaaggctgcgcgtacgctcctcgtcgctgcaggcgctcgccggctgcgccagcggcggcggcggcttcggcttgctcggcagcgatgatgggccgagggtcaggcggggcgggcgggaggtcctcgccacgtgcagcgcgagcttcgacggggtccgccccgccgtcgtggcgggcgccgccgctcagcccgggtcggcggcgttccccgagcgggccaaggtggtggcgctggtggccaccatcatgctgctctgcaacgccgaccgggtcgtcatgtccgtcgccgtcgtgccgctcgccgcccagcacggatggtccagctccttcgtcggcatcgtccagacagatatggcgggaagaaggtgatggcaggtgctgctgcgctatggtccttggctacaatcctcactccgtgggcagcctctcgctccaccatcatgttgcttgctgtacgtgcactatttggcctcgcggaaggtgttgcatttccgacgatgagcaccttcttaccgaagtggttcccaacacatgagcgtgctactgccgttggcatttccatgggtggattccatcttggaaatgtcataagcttcctagcaacaccaatcatcatgtcacacataggcctctcgggaacatttgccttcttcgcatcgcttggttatttgtggatctctgtatggatgatgaacgtagaaagtgacccacttgacagccatactataagcaagtctgagttgcaattaattctagctggaagagctggatctaaagtccaaggcagtaataaattcccatcccttagggaattgttctcaaggactgaattcttggctgtcactttggccaatgtggtcaacaactggggctattttgtcctattgtcgtggatgcctgtgtacttcaaaacggtttataacgtcaatctgaaacaagcagcgtggttcagcgccataccttgggcagtcatggctatgtccggctatgttgcaggagcctctgcagatttcctgatcaaatctggtttccccataggactagttcggaaaattatgcagtccattggttttatggggccttgcgtggcattgctatgcttaaggtttgcccaaactccatcagttgctgcagttctcatgaccattgccctgagcttgagttctttcagccaagccggatacttttgcaatatacaggacattgctcccaaatacgctggatctttgcatgggatgacgaacggcatagggacggtggccgccatagttagtaccatcgggaccggctacttcgtccagtggctagggtccttccaggcattcctcaccctcacggctgcgctctacttcagcgccaccgtcttctacaacgtctacgcaaccggagacctgatttttgactgagacaagacatgctaatgctaggattctttcgtgtagacgcagaatcccaaagtgtaccaatatttattatttatttgtacctcccaaggatggaataaaatagaggctgattgtttgccaagcttaaaattcgtgtgcaaaccagggtttacaaaagc

SEQ ID NO: 76452 - DNA, 695 bp, Zea Mays
cttttgcagcattaggacaagctcctccggggtaaccagtttggaccactcatgtgtgcctctaggaagctacacaggtacaaaagctcagaatgagatatcaatcttaagctgcattagtagtccacctcaagaaaagctatgccagtataactgtagaacatcatagcatggatgtttctctggagaagtgggagctcttaaccgtctagggccattactggattctaacctgggcaacaaaatatcagaaaaccagaagcctaaactgacatggccttgatagaatgatgatggattagctcacaggttctcttcgttagatcataataaagagtttcaaatttgaaacaaagtcttcaaaccagaccaactttgaggggcgtaaaccactggtttatggatctaaagacagattatgacaaccgaacctacagaaacatgtagctgcacagaacaaggggggcactctagatgtgcagtccgtgacatcatatgttaggaagaatagaagtatagaactaccatgtcctttacaacataactgaatatttaatagatttgaaatactgatttgttatagctcaagttcataagaagcattagctgtcagagtccagtctacaagttccactcgagtcaaaacgtcactaagcaagcgtatttctccaatacaatgggctacccaacaaaat

SEQ ID NO: 76453 - DNA, 1593 bp, Zea Mays
aagaagaagaaatgccccgcgacccacgtcccctccggccctccctctatctttcgctcgctctcggcgacagctgggtgaccgtcgtcgccgccgcccttctccaggtgcccaggtcttcgcaggtccctttgccgcctcttcgccgccgacgagcaccagccagaaaagaagctgaaccatggggaagagaaagtcagctgctaagccacctcctaagaagcggatggacaagcttgacactgtattttcctgcccatttgcaaccacgggagtagttttgagtgccgaattgacatgaagaatctgattggcgaagcatcttgtagaatctgtcaggaaaacttcagcacaactattaatggtatgccaaacctatgtataaaattgtactggttgctcctaatttcacttctatgaactgtactaatttgcatcgaagaaagtttggtcccaaacaactcgtgaactcgttttcttattattgggctgatggacaaggcaacgtgaaatttttcatggtacctgggaacagaacatagcctacaaactgcagaaccattcccatttcatcttgtagtcttgtcttgctaataatggactttgtgggttgtctgttccctgtgtaattcatttgaccatgatagttcttgatcatgtgatatcatagaatgtgtcaaaaacttcatcacatcaaaattaaaactggatagaacactatacataggtaatagtagaattaaatgttaagaagtatttctttatgtttattttaattactaattgttttacgtgatgtcttttcttgcagcactcactgagcctattgatatatatagtgaatggattgatgagtgtgaacgtgttaacactgttgaaggcgacgatgatgcgtgagcttgccccatgcggatgaaactgttacctacaatcgtaatgtaatgtgctggtattctcgaatgccatagcccatagtcagccatggcttggaataacgtagtggctgactgatatgccagtaggcaccttatctagtacttacagaactacaaaaagtttgtactatacatgtatggacaaccttataagtggctatgtgtgtacctatcctaacgctcatcccagatggtgtatcggcgtttttctgtgagattgttttcaagcaagggttgttcattcattgggtcttctcaggacaaagagaattatgctacagtcaaccagatggccgctgttgcgccgacaatacaggggtcatccagttcattttaagggctttgtagagcaaatgcaaccagaatataatttgcagctaaagatattcataggtagaattgttttcagttcattcaacgctgaaagcagtttcggtttggaggctgagctttggatcattggatggcacttggcagctttggcacctggagtaccgctcattagtttttcatcaagtcgtttatttcttgtgcacattgctggagtggagactcggagatcgagatcaagactgtacgcatcataaaccgatcagtgtattcttagtgtattcttcgtagtagaaaataagcagcagcaggtatagctgctttacgc

SEQ ID NO: 76454 - DNA, 4038 bp, Zea Mays
tcagagtgaatcagttcagacttcggagtctattctaaacttcaaaaatcagaacttcagagttcagacttctgagttcacagttcagactttcaaagtctgtactcgacgactaatcatgattagtcatcttatcgatgctcaggcgactagagtcgactagccgactttaaaaccttggagcccacgatgaggttgtggccttccgtaagaagaccaatgccatgctcgatgtggctcaggctgcgtgaaaggagcctgccaacacatgcgcttgtgtccaaacagccacccttaagcaagagaaggccaccgtcgctgccctcaagcagaaggttgtcgccatctggcagagtacatccccccacgattgtcagcccccatcactggacgaccccgttgtagactacaaggctgccactgccgccatcctccatgtctagacagtcgttcctgacatccaatcgttggtgatggtcatcctcgtccgacaattgcacctgctagcatgatcaggttttgcttgctctcaatcggtacgtcctcttcggtcacatcatgtcagacacttggtcgtacaccaaatcatgttgggatcaatgaacaacatcgtcatcaaataagtctcgggcatcatctcccacgagctgtgtcagatcgccagggagcacaatggcatgacacaccgctcctagcccgctctcaagtcgtctaactaatcatgattagtcgcgttgatcgatcgtatgggctagataaagtggctcgacacgatcaggtggactagaaaactagtcgccgactagtcatgactagtcgtctgactaggtgatctgccaactagcccacaatcagatgggttgatgaatggatgatggtaataacatgggctttgaggccgtctcttgagaatttttggcccactagggttcagaatactcttctcttatctctcttctctcattctcatcgatacatgagtgcctctttcctctttcatcttgtctccgcaccgccagctgccaaaccgtcgcaccgcctggaccaccgtcttcagatcatcgccgtcagggactatcgcctagaatgtcgtcgccagggactgccgccgggccccagcccgcaaccgacgacgcctagagccctagagatgagttcctcgtcagatggtacgcctctgctaatctgctctgttctctctttgggataagcaacgttgtgttgattcacttgaatgttgacctgcagcagtgtttctagcctgctgctctagcctctaattgtctagcagtctagcatttattactattagtgcttggccaattggccctcatgatgttgcatgatgtggatcaacgacaacagcatgatgtggtacaagtattgattcttgagccttgtagtggtggcatagctaatgccatgacttcatctaatcttgcagatgagtcttccatagcagagaagaccatagctacactgccgacggaaatggcagatatggctaagaatcctaagagaaaggctcaatcttcagacctaggatggaagtttggattctagccattcaatgcatttttgcaagaagattgcccctgcaggaatcaaaaggttcaaacaacacattgctgggggttttggtgatgtggaaaagtgcccaaaagcacctgaggtagttaagaaagagatagcagcctacttgacgaagatacaattggaaaatgaagaggaaggtgaagaagaggagtaagggcagcaagaagatgcacaagaggcaaacccagcactaagttctgggcaaaaggaaagcaagcaaggaagaaaattgctcatgctgctaatagttcctttatggtttctgctcttgtgaaaccacaaacacagaagcacacgaagtcaataagtgacatgctctgcaagacaccggaagtagttgcagaaaggcataaatccaagacctcaacctactcttgagcatctaacaaagaaagataagaggccaaacaaattgttgatgaccatgtagctgatttcttgtatgagaatggtatctcattaaatgtggttaactttggaaattgggaaattttgcttgagtctattgaacaatatggtcctagataccggtcaccttcataccatgaggttaggggtccattgcttgatagggctgttaacaggacaacggaacttaggaagaagcaagaggatgcttggaatgagtacggttgcatactcatgtttgatgggtggacagacacgaaccactgtcatctcatcaattttctttttttttatcgaacacgcaggagaactgtgcatctttatattaaagggttaccctatattaaaggggaaaggagacaaacccaaagggttttacaaggcagagatcctgccaaaagaacaaaaaggaaaagaaaaacaacacaaaaaaacagaacaagaccaagggtctagatgtctaaggacccaaccacattcaaagacctagcgagatccagggatccaaggcccttagcaccagccataacccaacaaactgattcatccagggatctcatcaattttcttgccaacagtccaacagggtcctttttcattggatcgttggatgcttctagtgaggttgtcacggacaatggagccaacttcaaggcgacgagaagaattctaatggagaggatcccaactctattttgggcactgtgtgcaagccattgcttggatttgatgctagataatattggaaagcatgcaaaggcacaagcagggtctaagtcttttgttagtgatgagtggcatcaaaacaagttgcctgccaatagtgaaggccaacaagttgaaaacattgtcctttctattccgttttggacaaagttggaaaaatgcttacaagcttcacaaccacttcttattgctcttaggatagcagatgggaatgaaacaccaccagctcctgggatcatggcagccatggatgttaataagtgcaccatcaatgattcttcaaaagacaagccacaattacttaaggagatcatggattgctatgacaagagatgggatacccaaatggagcaaaagttatatgaggcagccttgttcttgaatctagcctagttctttcccataagagaaaaggataggagacaggcttcgaggctaaggtccacatttaatgatgttttatagaagatgacaattgatgatgatgaacaaagtaagataagtaagcaagctgatgattatgagaggtccgaaggtgattgcttctcaaaggcattagcaataagagatagagatcaaaaaatcctagtaagttttatcctcactcatgactcatctaaattattcattcttctattttttcgctaagtggtgactgatgaactaaaacaaattattaattaaatgcagttatttggtggggatcatatggtggtcttgcattcgagctccaaagtttagcaaaaagaattgtgagcctttgttgttcgacatctggctacgagcgcaattgaagctcgttttctcttgtatgtgcaccttttttgttctttttttattgtgaagttgctacccagaccaccaattagtgtgttttcttcttttttatgtaggtccataccaaaaagagaaaccgcttagagcataaaaggttaaacaagttagtgtatgttagctacaagcgaaagatgtccaacaagtttcaaaacattagagagctcgtttcaaagggcaagaagcagtaggacgagtgaatgactaactactgctgactaggggcgattagtcaccctaatcgtcgactagtcgaccttattgcccctatggcgtctaggatcgactagatgatttaaaacattgatctctaattacatttttcttctccagtatgtgagcattaaacagaaagtcaaaagcattgttttcagatcgtctgatcgatgccactgggcgatcagacgattagtcgtgattaggcgacgatcagggcgattagtcgccccagatcgaccctaatcgtcccctcgt

SEQ ID NO: 76455 - DNA, 1502 bp, Zea Mays
gtaagttcctcaggcagtcacagtaattcttaactgactcatgttcttgactgcatcgcccgttggtccgatgagatttaccaacagaccctggcaagacaagatgtgtgtgaattgtgcgtcgataaacatcctatctgtcaagattgcatgctcggatatcgacttccccatccaagtctatggcaccgttgttgccagggactgcatcgactacaagtgtgtttacctcttccgccgagataatgaccattgccaactcatcagctctaatgaagaatcattgatcttgactggcccaaaacggggacttgcattgtggtacgatgctgattatgttcagactgatctctgggtcaaggatcgtcaagggcattgcaaacaattcagtaaggggatcgtgaggatcccaggcaatcaagtgtttgacaaatgtgagcctgaaacagtatctcttgctaccaggctcagtactgtggatgtgacatatgacgttgtggaatgtgcggtggaggcaactgttgcagctgaagttacacagggggaattctatggagcatgactgcccacaccaccagagcaagaggaggattgtgctgtttgatagccaagtaggaggtgataaatgtcatggtttgattcaattgatgcgacctgttgtatcggtctctgtgatggacaagctgaaaattttcgcaacgaccgctgctggtgtctctacaggcgttgaagttactcctagatggaacggtggacacgaattcgtactcactttaggtgacgctacgatttgtgtgaaggttacttggtcgatggtagatccacggctttaaatgggttcgcctgttcgttgttaagcatcatcggtggaagtgtagtagtgttgcattggaagggtttattctactcttgttatttgtctaaatgcatcattttttttgtgtggtggtggtggggttgtgttgctgggttctcaggtaatattttaaataaaacctgaaaatccaggcagagctcaccttttggtgcggccatggtggtcttcaccttttgctgggttctcatgcttgtttgaggcagatatgatgagtggctacaaacagactggagcgttcaggtgtgcgagcatccagagctgaacggaattgtgattctaactgactagaaactgaagagcctcctttcagttttaaattgtgcatcggaattgtagaattgttatcttagctttcaaggcatcggcacttcaaccttcggtttactcgtgtgtgaagtcgtagaaacattggccctttcgttcgttctcttgggagagttccagtggcgatgaagcttttcagttttcacagctcggatgtgagcaaatccattagctcctgcactgcatggtacggtacctgctacgttttgaacatttgtgaagcattcaattttttttttttttttgcctttgtttaagacagactgcttatcacaaagcatcctctgtcggttcaagatat

SEQ ID NO: 76456 - DNA, 1269 bp, Zea Mays
tgacgcccgcgtgaaaccagcgtctcgtgcatcctacggccaccggctttccccattttgtccttaactcaaacgcgcaagccaccccctcttcgcttccgttcctgtcctctcctctgtccctctacggtgcttctgctcgccggcccaaaatcgcctcatcgaccacgcccccttccaggctcccgtctccatgggtctcctctcaaacaggattgggagggagagcctcaaggcgggggatcatatctactcctggagggcggcgtgggtctacgcgcatcacggaatatatgtgggcgatgataaggtgatccatttcacaagaggaagaggacaggaggtcggaacaggaactgtcgtcgatattattcttgtgagttccaccccaaaacgaagcaacacgccttgcccggtgtgcaccgacgaaaccagcgacagcagcacagagacgaacggcgtggtatcctcctgcctcagctgcttcctagctgggggtgctctctaccgtttcgagtacgcagtcaacccggcgctcttcctcgccaaagcgcgaggagggacgtgcacgctcgctccctctgaccctgacgacacggtggctcgccgcgccagatacctgctgagcaacggtttcaggtgctacaacctgttcaagagcaactgcgaggacttcgcgatatactgcaagactggccttcttgtcgctgagcagggcgttgtcgggcagagcgggcaggctatctccatcatcggtggacctctcgccgcggtggtctcgaccccattccgcttggttaccacgaacatctatgggatggcggtgatggccgtcggggtgtactgcgcgagcagcggcaggatatgtgctgtggagaacatcgcccagctggtggctccggaggcagaaggcccggccgatgccacggccacggccacgctggctgcttaacggaccattgtgccattgttgctgtgagagagatgtgcgtcagccaacatgtgtgctattgctttggcttatttgtgttcagaatccacttaaactcggtcgaagtgagctttccgttcggcaacgtctgtactcttacgaatctcgatcgtgtatgtctttaagtattgtgttgtgtttcaaagataaaaaaaggtgacctttgtgtatgattttttatacacgttgtctcttagctgcattgatagtctaaggtctcagaattgtaccatgcaatcatagtgtaccatgcaatcatagacgacctgttgcctaca

SEQ ID NO: 76457 - DNA, 94 bp, Zea Mays
caccctcagtgatcatcggagttcccttgaatcgatttcttccgccgccgtgaagaacccctccgtggccagcactcctcgggagaagttttat

SEQ ID NO: 76458 - DNA, 2342 bp, Zea Mays
gaaaaactggtccaagcacgagctgatagaaattgtggttttcagacttagtgcaataacctgaatctgaattttagtgttgtgagtgcagttttggagcttctttgtgcctaatccataaggttttggactgtaggttctataaaataattgaagacaatatattggtgaacaaatctctttgagaaggtttggcttggggatttatggaaaatagagtgaaagctgtccaaaaatggactatcagtttgcactgactgaatttttgttcagattagctgaaaattgaattgcagcaggttgctcagtttggagctgttttgttatcaatatgagtggttttagactgtagtttctataggaaacttggagaccacagtatggtgaatacgtttcataaggtgagattaacatggtgctgcataaaaagtagagtaatttttgcctaaagatcagttgtcaggtgttggggattttcagacagtaaaacatctaagtctgaatctatgtgtttttacccacctttggagctttgtggtaattaaaccaaggatatttgggttaaaaattctatataaaaatgaaataccatatcaaggtgaacaagtctcttgaagtgggtgtgccttggtgctgtacaaaattgggggtaaattgtctcaaaatgttccttatcaggttcttgtttcagataactgaaacagaaagttcagtgagtttggagggattttggggcatagcaacttttgatctgtgtgcttttaaccctgaatttctatagtgagttggtagagttttgttttgtgagcatactttgttagccttggttgacctgttgcctttgaaaatagtaagataaaggggagtgaatcggaaaggtgcaggtggtcagtgtgagttcaaactcattaggtttggagcttggtttagtgatctaagaagagaccagtacggagcttatccactactgctatgttccagttgctgccggttagattgggatgtgggtgagttttggcaccaggggtaagcgagtgtattaaggttccaaatatctacgcctaggatggacctgagcttatccaagacggcacccaccttgcttgttgtctctggtttgaccactacgagcccaagtctgttgtttcgtcgtgtactgatcctgcgtggtgcttatgtaataaagtcgcgtgtccatgctcgtgtaagctgttggtagtgcttgtatgtagttccccctgggataagcttcaccgtgaccagtgggtggacaatctttgttatctctatgtcgccgtgaccaaactcgcctaaggtgtttctcggccgtcttctagtttctagccaactcaccgacatgtttcccatgtctgtgccccacgttcgtgtaaaaccagattacgccgctgtccgagactgccgtttgttgtcgttgtctttgaaattgtgatcacgctgccggcgtctcgcccctccgtggccaggacttggagaacgccgtggcgccgtcggtgaacaccgtctggaatgacctcaccatggcggacctagtctggagctggttgcgagcacgctcatgggttgttccgcttcgtggtgagccactgatgctacccagttgctgattggaactctactgcgtcgtgttccgtgttgttgttgccggagtttggcgttgcagccagcgcgcagagggagcgcgaagctggagcctaaagccaactgaattgtgaagagggagcttgttccagtgttgttgattcagtggtgaactccatctaactacttatcataatagaagatctcagatctcctcctgtaataaggcaagccccggtgcatttgccccttccttgcgttttaaatgctttatcacctgatatgatgcattaggtgataggagttgtgtgataaacaattgatgcattatcattccttgaaaattcctaaatccctgttttataaaaagaattattactgcttagtgctgcttagaaactcaaaaatcatttgtttttcaaaagaatgatgtgtaacattggttatgggcttttgattcaaaagtgaaagcaaacttatgatgatgagtccatcagggctccggatgggttcatcatccgaaaagagtacccctaccgggtaccaaaaatggggaaatggtttgaataaatcgagaccagacgctgagctgacatggtcgcccgtttgtgttgattaaggaccgtaccgttgactggcctgttgtggttgagactttgcaactagccacatacactggtatgggacagggtaagcttgaacctggctattccatacgtgaagagacaatcgcgcactgggag

SEQ ID NO: 76459 - DNA, 853 bp, Zea Mays
gtgatggttatcaccatggccatcgtggtggctcactgggcctataaattcaccacgctctcttcccccttcatccaaatcaatcgagcacagctcttcgtcccttcgttgcgaagccaacgaatcactagtcactctattctgtccaccaccctcagtgatcatcggagttcccttgaatcgatttcttccgccgccgtgaagaacccctccgtggccagcactcctcggaactgaattgtgaagagggagcttgttccagtgttgttgattcagtggtgaactccatctaactacttatcataatagaagatctcagatctcctcctgtaataaggcaagccccggtgcatttgccccttccttgcgttttaaatgctttatcacctgatatgatgcattaggtgataggagttgtgtgataaacaattgatgcattatcattccttgaaaattcctaaatccctgttttataaaaagaattattactgcttagtgctgcttagaaactcaaaaatcatttgtttttcaaaagaatgatgtgtaacattggttatgggcttttgattcaaaagtgaaagcaaacttatgatgatgagtccatcagggctccggatgggttcatcatccgaaaagagtacccctaccgggtaccaaaaatggggaaatggtttgaataaatcgagaccagacgctgagctgacatggtcgcccgtttgtgttgattaaggaccgtaccgttgactggcctgttgtggttgagactttgcaactagccacatacactggtatgggacagggtaagcttgaacctggctattccatacgtgaagagacaatcgcgcactgggag

SEQ ID NO: 76460 - DNA, 1094 bp, Zea Mays
gtccggtgatggttatcaccatggccatcgtggtggctcactgggcctataaattcaccacgctctcttcccccttcatccaaatcaatcgagcacagctcttcgtcccttcgttgcgaagccaacgaatcactagtcactctattctgtccaccaccctcagtgatcatcggagttcccttgaatcgatttcttccgccgccgtgaagaacccctccgtggccagcactcctcgggacttggagaacgccgtggcgccgtcggtgaacaccgtctggaatgacctcaccatggcggacctagtctggagctggttgcgagcacgctcatgggttgttccgcttcgtggtgagccactgatgctacccagttgctgattggaactctactgcgtcgtgttccgtgttgttgttgccggagtttggcgttgcagccagcgcgcagagggagcgcgaagctggagcctaaagccaactgaattgtgaagagggagcttgttccagtgttgttgattcagtggtgaactccatctaactacttatcataatagaagatctcagatctcctcctgtaataaggcaagccccggtgcatttgccccttccttgcgttttaaatgctttatcacctgatatgatgcattaggtgataggagttgtgtgataaacaattgatgcattatcattccttgaaaattcctaaatccctgttttataaaaagaattattactgcttagtgctgcttagaaactcaaaaatcatttgtttttcaaaagaatgatgtgtaacattggttatgggcttttgattcaaaagtgaaagcaaacttatgatgatgagtccatcagggctccggatgggttcatcatccgaaaagagtacccctaccgggtaccaaaaatggggaaatggtttgaataaatcgagaccagacgctgagctgacatggtcgcccgtttgtgttgattaaggaccgtaccgttgactggcctgttgtggttgagactttgcaactagccacatacactggtatgggacagggtaagcttgaacctggctattccatacgtgaagagacaatcgcgcactgggag

SEQ ID NO: 76461 - DNA, 1684 bp, Zea Mays
cgtcacgctcgcagcaccggccgttttctacgggcggtgcagtggacgggagtagtaccctttctttctcttcgaagaaaatgcggcggcgtgtggtataaaccccgcccgtcacgccgggccgtccgtgcgtttccttttgtcttcgcttgcttcctttcgaaagtccttgcgtcacactcgccgatcgatcgagtctctccggattccagagaggcccaactgccgaagccatcgatcgccgccacctcttcgagcagaatagttgagaatggctgacgaggatatccagcctatcgtatgtgacaatggcactggaatggtcaaggccggtttcgctggtgatgatgcgccaagagctgtcttccccagcattgtgggaagaccacgccacaccggtgtcatggtcggcatgggccaaaaggatgcctacgtaggtgatgaggctcaggccaagagaggcatcctgacactgaagtacccgattgagcatggcattgtcaacaactgggatgacatggagaaaatctggcatcacaccttctacaacgagctccgtgtttcgcctgaagatcaccctgtgctgctgaccgaggcccctctcaaccccaaggccaacagagagaaaatgacgcagattatgtttgaaaccttcgaatgcccagcaatgtatgttgctatccaggctgttctttcgttgtacgctagtgggcgaacaactggtattgtgatggattccggtgatggtgtgagccacacggttccaatctatgaaggatacacacttcctcatgctattctccgtttggatcttgcggggcgtgacctcaccgaccacctaatgaagatcctcacagagagagggtactccctcactacgagcgctgagcgggagattgtcagggacataaaggagaagcttgcctacgttgcccttgattatgaacaggagctggagactgccaggagcagctcctctgtcgagaagagctacgagatgcctgatggtcaggtcatcaccattgggtcagaaaggtttaggtgccccgaggtgctgttccaaccatcccttgttggcatggaatcgcctggcgtccatgaggccacgtacaactccatcatgaagtgtgatgttgatatcaggaaggatttgtatggtaacgttgtcctcagtgggggatctaccatgttccctgggattgccgatcgtatgagcaaggagatcacgtccctggctcctagcagcatgaaggttaaagtgattgcgccacctgaaaggaagtacagtgtctggatcggtggctctattttggcttctctcagcacttttcagcagatgtggatctccaagggagagtatgacgaaactggtccgggcattgtccacatgaagtgcttctaagtttttttgggaaatttttccaaaaaaaaaaagaagtttctggggaagttcgacatggcccagcaagttgcatcgggccgtgctggcctagacccggcccaaacccctctcaggcgccatcgtgtcgctgttcgcggcgggcgagggcgagctcgtggccaagtcggccgacggcgcgagggcgggatcatggcctcgcttagctcccctgcttgggctttcacgccgtcgcgggaggggaattcctcgagttcgcgcccggcggctcgctggtcgacgcgg

SEQ ID NO: 76462 - DNA, 453 bp, Zea Mays
ggatgatcaggccagtccatgcattgacaactctgagggagattgtgtgcatgagtgtaactttgaggccttgtcgaaattaatggttaaggacttggtgtttcctgttaacatgcatcttggccagcacttcactaaaccaccaccacgttattctgagggtgcattgattaaaaagctagaagaacttgtaattgggaggccatctacttatgcatctataatgaaagtattactgactgcagtagggagaccaaggccagacttctggcgatgctttcttgatggaaagcagttatacgatcaagtgactggtgatgtgatttgccatggtgagaaaaacttcttacaagatgggcgcaagagctttcctagtggccacacttcgctagggaagccactgtcgatctcttcttgaagtcagctgagtatttggactgtgcagttcatcat

SEQ ID NO: 76463 - DNA, 878 bp, Zea Mays
ttgaactgtcgtccttctagggccatgttgtgccagcccaagcgtcaacgtcggcctcaagtagtcacgtcgactgtcttaggtccctgctcccctccccttccctcccctgctgctgcccgccgccaccaccagttggcagaccacctatcggccaccgctgcacatcgcccgtctggctgttagcaccggcacgcagcgcccgacgtcctgtgcgtagcagctaggcacacggcgaccaagcgtctagtggatggtaggatgtcattagacattgatgcatccaaagattggagtgtcttaggataattgttgacatggaagcaatggtgacaacaccagttgaggatggacaatagcagaagtctcctatggaagtagtttctgaagtgctaggggcttcagtttgtttctatataatgttggtctgcaagataactccaagaaaagctctacaacaactatttctgcaaaggtgcaagaacttcataatcaattcgagtctgagaggctagaaaaagatggacttcaagaagaagtagaaaccttagaggctcagacacaagcctcaaaggagaccatggacaatatgaagagatcgatggaagaaaataatattctcctctgtcagctgttgagcttcaatcgaagacaagcgcccccatcttaagtttactatagtatcatgttatattagttatggattcaggttttataaatttggaatatgtttaaactttcatactttgagttgaagttataggatttcctttggattttaagttacatgaacttatataatcatatggtttgaagttataaatttatctcttggatgaattgtgtgaatgttgaactaaataatgcaatgttttggt

SEQ ID NO: 76464 - DNA, 2058 bp, Zea Mays
ctcagggtcatttctaccattccatggagttggttcttctaagatcttgtggtgattttttcctgatgactggaactgccctttcggttagctgcacaagcacgtaacttctttaatgaatgataaaagaacagcaaatgttgcatgtttgaatttgcagagtactcaactgaccatggtaataaatttgagaaaatcatggtagtgtagacatggagaaaatcacatgtccaatcagtgttgaacctttaattgctatgctggaataattggaacatatttttcattatctacatgaactgttgtagaaaaaacaccctcctcccgattgatagcgacagggtaagaccataagacgataacatatactactattatggttcttaagattgacaagcagtataatgctctgggataattctcagtatcagattaacccagtggcagaacttgttaatgcagcaacagatggaaacatacaactagtaggcatacactcctacacattgcaatgaaatgagctaattaaatttctcccacaaaaagagctagttgaattgcaaaaaggaaggaattttgacattagaaaaaaaggcataaattgctactgggcatgaaaattaaaaggtgatgccgagaagctgtttctcactgaatcatgcggaagcataatatgagttcaggtttagaaacacatcttaatttgactgccaaaagcattcaaagcaattacctaggccaaacatgctttcaagcaattatattgataacaaagcttacctccttaagtctcttttggcgtcggtcctcctgaaaataataatggtaaaataagatgaattgaagtgtagaccttataccaaaagtgagacatgaacatatagataaccagcgtttctcatgtctctaaatatatttacccaaattttgtattatgttaatctaattcatttagcgaaagggcctctagatgagttaattaaatggtctgagtagactcctctggtcctggattcgatttcccgtgggagcgaatttcaggctgtggtcaaaaaaaccctcatctgtcacacgccaaagcacaagtttaagatccggccctggttgcgatcgttctcacattggctacggtgtcgctgtttaggggtgagacagaggtttgggatattcttgacctgcatgagaagatcttattcttaatataatgctcggggtgtcataccccgcgggtcgagtttttttattcatttaacaacatacttatgcaaaaaaaactgtataagtaacccatacaagtagcaaaaaaaaaacctaaactaggataaatgatgatataatgaacaaggacatctgattacatgacgcacaaatggagacaactttcaaatatttcgcccagcaaatatatgacagttagactcggttctccaatggtaaaatgtccataatttttcattctgaataaaccctctggatgcaatggtgaatggttcactgctgttaagatacaccacagtttcaaataaaaaataagagggagttctcaatccctgtgggttgatcatgtgcctgatatcattgtcatttcctcccaaccccaactatcacagctgcacattgcatgtttggaacgcagtaacttcacaggaaaaatgcaagaacaggaaaacttccccgcactccaatcaggccctgagctcttacgattcgtggaatcaccagctgggcaattgcacagtgcttgtacaatgcaatgttttcgaataaagcaacgggaacaagatgtggtctggggtccaagggctggaaaggtccacccaacacaacaccatttcctgagtgcagaaccaagaacaatacctgctcccttaacagttctgtctgctcctcctcgagctgcataacctgcgattccagctccgcgacgtatgcctacatattgggccaaacgaaagcaataaaatcagctgccgaagtaatcaaaaccaactctgcacagagaacagctcaaaaccacgcaagttggaatatttgcaattttgcaacccaaaagtgatg

SEQ ID NO: 76465 - DNA, 1199 bp, Zea Mays
gtcctattgaaatcaggttgtatttctattcactttaaactaaaactaattaagtattcaaacaaattgttaaaagacatttggatcgtgactctaattgctatacacaccgatcgttggccaccggatccctatcaaattttttagtaataataatagagaaaaaaaaaagagagaggatgtatacaagtgaaccagtcctagcatgtcctgaaaccaacacatgtcaatcaactccactgagtcgcaatcttgatggcagccatatggcaatcacgcaaacaaccaaaatcccatatcgctgataccaaagcttccgccggctgcaccgaccggccatccatttctaatttcttgttgattgatcgagcagcacgacacagctgcttattatatatatatacggggtcgcctgcttcgtctctgtgtcgcactcgcactcttcccctgagctcctccgccgcaacatctcgaacttcccccaccctttttccttgtcttcggctccatcaatcgcgcaggcaaccaggccggcgggagcgatggggaactgcgggacaaagcccaagaccagcgacggagacgacgcgcctccgcccgtcgaggcgcaggtagcggcgggggcggccgagggggagcgcaaagacgacgaggaggtcgcggcgccggaagggacgagccaggcccttgtggcgccacaaactgaggaagttacgaccacgacagtcgaagaaaaagagcatgctgagccaaacgaaaaaacggaggagtttggcaaggaagacgctgatcacggcgaggagaaggaaacgccgccgccgacggaggcccctgaacttccggcgtctactccggcgagcgtcgcctgacggccgatgcacacccaaaccgacggcgttcttactacttccatttttttttgcttgcagaatgtttggaggcatgggcgggatcccaaattcccaatggcacaattgtactgccgtttttttttgacaacagctctacttttcgatctgtgttgtcttgttttcccctctcgccatttctcgctgtttcgtacgagtactgtcgttggtttggagagcgtgtgaactaatgtaatgtttgacgatgaattcaaaattcaaaaaggtacaatgaattcaaaaaaaaaagaaaaaaagtagaatgaatccatgcatgtgtgtgtatatcaa

SEQ ID NO: 76466 - DNA, 1887 bp, Zea Mays
cgccgtcttgttgctccgctccggccgtgacacgagcgcaccagccaccgccagcccctcccccgtcgactcgagccacaggacaaggcatcccaaccgccgcccatctcctatcgtcatctgccgatccctcctcggttcctcacagtcacagagcctcacgtcacgtgtacctcccccaacccaacccagcccaacccagcccaaaacctagcgggcgaggggccggggaaccgaccgccggacgcggagatggaccacgcggcggaggcgcagcggacggacctgatgacgatcacgcggcacgtgctcaacgagcagagccgccacccggagtcccgcggcgacttcaccatcctcctctcccacatcgtcctcggctgcaagttcgtcgccgccgcggtcaacaaggccggcctcgccaagctcatcggcctcgccggagagaccaacgtccaggagccaccccaaaaaaaaaatacagggcgaggagcaaaagaagctggatgtactgtccaacgaggtcttcgtgaaggcgctcgtcagcagcggccgcacctgtgtcctcgtgtctgaagagaacgaggaggccatcttcgtcgacccggccctccgcgggaagttcgtcaatcctttgctcctccatcccgacctcgtaaaagttccgcaacgccgtactgtcgctttccctgatcgcgtgttagttctctctctctctctgttcaggtactgcgtctgtttcgacccgctggatggctcctccaacatcgactgtggtgtctcaatcggaacggtgtgtcactgtcactcccgatctttgggatttacatggtcaaagacaaggacaacgtgaccttggaggatgtgctgcagcctggaacaaacatgcttgctgctggctactgcatgtacgggagttcatgcacgcttgtgctgagcactgggaacggagtcaatggcttcactctcgatccttcccttggagagttcattttgactcatccaaatatcaagataccaaggaaagggaagatctattcagtcaacgaagggaacgccaaaaactgggatgggcctacagccaaattcgtggagaaatgcaagtatcctgaggatggttcaccgcctagatccttgagatatatcggaagtatggttgctgatgtccatcgcaccttactatacgggggcatatttttgtacccagcagaccagaagagtccaaacgggaaactacgcgttctgtatgaagtcttcccgatgtcattcctgatggaacaagctggaggccaggctttcacaggcaaacaacgggcgcttgaacttgctcccgctaaacttcacgacagatccccagtgttcctcgggagctacgatgacgttgaggagatcaaagcactgtacgcttcaatgtcaaacagcggttgacctttctgcctgaggaaacgagcgagatcaaaagcaccgtacgcttcagagtcaactgcttgatctttatagattgtaataaaataataaaagagtttgtaaaaaaaaacaacaacactgcttgatctttctgcatgaggataaaaagcgcatagtttccccggttggatatatccatcagatatttattatgttgttgccttctacacaaatttaacgtgctttcgtgattccttaatgcaactttggattcatgtacggagggagtttatgtgaagacatattacttggtgcagtttatctccaacaaaatacaaaaaaaagaaccttgtgcagttatacttcagtcttaatgtcgtgttcatcggatttgtgacgctccaaagcatagtcgttgcagatccttgattcgaactcagccctctcgaaagcagtagagatgcgagatgtacaagccag

SEQ ID NO: 76467 - DNA, 2420 bp, Zea Mays
cgccgtcttgttgctccgctccggccgtgacacgagcgcaccagccaccgccagcccctcccccgtcgactcgagccacaggacaaggcatcccaaccgccgcccatctcctatcgtcatctgccgatccctcctcggttcctcacagtcacagagcctcacgtcacgtgtacctcccccaacccaacccagcccaacccagcccaaaacctagcgggcgaggggccggggaaccgaccgccggacgcggagatggaccacgcggcggaggcgcagcggacggacctgatgacgatcacgcggcacgtgctcaacgagcagagccgccacccggagtcccgcggcgacttcaccatcctcctctcccacatcgtcctcggctgcaagttcgtcgccgccgcggtcaacaaggccggcctcgccaagctcatcggcctcgccggagagaccaacgtccaggcaagcacggcaccaccacacacacactgactcgcccgccccgacgatcaccatccactccgcgcctttcgtgcgtactctgctgaattactgagcccccccctgacggtgggcccggggcttatcacagatggacctcttcctagctgcatgctgcatctttttagctgaacggaacctactaccatgcatcgaatccatcgatcactatgctctctaacgcaagaatagactgctcttgctcttcaatcaacagttcaacacacgcacgcacgatccaaacgatattcgtctatctggcacagtttttttctctcttcagtttacctgctctagctgctcgtcgttgacattcaggagccaccccaaaaaaaaaatacagggcgaggagcaaaagaagctggatgtactgtccaacgaggtcttcgtgaaggcgctcgtcagcagcggccgcacctgtgtcctcgtgtctgaagagaacgaggaggccatcttcgtcgacccggccctccgcgggaagtactgcgtctgtttcgacccgctggatggctcctccaacatcgactgtggtgtctcaatcggaacgatctttgggatttacatggtcaaagacaaggacaacgtgaccttggaggatgtgctgcagcctggaacaaacatgcttgctgctggctactgcatgtacgggagttcatgcacgcttgtgctgagcactgggaacggagtcaatggcttcactctcgatccttcccttggagagttcattttgactcatccaaatatcaagataccaaggaaagggaagatctattcagtcaacgaagggaacgccaaaaactgggatgggcctacagccaagtacgacgagctagggggctcgtttctgtccaaaaactactactgtgatttcgtaacaagccaggctgaattttatgccgtttcagattcgtggagaaatgcaagtatcctgaggatggttcaccgcctagatccttgagatatatcggaaggtgatccattgctcgttctcgactgtgtataccggtgtctcacagtttgctttcttctgcggtcatgaattgaatgtgtctgaagttttattaagaataatagtgcttgctcaagctattggtatctactcgtttttttcttctttttttttgtttaactaaaacggttgaatctatgttgttgtggacttgtggtccttgtgaatggtttgcagtatggttgctgatgtccatcgcaccttactatacgggggcatatttttgtacccagcagaccagaagagtccaaacgggaaactacgcgttctgtatgaagtcttcccgatgtcattcctgatggaacaagctggaggccaggctttcacaggcaaacaacgggcgcttgaacttgctcccgctaaacttcacgacagatccccagtgttcctcgggagctacgatgacgttgaggagatcaaagcactgtacgcttcaatgtcaaacagcggttgacctttctgcctgaggaaacgagcgagatcaaaagcaccgtacgcttcagagtcaactgcttgatctttatagattgtaataaaataataaaagagtttgtaaaaaaaaacaacaacactgcttgatctttctgcatgaggataaaaagcgcatagtttccccggttggatatatccatcagatatttattatgttgttgccttctacacaaatttaacgtgctttcgtgattccttaatgcaactttggattcatgtacggagggagtttatgtgaagacatattacttggtgcagtttatctccaacaaaatacaaaaaaaagaaccttgtgcagttatacttcagtcttaatgtcgtgttcatcggatttgtgacgctccaaagcatagtcgttgcagatccttgattcgaactcagccctctcgaaagcagtagagatgcgagatgtacaagccag

SEQ ID NO: 76468 - DNA, 1957 bp, Zea Mays
accggcgccgtcttgttgctccgctccggccgtgacacgagcgcaccagccaccgccagcccctcccccgtcgactcgagccacaggacaaggcatcccaaccgccgcccatctcctatcgtcatctgccgatccctcctcggttcctcacagtcacagagcctcacgtcacgtgtacctcccccaacccaacccagcccaacccagcccaaaacctagcgggcgaggggccggggaaccgaccgccggacgcggagatggaccacgcggcggaggcgcagcggacggacctgatgacgatcacgcggcacgtgctcaacgagcagagccgccacccggagtcccgcggcgacttcaccatcctcctctcccacatcgtcctcggctgcaagttcgtcgccgccgcggtcaacaaggccggcctcgccaagctcatcggcctcgccggagagaccaacgtccagggcgaggagcaaaagaagctggatgtactgtccaacgaggtcttcgtgaaggcgctcgtcagcagcggccgcacctgtgtcctcgtgtctgaagagaacgaggaggccatcttcgtcgacccggccctccgcgggaagtactgcgtctgtttcgacccgctggatggctcctccaacatcgactgtggtgtctcaatcggaacgatctttgggatttacatggtcaaagacaaggacaacgtgaccttggaggatgtgctgcagcctggaacaaacatgcttgctgctggctactgcatgtacgggagttcatgcacgcttgtgctgagcactgggaacggagtcaatggcttcactctcgatccttcccttggagagttcattttgactcatccaaatatcaagataccaaggaaagggaagatctattcagtcaacgaagggaacgccaaaaactgggatgggcctacagccaaattcgtggagaaatgcaagtatcctgaggatggttcaccgcctagatccttgagatatatcggaaggtgatccattgctcgttctcgactgtgtataccggtgtctcacagtttgctttcttctgcggtcatgaattgaatgtgtctgaagttttattaagaataatagtgcttgctcaagctattggtatctactcgtttttttcttctttttttttgtttaactaaaacggttgaatctatgttgttgtggacttgtggtccttgtgaatggtttgcagtatggttgctgatgtccatcgcaccttactatacgggggcatatttttgtacccagcagaccagaagagtccaaacgggaaactacgcgttctgtatgaagtcttcccgatgtcattcctgatggaacaagctggaggccaggctttcacaggcaaacaacgggcgcttgaacttgctcccgctaaacttcacgacagatccccagtgttcctcgggagctacgatgacgttgaggagatcaaagcactgtacgcttcaatgtcaaacagcggttgacctttctgcctgaggaaacgagcgagatcaaaagcaccgtacgcttcagagtcaactgcttgatctttatagattgtaataaaataataaaagagtttgtaaaaaaaaacaacaacactgcttgatctttctgcatgaggataaaaagcgcatagtttccccggttggatatatccatcagatatttattatgttgttgccttctacacaaatttaacgtgctttcgtgattccttaatgcaactttggattcatgtacggagggagtttatgtgaagacatattacttggtgcagtttatctccaacaaaatacaaaaaaaagaaccttgtgcagttatacttcagtcttaatgtcgtgttcatcggatttgtgacgctccaaagcatagtcgttgcagatccttgattcgaactcagccctctcgaaagcagtagagatgcgagatgtacaagccag

SEQ ID NO: 76469 - DNA, 1788 bp, Zea Mays
aacaacttgccaattcgcaccgcgggaccggcgccgtcttgttgctccgctccggccgtgacacgagcgcaccagccaccgccagcccctcccccgtcgactcgagccacaggacaaggcatcccaaccgccgcccatctcctatcgtcatctgccgatccctcctcggttcctcacagtcacagagcctcacgtcacgtgtacctcccccaacccaacccagcccaacccagcccaaaacctagcgggcgaggggccggggaaccgaccgccggacgcggagatggaccacgcggcggaggcgcagcggacggacctgatgacgatcacgcggcacgtgctcaacgagcagagccgccacccggagtcccgcggcgacttcaccatcctcctctcccacatcgtcctcggctgcaagttcgtcgccgccgcggtcaacaaggccggcctcgccaagctcatcggcctcgccggagagaccaacgtccagggcgaggagcaaaagaagctggatgtactgtccaacgaggtcttcgtgaaggcgctcgtcagcagcggccgcacctgtgtcctcgtgtctgaagagaacgaggaggccatcttcgtcgacccggccctccgcgggaagtactgcgtctgtttcgacccgctggatggctcctccaacatcgactgtggtgtctcaatcggaacggtgtgtcactgtcactcccgatctttgggatttacatggtcaaagacaaggacaacgtgaccttggaggatgtgctgcagcctggaacaaacatgcttgctgctggctactgcatgtacgggagttcatgcacgcttgtgctgagcactgggaacggagtcaatggcttcactctcgatccttcccttggagagttcattttgactcatccaaatatcaagataccaaggaaagggaagatctattcagtcaacgaagggaacgccaaaaactgggatgggcctacagccaaattcgtggagaaatgcaagtatcctgaggatggttcaccgcctagatccttgagatatatcggaagtatggttgctgatgtccatcgcaccttactatacgggggcatatttttgtacccagcagaccagaagagtccaaacgggaaactacgcgttctgtatgaagtcttcccgatgtcattcctgatggaacaagctggaggccaggctttcacaggcaaacaacgggcgcttgaacttgctcccgctaaacttcacgacagatccccagtgttcctcgggagctacgatgacgttgaggagatcaaagcactgtacgcttcaatgtcaaacagcggttgacctttctgcctgaggaaacgagcgagatcaaaagcaccgtacgcttcagagtcaactgcttgatctttatagattgtaataaaataataaaagagtttgtaaaaaaaaacaacaacactgcttgatctttctgcatgaggataaaaagcgcatagtttccccggttggatatatccatcagatatttattatgttgttgccttctacacaaatttaacgtgctttcgtgattccttaatgcaactttggattcatgtacggagggagtttatgtgaagacatattacttggtgcagtttatctccaacaaaatacaaaaaaaagaaccttgtgcagttatacttcagtcttaatgtcgtgttcatcggatttgtgacgctccaaagcatagtcgttgcagatccttgattcgaactcagccctctcgaaagcagtagagatgcgagatgtacaagccag

SEQ ID NO: 76470 - DNA, 1839 bp, Zea Mays
cagcaccaccaacgcgcgccccggcgcctatttcaagccacgtcccaacaacttgccaattcgcaccgcgggaccggcgccgtcttgttgctccgctccggccgtgacacgagcgcaccagccaccgccagcccctcccccgtcgactcgagccacaggacaaggcatcccaaccgccgcccatctcctatcgtcatctgccgatccctcctcggttcctcacagtcacagagcctcacgtcacgtgtacctcccccaacccaacccagcccaacccagcccaaaacctagcgggcgaggggccggggaaccgaccgccggacgcggagatggaccacgcggcggaggcgcagcggacggacctgatgacgatcacgcggcacgtgctcaacgagcagagccgccacccggagtcccgcggcgacttcaccatcctcctctcccacatcgtcctcggctgcaagttcgtcgccgccgcggtcaacaaggccggcctcgccaagctcatcggcctcgccggagagaccaacgtccaggagccaccccaaaaaaaaaatacagggcgaggagcaaaagaagctggatgtactgtccaacgaggtcttcgtgaaggcgctcgtcagcagcggccgcacctgtgtcctcgtgtctgaagagaacgaggaggccatcttcgtcgacccggccctccgcgggaagtactgcgtctgtttcgacccgctggatggctcctccaacatcgactgtggtgtctcaatcggaacgatctttgggatttacatggtcaaagacaaggacaacgtgaccttggaggatgtgctgcagcctggaacaaacatgcttgctgctggctactgcatgtacgggagttcatgcacgcttgtgctgagcactgggaacggagtcaatggcttcactctcgatccttcccttggagagttcattttgactcatccaaatatcaagataccaaggaaagggaagatctattcagtcaacgaagggaacgccaaaaactgggatgggcctacagccaaattcgtggagaaatgcaagtatcctgaggatggttcaccgcctagatccttgagatatatcggaagtatggttgctgatgtccatcgcaccttactatacgggggcatatttttgtacccagcagaccagaagagtccaaacgggaaactacgcgttctgtatgaagtcttcccgatgtcattcctgatggaacaagctggaggccaggctttcacaggcaaacaacgggcgcttgaacttgctcccgctaaacttcacgacagatccccagtgttcctcgggagctacgatgacgttgaggagatcaaagcactgtacgcttcaatgtcaaacagcggttgacctttctgcctgaggaaacgagcgagatcaaaagcaccgtacgcttcagagtcaactgcttgatctttatagattgtaataaaataataaaagagtttgtaaaaaaaaacaacaacactgcttgatctttctgcatgaggataaaaagcgcatagtttccccggttggatatatccatcagatatttattatgttgttgccttctacacaaatttaacgtgctttcgtgattccttaatgcaactttggattcatgtacggagggagtttatgtgaagacatattacttggtgcagtttatctccaacaaaatacaaaaaaaagaaccttgtgcagttatacttcagtcttaatgtcgtgttcatcggatttgtgacgctccaaagcatagtcgttgcagatccttgattcgaactcagccctctcgaaagcagtagagatgcgagatgtacaagccag

SEQ ID NO: 76471 - DNA, 1863 bp, Zea Mays
ccatcgcattccccatccaccgtcctccgcccagcaccaccaacgcgcgccccggcgcctatttcaagccacgtcccaacaacttgccaattcgcaccgcgggaccggcgccgtcttgttgctccgctccggccgtgacacgagcgcaccagccaccgccagcccctcccccgtcgactcgagccacaggacaaggcatcccaaccgccgcccatctcctatcgtcatctgccgatccctcctcggttcctcacagtcacagagcctcacgtcacgtgtacctcccccaacccaacccagcccaacccagcccaaaacctagcgggcgaggggccggggaaccgaccgccggacgcggagatggaccacgcggcggaggcgcagcggacggacctgatgacgatcacgcggcacgtgctcaacgagcagagccgccacccggagtcccgcggcgacttcaccatcctcctctcccacatcgtcctcggctgcaagttcgtcgccgccgcggtcaacaaggccggcctcgccaagctcatcggcctcgccggagagaccaacgtccagggcgaggagcaaaagaagctggatgtactgtccaacgaggtcttcgtgaaggcgctcgtcagcagcggccgcacctgtgtcctcgtgtctgaagagaacgaggaggccatcttcgtcgacccggccctccgcgggaagttcgtcaatcctttgctcctccatcccgacctcgtaaaagttccgcaacgccgtactgtcgctttccctgatcgcgtgttagttctctctctctctctgttcaggtactgcgtctgtttcgacccgctggatggctcctccaacatcgactgtggtgtctcaatcggaacgatctttgggatttacatggtcaaagacaaggacaacgtgaccttggaggatgtgctgcagcctggaacaaacatgcttgctgctggctactgcatgtacgggagttcatgcacgataccaaggaaagggaagatctattcagtcaacgaagggaacgccaaaaactgggatgggcctacagccaaattcgtggagaaatgcaagtatcctgaggatggttcaccgcctagatccttgagatatatcggaagtatggttgctgatgtccatcgcaccttactatacgggggcatatttttgtacccagcagaccagaagagtccaaacgggaaactacgcgttctgtatgaagtcttcccgatgtcattcctgatggaacaagctggaggccaggctttcacaggcaaacaacgggcgcttgaacttgctcccgctaaacttcacgacagatccccagtgttcctcgggagctacgatgacgttgaggagatcaaagcactgtacgcttcaatgtcaaacagcggttgacctttctgcctgaggaaacgagcgagatcaaaagcaccgtacgcttcagagtcaactgcttgatctttatagattgtaataaaataataaaagagtttgtaaaaaaaaacaacaacactgcttgatctttctgcatgaggataaaaagcgcatagtttccccggttggatatatccatcagatatttattatgttgttgccttctacacaaatttaacgtgctttcgtgattccttaatgcaactttggattcatgtacggagggagtttatgtgaagacatattacttggtgcagtttatctccaacaaaatacaaaaaaaagaaccttgtgcagttatacttcagtcttaatgtcgtgttcatcggatttgtgacgctccaaagcatagtcgttgcagatccttgattcgaactcagccctctcgaaagcagtagagatgcgagatgtacaagccag

SEQ ID NO: 76472 - DNA, 2235 bp, Zea Mays
cccacaccccatcgcattccccatccaccgtcctccgcccagcaccaccaacgcgcgccccggcgcctatttcaagccacgtcccaacaacttgccaattcgcaccgcgggaccggcgccgtcttgttgctccgctccggccgtgacacgagcgcaccagccaccgccagcccctcccccgtcgactcgagccacaggacaaggcatcccaaccgccgcccatctcctatcgtcatctgccgatccctcctcggttcctcacagtcacagagcctcacgtcacgtgtacctcccccaacccaacccagcccaacccagcccaaaacctagcgggcgaggggccggggaaccgaccgccggacgcggagatggaccacgcggcggaggcgcagcggacggacctgatgacgatcacgcggcacgtgctcaacgagcagagccgccacccggagtcccgcggcgacttcaccatcctcctctcccacatcgtcctcggctgcaagttcgtcgccgccgcggtcaacaaggccggcctcgccaagctcatcggcctcgccggagagaccaacgtccaggcaagcacggcaccaccacacacacactgactcgcccgccccgacgatcaccatccactccgcgcctttcgtgcgtactctgctgaattactgagcccccccctgacggtgggcccggggcttatcacagatggacctcttcctagctgcatgctgcatctttttagctgaacggaacctactaccatgcatcgaatccatcgatcactatgctctctaacgcaagaatagactgctcttgctcttcaatcaacagttcaacacacgcacgcacgatccaaacgatattcgtctatctggcacagtttttttctctcttcagtttacctgctctagctgctcgtcgttgacattcaggagccaccccaaaaaaaaaatacagggcgaggagcaaaagaagctggatgtactgtccaacgaggtcttcgtgaaggcgctcgtcagcagcggccgcacctgtgtcctcgtgtctgaagagaacgaggaggccatcttcgtcgacccggccctccgcgggaagtactgcgtctgtttcgacccgctggatggctcctccaacatcgactgtggtgtctcaatcggaacgatctttgggatttacatggtcaaagacaaggacaacgtgaccttggaggatgtgctgcagcctggaacaaacatgcttgctgctggctactgcatgtacgggagttcatgcacgcttgtgctgagcactgggaacggagtcaatggcttcactctcgatccttcccttggagagttcattttgactcatccaaatatcaagataccaaggaaagggaagatctattcagtcaacgaagggaacgccaaaaactgggatgggcctacagccaaattcgtggagaaatgcaagtatcctgaggatggttcaccgcctagatccttgagatatatcggaagtatggttgctgatgtccatcgcaccttactatacgggggcatatttttgtacccagcagaccagaagagtccaaacgggaaactacgcgttctgtatgaagtcttcccgatgtcattcctgatggaacaagctggaggccaggctttcacaggcaaacaacgggcgcttgaacttgctcccgctaaacttcacgacagatccccagtgttcctcgggagctacgatgacgttgaggagatcaaagcactgtacgcttcaatgtcaaacagcggttgacctttctgcctgaggaaacgagcgagatcaaaagcaccgtacgcttcagagtcaactgcttgatctttatagattgtaataaaataataaaagagtttgtaaaaaaaaacaacaacactgcttgatctttctgcatgaggataaaaagcgcatagtttccccggttggatatatccatcagatatttattatgttgttgccttctacacaaatttaacgtgctttcgtgattccttaatgcaactttggattcatgtacggagggagtttatgtgaagacatattacttggtgcagtttatctccaacaaaatacaaaaaaaagaaccttgtgcagttatacttcagtcttaatgtcgtgttcatcggatttgtgacgctccaaagcatagtcgttgcagatccttgattcgaactcagccctctcgaaagcagtagagatgcgagatgtacaagccag

SEQ ID NO: 76473 - DNA, 2369 bp, Zea Mays
gcttactctcttgacccggcggcgtgccgtgccgtgccgacgcaccaagtcaggctcagcttcctgagcatttatcgccgtagatatccgcacccatgcggcacatacgtggaacccacaccccatcgcattccccatccaccgtcctccgcccagcaccaccaacgcgcgccccggcgcctatttcaagccacgtcccaacaacttgccaattcgcaccgcgggaccggcgccgtcttgttgctccgctccggccgtgacacgagcgcaccagccaccgccagcccctcccccgtcgactcgagccacaggacaaggcatcccaaccgccgcccatctcctatcgtcatctgccgatccctcctcggttcctcacagtcacagagcctcacgtcacgtgtacctcccccaacccaacccagcccaacccagcccaaaacctagcgggcgaggggccggggaaccgaccgccggacgcggagatggaccacgcggcggaggcgcagcggacggacctgatgacgatcacgcggcacgtgctcaacgagcagagccgccacccggagtcccgcggcgacttcaccatcctcctctcccacatcgtcctcggctgcaagttcgtcgccgccgcggtcaacaaggccggcctcgccaagctcatcggcctcgccggagagaccaacgtccaggcaagcacggcaccaccacacacacactgactcgcccgccccgacgatcaccatccactccgcgcctttcgtgcgtactctgctgaattactgagcccccccctgacggtgggcccggggcttatcacagatggacctcttcctagctgcatgctgcatctttttagctgaacggaacctactaccatgcatcgaatccatcgatcactatgctctctaacgcaagaatagactgctcttgctcttcaatcaacagttcaacacacgcacgcacgatccaaacgatattcgtctatctggcacagtttttttctctcttcagtttacctgctctagctgctcgtcgttgacattcaggagccaccccaaaaaaaaaatacagggcgaggagcaaaagaagctggatgtactgtccaacgaggtcttcgtgaaggcgctcgtcagcagcggccgcacctgtgtcctcgtgtctgaagagaacgaggaggccatcttcgtcgacccggccctccgcgggaagtactgcgtctgtttcgacccgctggatggctcctccaacatcgactgtggtgtctcaatcggaacggtgtgtcactgtcactcccgatctttgggatttacatggtcaaagacaaggacaacgtgaccttggaggatgtgctgcagcctggaacaaacatgcttgctgctggctactgcatgtacgggagttcatgcacgcttgtgctgagcactgggaacggagtcaatggcttcactctcgatccttcccttggagagttcattttgactcatccaaatatcaagataccaaggaaagggaagatctattcagtcaacgaagggaacgccaaaaactgggatgggcctacagccaaattcgtggagaaatgcaagtatcctgaggatggttcaccgcctagatccttgagatatatcggaagtatggttgctgatgtccatcgcaccttactatacgggggcatatttttgtacccagcagaccagaagagtccaaacgggaaactacgcgttctgtatgaagtcttcccgatgtcattcctgatggaacaagctggaggccaggctttcacaggcaaacaacgggcgcttgaacttgctcccgctaaacttcacgacagatccccagtgttcctcgggagctacgatgacgttgaggagatcaaagcactgtacgcttcaatgtcaaacagcggttgacctttctgcctgaggaaacgagcgagatcaaaagcaccgtacgcttcagagtcaactgcttgatctttatagattgtaataaaataataaaagagtttgtaaaaaaaaacaacaacactgcttgatctttctgcatgaggataaaaagcgcatagtttccccggttggatatatccatcagatatttattatgttgttgccttctacacaaatttaacgtgctttcgtgattccttaatgcaactttggattcatgtacggagggagtttatgtgaagacatattacttggtgcagtttatctccaacaaaatacaaaaaaaagaaccttgtgcagttatacttcagtcttaatgtcgtgttcatcggatttgtgacgctccaaagcatagtcgttgcagatccttgattcgaactcagccctctcgaaagcagtagagatgcgagatgtacaagccag

SEQ ID NO: 76474 - DNA, 1537 bp, Zea Mays
acgagggcagttcggtcactactgccggcggcgtctcgctttccaactccgccaccacacggcccacaccacgccaactgcttccgcaaggccgcgagagctttgcgtaaggtaaacttcagcgagcagcatccgtcccaccgaccgcaatgccggaggacaaggagtacgcgcccgtgccgctcggccaggcggcggccgaggcggcagcgcctgactccgaggaccctgccaagtcgccgccgcgacccagctcgcccggcacgtccactcgcaaggcattctttgctgttcttcaaagctgggtgtcaagaaaatttatgactggatgttcttttgccaattgctgtcacattcttcatcacttggtggtttatccaatttgttgatggttttttcagcccactctatgcaaaactggggtttgacatattcggccttgggttcttgacctccctggtgtttatacttcttgttggaatctttgtgtcttcttgggtgggttcaacggtcttctgggttggagaatggtttataaagaaaatgccctttgtaaggcacatatactctgcatcaaagcaagttagcactgctgtttcaccagatcaaaatacaacagcattcaaagaagtagcaatcattagtcatccccgtgttggtgaatatgcatttggattcataacatcaaccatggttcttcagacagacaaaggtgatgaagaattgtgtagtgtttatgtgccaaccaatcatttatatattggtgacatctttttggtaaactccgccgaaattataaggcccaatttgtctattcgtgaaggcataggtgatcatgtcactggaaccaacacctcggaagagccagaacgtccgtttggacagagtgaggacagtatgactgtatgaggcatgcatgaaagtgatgggtgtttcaggatggcttgttggttatggattcaaagctggggcatggagcttgagacaatcaatttgtagattgcattcagaacttgcgcattattggcagatacatgacaacctcacactaacttgcgttgctatcagttggtgacacgaaaattgcagctccacttacaattacaagcacgacatgcacttttaactgatctccagctgcgtgctaggtcgtgtttgctgaacgtgattcaatgctgcatgtgcatctaccagtggtacttgtgtatatgattttttttttatactacggttgtcagcgtgctcggggaaggctatagtcctggagtctgccaagacgcatggaagaactgtgatgaaaaccaacctgttcttggggccttatgcctcaaggacctcccttggcttttacaaacacaagtgtccaccccaccatttagaacaagtataatatggctgggctttaaacagctccatgtcaccaaaatcctagatggtaggatgagaacatctcgagaacattcgagagcaaagaaagtaggtgcttcatgaagaacttggctttggcgcattatacgaggagaaagagtgtgattgc

SEQ ID NO: 76475 - DNA, 1542 bp, Zea Mays
acgagggcagttcggtcactactgccggcggcgtctcgctttccaactccgccaccacacggcccacaccacgccaactgcttccgcaaggccgcgagagctttgcgtaaggtaaacttcagcgagcagcatccgtcccaccgaccgcaatgccggaggacaaggagtacgcgcccgtgccgctcggccaggcggcggccgaggcggcagcgcctgactccgaggaccctgccaagtcgccgccgcgacccagctcgcccggcacgtccactcgcaaggcattctttgctgttcttcaaagctgggtgtcaagaaaatttatgactggatgtgtagttcttttgccaattgctgtcacattcttcatcacttggtggtttatccaatttgttgatggttttttcagcccactctatgcaaaactggggtttgacatattcggccttgggttcttgacctccctggtgtttatacttcttgttggaatctttgtgtcttcttgggtgggttcaacggtcttctgggttggagaatggtttataaagaaaatgccctttgtaaggcacatatactctgcatcaaagcaagttagcactgctgtttcaccagatcaaaatacaacagcattcaaagaagtagcaatcattagtcatccccgtgttggtgaatatgcatttggattcataacatcaaccatggttcttcagacagacaaaggtgatgaagaattgtgtagtgtttatgtgccaaccaatcatttatatattggtgacatctttttggtaaactccgccgaaattataaggcccaatttgtctattcgtgaaggcataggtgatcatgtcactggaaccaacacctcggaagagccagaacgtccgtttggacagagtgaggacagtatgactgtatgaggcatgcatgaaagtgatgggtgtttcaggatggcttgttggttatggattcaaagctggggcatggagcttgagacaatcaatttgtagattgcattcagaacttgcgcattattggcagatacatgacaacctcacactaacttgcgttgctatcagttggtgacacgaaaattgcagctccacttacaattacaagcacgacatgcacttttaactgatctccagctgcgtgctaggtcgtgtttgctgaacgtgattcaatgctgcatgtgcatctaccagtggtacttgtgtatatgattttttttttatactacggttgtcagcgtgctcggggaaggctatagtcctggagtctgccaagacgcatggaagaactgtgatgaaaaccaacctgttcttggggccttatgcctcaaggacctcccttggcttttacaaacacaagtgtccaccccaccatttagaacaagtataatatggctgggctttaaacagctccatgtcaccaaaatcctagatggtaggatgagaacatctcgagaacattcgagagcaaagaaagtaggtgcttcatgaagaacttggctttggcgcattatacgaggagaaagagtgtgattgc

SEQ ID NO: 76476 - DNA, 1503 bp, Zea Mays
gtcgtagagcggtagaggagaagcgtcgacgtacgccatcgtcacatgcatgcgtagcagagcacaggaagccgccaggaaggaaccctgctacgtacacgtacgtgtctacagctgcccatgcccgcatcgatacggataggaggagagcaggcggcccacgacgtgcagggcgcggcggccatggagggccactactcgcccacggcctccgccgccgaggcgggcggcgagcggcggttccgcggcgtgcggcagcggccgtggggcaagtgggcggcggagatccgcgacccgcacaaggcggcccgcgtctggctcggcacgttcgacaccgcggaggccgcggcgcgcgcctacgacgaggccgcgctccgcttccgcggcagccgcgccaagctcaacttccccgaggacgcgcgcctcaccacggcgccatccgctgcggtcgctccggcggcggcgggatccacgacgacgatggccgtggcggcctcggcgggcgggtcgtaccagcaggaggccagcgccgccgtcgtctctgcagactacctgcagtaccagatgatgcttctgcagggggccaccagcggccaaggcagcagcagtcatggcgggtatcctctgtactacgactatggcggccacggcggggctggcgctggcgctggtggtggtgccatgagcagctcctactctttccccgcctccacggttaccgtggcttctgtgccgtcgtcctctgcctcctccgctcccagctatggcgaggcggcgcagtgggcaggcagctggccggagagtagtgcgtggagctatccggcgaccacggcttcttggtctggatcaagccagtatgagtatccaccgtcaactcgtccacctcaatagtccatgctccatgtttcatttcatataagacgtatacacggccttcctttttttcccccatctactccacaaagaacaaagcttttgtggttcagaagacacagatagatagatgattttgttcaagatgcatgcatccgtgcaagatccaagagaagaggttgcgagattgtgtttcttctttgcttgtggtggtgttgaatcctgtatcgatcatgtgataatgattctggttgcaactaaatcgaagacgcacgtgataataaataatatctcattaagaaacactttttttttttctctcgatggaggcatgtgccgctgaggtcctatcatctgatctggagctagcagacgtggatcggtggcctctgaaattaaaaaaaaaaaacagaacctcattcaagttttggtcataattagtttccaccacgcgatttccagttttttttcccaatatatatctctcctcctatcacgcgttatctcgttttgtcagaagtgggtgaaaaaacactagaatctgcatgagtacggtgtttgcacattttgttctcactctcaatcttttacttttacatttcttggtgtatttcgagtttgaatagccac

SEQ ID NO: 76477 - DNA, 730 bp, Zea Mays
ctgaaattcttgaagcccacggctctaaaaaggcgtcatgagaaaattttggagttttcccctgatccaaattgggctgaagttttcaaagcccagctgaaaaccctgttccttccgaccttggccacctcgtacgcatcggcatcgcgtcgcgcccgccgctctcctctcctgccggcctgtccaacttcaaaagagcacgcgcttctgccccccgccctcctgcaccgctctccttccccgacgatggatcccgcagccatgttgagatccccgtgctctatcgtctcgccgggctccttattaaccgccccacttctcccagtacgcctcgccgtccagccacgccgccgagtgcctggttttattgcgccctccggcaggccgtccgtcgcgcggcgcgccgcggccggagacaagttcgaggccgagacgcccatagagaaaagtttccctcccttcccaactgtcatggacatcaaccagatccgtgacatcctgccacataggttcccgtttcttctggttgacagagttattgattacaaaccaggagaatatgctgttgcaatcaagaatgtgacaataaatgataacttcttcccagggcatttccctgaacgacccataatgcctggtgttctcatggtcgagtttcagattgttgcagaatgaataaactgacgtagataatcaactacaagtcatacttgtaatggatcagtatgac

SEQ ID NO: 76478 - DNA, 1455 bp, Zea Mays
ctgggtaacactaggttagtgttgttaggtgacgtccacttgacgaccatcctttgtcctggcacgcactcgttcagattatccatcttccggttcgtccatcaacatcatcttgcggattagcccgcgcttggggtcgacttgggttgtcttccacatcacgcaattaattaacgtatcatttcaatatttgactcgaatccgcgaggttgctaatgattttccgatgcagacaatttgtcgagcgcttgacaggtactatacgaactttggtttcaggtgttttgttgagcgcctggcgagcaccaacgttactgttgccaaagctggcgagcaccaacgttactgttgccaaagctgtcgctacctcctagcagcaaggtaccaccaccaggtgtgccagcagagaacccatcagcgccactcgaacctcccaatacaccaaagcagagctcgacgctggagccggaggtcgagcgcacaggggaaagacgcaagaaccgagcggcaagggagaagaaaccgagctggagctcgcaggggagtttgccgaggagggaaatgggcagggacgatgcggtgaggggagcaggagtcagggcgccgagcgggatccgagccagggccagggagatgggcgccaccaccttggcgggcggcagaggacgcgctggggaagaagcactacggcaagcgaacgtcagagcgctcggtccgagctggttgacgcgagcagggaggagcagagccgagcggagggctgctcgcgcggccccaggcgccaggagagagccgcggacgagggaggaagaaagctccctgccgagcttgaggggcgcggcctgcagaggagcgccggcgagcagctaaggagacgaagcgatgtccaaggctgcgtgctggagaatggagatggcacaagcggctgggaattcaccggataggaactgctggagataaaggagaacggttgggctggaggatgaacgtgtgtgagatatttcaacgatgcagagaaaaatctcaagcgaatggctggctgtccgcttgaggataatggagaggagggagcatgacgcgtagctatcgagctggagcaaatgacgtgtgggagataaggatagggaaaagaaaacagcgtgggaggtatttgggagaagaaatttcccatttttcttctacaaaagcaaaatacaaatattttaggtacgacattaaggtctaaaagatgtataaaaggggtcgtacaaaaataagatcgacaacaatatttggataggatttattttgatgaatactttggagccagatgaattttcacctgttatttatatccgaagttttggatccgggcaagaattgacggcccgaataagattgatttcgtcttcgataatttgctccgtaagattcgactaaaattagccgaaaccatatgtgctaatgcatacatga

SEQ ID NO: 76479 - DNA, 319 bp, Zea Mays
ccacgcccagtgcgcgattgtcttttcatgtatggaatagccgggttcaagcttaccctgtcccattctcagggcatgtggctagataagatagtccttgatcaacaggcctacatacgcatccaatccttaattgacccgggcggagcatcacctgttcctagcccaagtctcgatttaagtatttccatccttaggattgtgtctgttccttaggatgaaagagcatcacagggaactttacagtaagatcccactattgctccaaataaaaatattcttgcaggtagaagccatcctttctcgagttaaattaagg

SEQ ID NO: 76480 - DNA, 899 bp, Zea Mays
cttccctcctcgggtttccccgatctcttcctccccctctatctctccctctccctctccctcttcctctctcctaccacatctccagccctcttctcggcccgacggcgttccaccccctaccctcttttcccgccagcgccgttccttcctctgcggtagccctgcgtgaagcacacggcggtggtcctcgtcaaccaaatcgtcgccacatcgcgttctccccggcgaggatctgtaggcgagctcgccgtccatatccgcccaagccacccccagctcgtcgcagctcctcacactctcttagaagctactcggtgtcaagttcagaggaggaaagccgatgtggagctgctgtggcctgcttagctcgaagagtaacaccagctggaacttctactagtgctgggacatcgaaagtgaccccctttccacccattgtgagtggtcaagttggcacggagggcactcctcgacttcaacgcagccgtgctgtgtccagggaccttgttagagattggaactttgacgaagtaattgtcgcaaattagggtaaccttcaacagttgtcagctgggctttgtgctctatttatcagggaggagattccttcatttgatatatatttcttttcatagtagacgtctggaagtccattactatatacttaatgacttagacgaggaaatgctcgagagggataatatctttcaggagcgatatctggattgttgcagttatatatgctcgcgtatctatgtagctaggataaatgtttaagtgtcttttcctattttcaaatatgtataagttgacatgtacctttatgtatattattatgaacgaatccaacttctgacctcgatctgatattgaaaacggaagtgatgttttggtgc

SEQ ID NO: 76481 - DNA, 330 bp, Zea Mays
ctttccttccctcctcgggtttccccgatctcttcctccccctctatctctccctctccctctccctcttcctctctcctaccacatctccagccctcttctcggcccgacggcgttccaccccctaccctcttttcccgccagcgccgttccttcctctgcggtagccctgcgtgaagcacacggcggtggtcctcgtcaaccaaatcgtcgccacatcgcgttctccccggcgaggatctgtaggcgagctcgccgtccatatccgcccaagccacccccagctcgtcgcagttcagcagatgcattggcttgttgggcattgatgat

SEQ ID NO: 76482 - DNA, 1418 bp, Zea Mays
ccggcttctcgagcgccgccgtagtcgctcgccatcgcgacccaggaccctgacctcgacagcggtggatcgggggccaacgacggtgcgccaggcggcggtggcggctccccctcctccgacgtcgcctctccagtctttccatccttcgccgtcgcggtcgtgtctcggtctaagtgccaacgacggtgcaccagacggcgatggcggctccccctcctccgacgttgcctctccagtctttccatccttcgccgccgcggtcgtgtctcggtctaagggccaacgactgggtgtacctgctgttcatgacgatgggtgttgtcgttgcagctcttcgagaacatcaccaggaacctagaatccaggtgaacgaagagatctataaccatgacgaattgaaagctaagtttagaactcatgaattctaaactggcagtgattgtgaagtgtagcccatctttacgaagaatttggggaagaatttgtggatatgttggatggaataatctcctttgttcttcttgatacacgtcaaaaaagcttcgttgcagctcatgatgctgttgccatctgccctttatacatgggatggtgtcttgatgtggtcaataatgcttgaaggtacgaccaacattcctagcaggaactggccagttaccaccaagaacctcctggcatgttctctaggatgagattgaagctgctcgaatggcagcgatcaacaaggaaattaagcgtgtactaactgaagtcctttcaaaggctgggcaaaaggttcatgaagaaagtgaaaggctgcgagcctgcgatagcaggaacatgagcagattgcaatgaagcgtaagcgtgaaatggctcggtgtagatgacgtggcataaacacaaacgcacaaacattaaagggattaaaaattatatgctggacaaaggttcccaatttaggttaccaaaatgttgttcccaaagttctcatcatggacaagcgaagtgaacaatacgtttctctttagtaaaatcgttgattttcatttgcagaacctctgtttcaagttcctcgattcattttggcaagggtcatctatcttctgtatattttgctccatcaaatagttttttttttcattttttctagacaaagtaggataattttgtattaggaccatgtgattgtacaatttgccaataattatgagaccaacacccttttgaaaaagaagggcaggaaatgtgcagatcagttgtctgatacttgtaatgcaaaaacttgcatgttgatatgaacttagttattacaggtttttcaacatcaattaaaaaattgacatgcttttattgtccgaacatacaaaaatgtgtagcttttgcaaaggtctattcatagtcataaactttaaaaaaatgttcatttctatgtt

SEQ ID NO: 76483 - DNA, 1627 bp, Zea Mays
ccggcttctcgagcgccgccgtagtcgctcgccatcgcgacccaggaccctgacctcgacagcggtggatcgggggccaacgacggtgcgccaggcggcggtggcggctccccctcctccgacgtcgcctctccagtctttccatccttcgccgtcgcggtcgtgtctcggtctaagtgccaacgacggtgcaccagacggcgatggcggctccccctcctccgacgttgcctctccagtctttccatccttcgccgccgcggtcgtgtctcggtctaagggccaacgactgggtgtacctgctgttcatgacgatgggtgttgtcgttgcagctcttcgagaacatcaccaggaacctagaatccaggtgaacgaagagatctataaccatgacgaattgaaagctaagtttagaactcatgaattctaaactggcagtgattgtgaagtgtagcccatctttacgaagaatttggggaagaatttgtggatatgttggatggaataatctcctttgttcttcttgatacacgtcaaaaaagcttcgttgcagctcatgatgctgttgccatctgccctttatacatgggatggtgtcttgatggaccagtttcgtaaaactacccgaggcatctatttcaaaccttacaacaatctgcatgggcacactatttgtgtgattgaaagtggtcaataatgcttgaaggtacgaccaacattcctagcaggaactggccagttaccaccaagaacctcctggcatgttctctaggatgagattgaagctgctcgaatggcagcgatcaacaaggaaattaagcgtgtactaactgaagtcctttcaaaggttttattcttgacttgatcttgtttacagtttacattattgaatccgtctaagaggtgcaaggttattcctgattggttagcttcttaccctttttttatcacatacagaatcgactatcttaaggctgggcaaaaggttcatgaagaaagtgaaaggctgcgagcctgcgatagcaggaacatgagcagattgcaatgaagcgtaagcgtgaaatggctcggtgtagatgacgtggcataaacacaaacgcacaaacattaaagggattaaaaattatatgctggacaaaggttcccaatttaggttaccaaaatgttgttcccaaagttctcatcatggacaagcgaagtgaacaatacgtttctctttagtaaaatcgttgattttcatttgcagaacctctgtttcaagttcctcgattcattttggcaagggtcatctatcttctgtatattttgctccatcaaatagttttttttttcattttttctagacaaagtaggataattttgtattaggaccatgtgattgtacaatttgccaataattatgagaccaacacccttttgaaaaagaagggcaggaaatgtgcagatcagttgtctgatacttgtaatgcaaaaacttgcatgttgatatgaacttagttattacaggtttttcaacatcaattaaaaaattgacatgcttttattgtccgaacatacaaaaatgtgtagcttttgcaaaggtctattcatagtcataaactttaaaaaaatgttcatttctatgtt

SEQ ID NO: 76484 - DNA, 855 bp, Zea Mays
cttctctcccccacaccgtccctccggcttctcgagcgccgccgtagtcgctcgccatcgcgacccaggaccctgacctcgacagcggtggatcgggggccaacgacggtgcgccaggcggcggtggcggctccccctcctccgacgtcgcctctccagtctttccatccttcgccgtcgcggtcgtgtctcggtctaagtgccaacgacggtgcaccagacggcgatggcggctccccctcctccgacgttgcctctccagtctttccatccttcgccgccgcggtcgtgtctcggtctaagggccaacgactgggtgtacctgctgttcatgacgatgggtgttgtcgttgcagctcttcgagaacatcaccaggaacctagaatccagtacgaagaatttggggaagaatttgtggatatgttggatggaataatctcctttgttcttcttgatacacgtcaaaaaagcttcgttgcagctcatgatgctgttgccatctgccctttatacatgggatggtgtcttgatgaaacaccagtagctatccatttctgcagaacattgaaaaagggcaacatattgggaaacattgttgatctcaacaactggaatttagatgagattgaagctgctcgaatggcagcgatcaacaaggaaattaagcgtgtactaactgaagtcctttcaaaggctgggcaaaaggttcatgaagaaagtgaaaggctgcgagcctgcgatagcaggaacatgagcagattgcaatgaagcgtaagcgtgaaatggctcggtgtagatgacgtggcataaacacaaacgcacaaacattaaagggattaaaaattatatgctgg

SEQ ID NO: 76485 - DNA, 1129 bp, Zea Mays
tcagacttctctcccccacaccgtccctccggcttctcgagcgccgccgtagtcgctcgccatcgcgacccaggaccctgacctcgacagcggtggatcgggggccaacgacggtgcgccaggcggcggtggcggctccccctcctccgacgtcgcctctccagtctttccatccttcgccgtcgcggtcgtgtctcggtctaagtgccaacgacggtgcaccagacggcgatggcggctccccctcctccgacgttgcctctccagtctttccatccttcgccgccgcggtcgtgtctcggtctaagggccaacgactgggtgtacctgctgttcatgacgatgggtgttgtcgttgcagctcttcgagaacatcaccaggaacctagaatccaggtgaacgaagagatctataaccatgacgaattgaaagctaagtttagaactcatgaattctaaactggcagtgattgtgaagtgtagcccatctttacgaagaatttggggaagaatttgtggatatgttggatggaataatctcctttgttcttcttgatacacgtcaaaaaagcttcgttgcagctcatgatgctgttgccatctgccctttatacatgggatggtgtcttgatggtatgtaaagcaaagatggttgctttgcccttctgaagaaaatcaggcattaattatgttttttgattcatttcacaaaacaaaacttctaggaccagtttcgtaaaactacccgaggcatctatttcaaaccttacaacaatctgcatgggcacactatttgtgtgattgaaagtggtcaataatgcttgaaggtacgaccaacattcctagcaggaactggccagttaccaccaagaacctcctggcatgttctctaggatgagattgaagctgctcgaatggcagcgatcaacaaggaaattaagcgtgtactaactgaagtcctttcaaaggctgggcaaaaggttcatgaagaaagtgaaaggctgcgagcctgcgatagcaggaacatgagcagattgcaatgaagcgtaagcgtgaaatggctcggtgtagatgacgtggcataaacacaaacgcacaaacattaaagggattaaaaattatatgctgg

SEQ ID NO: 76486 - DNA, 956 bp, Zea Mays
gttcggtgatcagagagatgaagcaacaacacggaacggaaccacgccaacggcgtgcgtacgcgcgctcagctagctcgtgtcgtgcgtgcacacagcaagcgtgccgcccccaccgtgcgagtgtgcgtcgcccggaatcctctccaaccgcgccggccgggctgctggtcgcctggtggtcggcctataaattggcttccgcgcgcgcgccagcagccagagccagtctctactcgcctctctctcgcgcaagccacagtagagcaaccaaccataccaccggcccgtgtcgatctctggcctctctcgtgcaaggaattaagcaggcaagaggccaaccttcttccagcatggccaaggcgagcagcaggctgctcttctcgctctcgctcgtcgtcctgctgctcctcgtggagctgttgtgtgcagaccactacttctccccatggacaggctgacgccatcgactgcggcgcgagctgctcgtaccggtgcagcaagtcgggacggcccaagatgtgcctgagggcgtgcggcacctgctgccagcgctgcggctgcgtcccgccgggcacctccggcaacgaggacgtctgcccctgctacgccaacatgaagacccacgacggccagcacaagtgcccgtgatccatccaccgtggttcccagcatcagcagctttgccaaaaagacatgatacctacatatatataagagtacctagctgctgctgctctactaccttgttggttcattatattgtgcgcgtgcatgcatgaataaataaatgaacatattagggcatgtacaacccagatacggctgcacggtactccaagtacaagatacaactaaaacacaacacaatacagtggtcatgtctaaaacatgtgtcttacgatattcattgtaccaatcagagtattcaataaattaaagtgaccaatcagata

SEQ ID NO: 76487 - DNA, 1628 bp, Zea Mays
attcctccaacctcgcaaacatgacacaaccacaacaataaaaaaaaacagatcccagcctccatttccaaatccacacctggcccggctgccccaaatgcgtcggcatcgcgccgtcgctgctgcacaccgtcgatgactcccgccccttcgaacgccgccggcgacctcttcgctgccaacctcacgggcgcgctccttgcggttgcctcctccgccttcattggcgtcagcttcatcgtcaagaagaagggcctacgccgggccgccaccgccggcgcccgcgcaggtgttggaggctatgggtacctcttggagccactgtggtggattgggatggttacgatgctgattggggagattgccaattttgtggcctacatgtttgcgccagctattcttgtcacccctcttggtgcgctcagcataattgtcagtgctgttctagcccatttcaccctgaatgagaagctgcagcggatgggtgtgttgggctgtgtgctctgtataatcgggtcaaccataatcatcctccatgcacctgaagaagagacaccaagctcagtgacacagatctggcagttggcaacacaacctgcctttctttgttatgcggcttctgcattgactatctcactgatcttgatatttcactgtgcaccccgttatggccagacaaacatcgtggtgtatgtgggaatttgctcagtgataggatctttgacggtaatgagcatcaaggcagtaggcattgctatcaagcttacaattgagggcataaaccaggctggctatttccagacttggctgtttgcaactgtttcagctacatgcataattattcagttaatttacctgaacaaggcattggatactttcaatactgcagttgtttctcccatctactatgcgatgtttacatccctcacaattttggcaagtgccataatgttcaagagtataagcagtattgcctctgagatttgtgggtttcttactgtgcttactggtactgttgtactgcattctacaagagaacatgatccaacccttacttcagatctgtatgctcctctttccccaatatattggcatatccaaggtaacggtgaaacaggaggaaagctgaaagaggatgatttactctctggcaatttcatcactgtggtgcgacaagactactttgtctagagaccttccacgatgctcaatgttctggattaaaagaaaagagaacaacactacggaaggatcctactgatgcccagtgtactgcggcttccccactgtgctcatgaacagacattttttcctgccttccaaacaggcccttagaatttgttgaaaagttccagtttgatcacaggcatctgggccgatgccttgtagtaagatgtaagcaatccgtcctctggccgggttgagcaaggcttggctgcagtgtatcagggtggtgcagctgatgtatttatactgtacaatctagtgtgaatgtatgaactagagctatcagaatctgcacagatatttcatgacagactctgtccagcatgttaagttatatattgctcctgacttgtgaatactttgttattacttcctggttcaaagttatgatgcgatgtaca

SEQ ID NO: 76488 - DNA, 1621 bp, Zea Mays
aaaattcctccaacctcgcaaacatgacacaaccacaacaataaaaaaaaacagatcccagcctccatttccaaatccacacctggcccggctgccccaaatgcgtcggcatcgcgccgtcgctgctgcacaccgtcgatgactcccgccccttcgaacgccgccggcgacctcttcgctgccaacctcacgggcgcgctccttgcggttgcctcctccgccttcattggcgtcagcttcatcgtcaagaagaagggcctacgccgggccgccaccgccggcgcccgcgcaggtgttggaggctatgggtacctcttggagccactgtggtggattgggatggttacgatgctgattggggagattgccaattttgtggcctacatgtttgcgccagctattcttgtcacccctcttggtgcgctcagcataattgtcagtgctgttctagcccatttcaccctgaatgagaagctgcagcggatgggtgtgttgggctgtgtgctctgtataatcgggtcaaccataatcatcctccatgcacctgaagaagagacaccaagctcagtgacacagatctggcagttggcaacacaacctgcctttctttgttatgcggcttctgcattgactatctcactgatcttgatatttcactgtgcaccccgttatggccagacaaacatcgtggtgtatgtgggaatttgctcagtgataggatctttgacggtaatgagcatcaaggcagtaggcattgctatcaagcttacaattgagggcataaaccaggctggctatttccagacttggctgtttgcaactgtttcagctacatgcataattattcagttaatttacctgaacaagttgtttctcccatctactatgcgatgtttacatccctcacaattttggcaagtgccataatgttcaaggactggtctgggcagagtataagcagtattgcctctgagatttgtgggtttcttactgtgcttactggtactgttgtactgcattctacaagagaacatgatccaacccttacttcagatctgtatgctcctctttccccaatatattggcatatccaaggtaacggtgaaacaggaggaaagctgaaagaggatgatttactctctggcaatttcatcactgtggtgcgacaagactactttgtctagagaccttccacgatgctcaatgttctggattaaaagaaaagagaacaacactacggaaggatcctactgatgcccagtgtactgcggcttccccactgtgctcatgaacagacattttttcctgccttccaaacaggcccttagaatttgttgaaaagttccagtttgatcacaggcatctgggccgatgccttgtagtaagatgtaagcaatccgtcctctggccgggttgagcaaggcttggctgcagtgtatcagggtggtgcagctgatgtatttatactgtacaatctagtgtgaatgtatgaactagagctatcagaatctgcacagatatttcatgacagactctgtccagcatgttaagttatatattgctcctgacttgtgaatactttgttattacttcctggttcaaagttatgatgcgatgtaca

SEQ ID NO: 76489 - DNA, 6798 bp, Zea Mays
cgaaaactttccaagttgcatgcacggtccttactaatggaatagaggtaaagctgcagcggaatgctttaagtgtgatagaacctccgactggcaacgaggatgatgataaatttgattgtgaaaacatgcagtggaatagttcagatatggcctccgatgatgcactatcaccaaagccacagcggtcacggagcaggcagcataggggtttccacagaaaatccatcagccgttcaatgtcatgtgactcccactccaagacgtctgtttcatcttcctcaagagctcacacgaaagttgacctaagcaagctagaactgactgcactgctgagatattggcgtcacttcaatctcgatgcatgtcctaatccatccagagagcagttagttgatgctgttcaaaggcacttcacagcccagcaattggatgagttgcaggtcattgtcggctttgtgcaagctgcaaagaggctaaagacgactatgaaagtggcctgactgtgaagcctgaacttcaactaacagattcaagagaggatgtagcatgtttgatgaatgttgccgtgctatgtaatatatatgcatgaagttctttagattcaggtggctaggttaatggacaactagactatgttagcctcatctgatgtagatatgcagtatcctgtctaaagatgtttcaacctctagctcagttctttcctgctgactggatgtggattgaaatgacaagtttaaaacaagttattttgtcatccttttcgatgttccaacattatatttagcccatgctttagcccaaattgcatgcagaactaattaggaatgcagaatatggtggctagatgtgtcagaaaattaccgagtctcatggtaaagcccttctgcaatagtagccgagaactgtttaaatgagcctgtggaaaaaaaagacttgagtaatggcttgaaaaaagcagtagcaccgatcttcatcaggtggagcttttgtagcaatctcgaatagttgaatgcttttggaaggtgaattgcagtagcatcaagacaaatcgatcagcataaagagaagatattaggcctctgtgacaacagacatcacacacggaataaattagggtcattcaaagtagcatatgaacctgtctgtcgctggtttactatactaactggttttctgtttgagagtaatcataactacggtagatttacctaggacaaaataatggagataagacaagacaatgttgatgctctaatctcaagaaaacaaaaatgtcagccatcttatggcttgtctgagtaaaacctattcccttccaatacatatggaacggagaggagaatgtattttccccttaaatccttctccatacatatatggatttgaggggattattttgtttcaaaacgtggcctaatgctgctagatatctaggaacaccatcatgtaaagtggaacagaaagagtgcttccataatggagtgtttgggttggtgaatcaacccgttttagatgaggtgatccatcatgactttattcctcaaatttaatgaaatgactttattctgtatactttgtggtagcaggtctccagccccggtaaaggaggattgtgataggtttgacaagcagccgttaaaactagctgttctaataaagacaaaacccaaaagaaatcagttagggcataaccctcttagtaacttgtcatatcggaatccaagtatggtgttaaatgggtaaagggtgaaagggcctctagctgggtaagtaaggtggtctgagtatcactcaggttctaggttcgactcctcgtgggagcaaatttcagattgaggttaaaaaaattcactcattggttgcattggtcggcatggtgaaccaacatatggtgggcgagccctcgcataagtggttggtcaggtgggttgggcggttgggcctcaaagcatgggtcaagactcgaactatagggggcggcatccccatgtatgaggggccagctttcgtggcttttcttggtcgagctccgattgagctcttcttagtgaaataccgtggaggcggtccttcccccaccagccaagttaaatgggcaaaggctaggtcgacaccccttggtgacacgctatgtcatgatatgagcacggtgaagtgagcaaggattggatcactgcttccttaatattgcgcttcaacgcccagatgtagtgaaaaatgtgcaagtgccttttacatcattgacgggtctaaaaggtaagctagttgaaccaactaggatctttctaattagttcgaatgtagggtcgcttgcaggtaagttttagttgagataatgactaggagacataaaaatattttatgtgtccacaaaactaaatgaaggatcagaagatggagatggacaataccgacttcaaaatttggtacacagggacagctacaaacagaaacggagttctaattgataagagtctcaagaacagtatggtggatatgagaaggcgagaagcaagcttgtcatggatggtttgatcttgaacgtaatgagcgtgtataacccccaagtaggacacgatgagagtgctaagagacttttctatgaagacttagatagcatggttaggactatacctattagtaagaagcttttcataagagatctcaatagtcatgtaggtacaacaagtgcaaattttgaggcaatccatggaggttttgagtatggtagtagaaattggaagggagaggaagtcttgaaatttacggtagcttttgacctattgatagtcaacacttctttaggaagaaataatcccatttagtgaactatagtaatgacgaacactctagtcagattgactttgtccttacaagaagagaggataaacaagtatgcttggattgcaaggtgatacatgaagagtgtgttgtctctcgatataagcttgtggtgatggtcttccgttttcaggtacatacccctagggataaacaagccaagattgcaagaacaaagtggtggaaagtaaaagagaagatgttagaagtcttcaatgaccatcaaagaggatacttggaaggaaaatgaggcaaacaacatgtggaagatgatggcaacctgcataaaaaggtagtctcagagctattaagaagaagaaagaatgctatagacgtttgtaccattacatgagtatggactatggacaacatagagaagtacaagatagtaaagaagactgtaaagcaagctgtaagtgtgccaaggggtagggcatatgccaacgtttgtacacacatgaagaatggctagggtccatgagaggaagacaagtgacttcaaccaagttattcaaccaagtgcattaaggatgaaatcgagcacctattggtggatgataagtggcgagagtattttgacaattgttcaacgtggagaatgtaacacaacctttcatttagatgactcttttgatggcatctatagacgatttgtgcgtaggatccaagaatttaaggttaaagagacattgaaaacgatgaaaggggtaagacgatgagccctgatggtatcccgactgaggcatggagatgcctcagggacagctatagtatggccaactaagttattgaaccgcatcttccgatcgaataagatgtttgacgattggagaagtatgttagtaccaatctacaagaataaggaagatattcgaaattgtactaattatcgaggaattaagttgatgagtcatactatgaagctatgggagagttatcgagcattgtctgaaaaggaataatgaggaccccgataaaccagtttagtttcatatgcctgaaactgaaaggtcaatcatggaagctaatttcttagtaagacaagtgatggaacaacatagggagcagaaggactaacacatggttttcatttacttggagaaggcttatgacaaaataccaagaaagtttatatggtgggctttggacaaaaataaagttgcaacaaagtaagttggacccattaaggatatgtgaaaaggcatctagcctagtggttaaaggcttccgagaagcacctctaagacccaggttcgattcccctcgagggagaattttctggcttggttaaaaaaatcccctcactgtgcctcatatgcgcttgggttacaatgtcttgtgtgccaccctccggttgaaccattgtagagtggaaggttgacgccggccagttagtgatggccagcgttcggagattttctcggctgggaccaatgttttggtctcctcttaatattataccgccattccctctccagccaagtttttttcattaaggatatgtatgttgtgcctagcgttcgaacaagtggagacagagatggcttccctattagaacagaactgcatcaaaagtcagctttgagcccttacctttctgccttagtgatggatgagattgttagagtgccactaaccaattcaacccaaaagcttaaactgatgggagaaggcagtcaatccacttatacacttcaacacccccactcacgtgcagccagagagaaaggcgcaaaagcgaccagagagaggcgcaaacatggaaataaatgggtggaggcacaaattaagcctctgtcaggatttgaactcgagacctctggctctgatatcatgttagagaggacgcactaaccagatcaacccaaaagcttaagctgatgggataaggtagccaatcctaaggaacgaaagcaatggaaagaaaaacaggggaaaacagaagttgatatgggaagaggacagtacaaggagacctgaaaagatgaaatatacccaaagatttagccttaaataagagtgtctagaaaacagctatccatatgtatgaggtgtacatttgggtcgggcctgatgggctgacccgaagcacgaaaaaaacacggcccaagcacggcacgacccgaaatattttagtgtcggggcgggtttgggtcgaggtcgtgggccataggcaggcatggcccgtttaaagcaggcacgaaatgacccatatagaggcacaaaaaggctcatatatattcattaaaaccacacttcaatccacactttcatgtacttgataaagaacataaagctagagatgatactagttagatgttttttgcagctttgaattagagtgtgatgtaattttacttttattatgaacatattgaaggatgcatagaccacgaaaggtcaaaatcaacgggtgttctctaatcatttaggagaactcatgataggttaggtgatcctgtcatatttaccatactggctagaaacagaagcaacagttcttccaaaggtgaagtgaaaacggttgaggaaaggaaaaatcgacgaaatcttattttcactctcaggaacattttacaccctcaaactgtcactgaagtataatattgacatccaacagcgactcaaactactgaaagcagccaaattgccctgttgatcccatttgaaagggtgttttccagtgatgtggcactgacaatgactcagtttgacatgtaagtgcttatcactaatcacacctaggggtggtaactggctctagattttacagtatacaatttaaggatcgaaacagattaggatcgagctctattcatattcattttttaactaaattatttaagggacctaacttattgtgaagaaacatttggatcatgatccattaccacccctaatcacacctcgcgcacaccgcacgagcagtggtgataaatcaaagtaaatatgaataacaatatataactgcacctgcagttaatcttttggcattcttctatttccatattctccctttccttatctccataggcggaaaagaaagagataggccttggagatccaggagtgatgtggatgattggatggtgagatgacaaatcccagtggcatggacttgcagacttatagctgggccctaaatggattttctcccacaagaccagtaagggagtcctcaacagaaattgctcgttgttaactttttaagctccatgtcaccatgtaggaccaatatgtaaattttttaaaattttcctttctctccaaccgcttctctctcccatcgtatgaacccaggcaccagcaggcatatgtactttgcgtcgctgctgctgccccatcgccactaccgaccaggacaccaggtgggtcggccttgtctcttcttgcaccgccgcccattggccacgtctcctccgtgtcgccgcactttcggacctgcgcgcaatcggccttgtcgcccgctccactctcagccatttgtcagaaatttggattcttagctagggcacgttgacggtagggcacccacaagcacacactggccagtttgcccatgtgaacacgtcgtcgactgggtcctccagcgagcacggggcagtgtctagatacactaccaagattagttgagcgggagccaagagggcaccactagagtctagatcgctttcttcccacattcgacctattctctcaacttgctttttcagcgagactagcaatgaacaagtcgctatcgaggttattttccattttctctcacctccaagtcggtgagaattcgagtcagctggctacttcgacgattgctggacaggccctaagtcaacattaagatttccgatttattgtagtgcttcactatccatagtttccacagcatggatctccaattatacaacttagagatgagtccatttttcttatctgatttcatatcaaagcaaa

SEQ ID NO: 76490 - DNA, 1637 bp, Zea Mays
gttcctgagagggttctatatgaaattctatttcaggtaggtcgtgttgtagacctacacatactcgtgacaaggaactagccgacccaaaggttatgctttgctgagtatgaaacagaggagattgcccagtatgccattaagctattttctggccttgttcgacttcgtaataaaacacttagatttgcggtgcgtttccttttgctctctcattttacataagttatattagtatagcttgatagttgaatgttatcgttcctttttcattgtatattatactcccttgatcactaaacgttcgatattaattagtcaaaattaaactaaccaacgtcaaacatttagggatgttgggagtatctattactatgtatgtatgtgtcaagacttgggacttagtgttagcccagccccatatatttttgcactttactatttgagtttgaggcactttcacttaatatgtttttttagtatcagcataagagtcaactctgaaattactccaatgtttggcagatctctgggcaagacaaaccctcattaaatggcaatattcctgtaattcctagtttaaactctgtaccacagccaaagcctcctcatcaacatatgaggtctagtgatacccctttgccacaacatacagcagtgagtggcaggagtgctgggtatggtatctcacaaaatcattcatatgacactcacactcaagcaccgtcaagtgggttaccgagtagaggactaagcaacggtacatatgaatatagtagacgtgtatttggttctgttctgaatgatgttagccgtcgagctaccagggaaccaattccatacccgtcctgctagcatgttgagccctggtggctgtgactctatatgctgacagaaaaggtctctgaagatgttgtctgttgtctcagccatcagtaaggctatctctgtactcaccatttcatgcctgtaaatatgggttatggtggtaggacatatgcttgtctgttgggttgttctgttttttgtattgtagtgatacttttccctgctggttaggtccctctcattccctagtgtgaatgtcattcctccactaatatggctgcactaggaattaccaggcttagttgcatgaatgggtggcaatatgctcgcaatggtgttttaacattaagtgccattagctatttcaatgttatagcagggcgcgtttgtgtttgacatattagtatttggtggagtttgtgcttttcatcctgcatatgggacatctgaaggagagacatcgttttaaaagaaaattgtaaaataagtctcacaatttatgatgtttgatcatatgaatatttagttatatatgacttgtttgcttgagctatgtgtctgtcgcagcacaagcattcattatcgctcaactggctctcatggtgatcaagttatagattttctgtgacctggctactgtctggtctttgtgagttgatctgttgtcatttccatgttcattagtttggaaaagttggtgctgctggattttcacctaactgctgaattatctagactagtcggttgcccgtgcgttgtgacggcccacaacaatacccacgtaaactatctaccggaaagatctcaat

SEQ ID NO: 76491 - DNA, 1843 bp, Zea Mays
gccgccgtgtgagttccagttccaagtcctccgcgggcgcggagggaggaagaaatcggcaatcgccccaccccatcccatccccccccgccccaagaataggctagcggctggtcctcgaatctaggagcccccgacctgcgcgtccgtccgtccgtcctccctaaatccggccacgcccgccggtgaggagaggcgaagattgatcagccactcccgaatggaagattcatcggcctctgtcccggacccggacgaataataacttagttctactaagtttctcgggggtcgcccttcgcttgcttccgcccccttgttgttgttcctttgtccggctcgatctgggtcgctcggcggctgttcgtccgtcgcccgtaccgccgccgccgccggttggttggattagtactccactcccgcttcgttccgttatctctggtctgatatttacgggatattccttcgcgtgctctgcttctgctgggattcaagtgaaggcaccccatggccgagatagaagacgcgatgggtgcgccgccaatggtgacgacgacggagtccgagggcacgaccacagatgaggacgtgcatctttcgccgacctgcatctgcggcggcgcgggcggagctggtgggggaggccgcatcaagatcctctgcagcttcggcggccgcatcgtgccccgcccgcacgacggcgtgctcaagtacgtcggcggggagacccgcgtcctcgccgtgcctcgctccatctgcttccgcgagttgaagaagaaggtggaggacatgttcaagacggaggtcgcggccatcaagtaccagctgctctccctcgccgaggaactcgacgtgctcgtctccgtcacctgcgacgaggacctggtccacatgctggacgagtacgaccgcctcgaggcgaagcgctcgccgaccacgtccccgcgcttccgcgtctacgtcttcacgccgcaggccaccgcgccccacccgtcggccgccgcacccaccgtgccctcgtctacccgctacgctggtctgtcgcgcctccacccgcatcaccaccaccatcagcagcaccgccaattccagccggagcgctacgtggccaccgtaccagcctcgcccgacgggagcccgccgttctccgcccagccgcacggcgccgtctcggcgggcaactccccgcgcgccaacgcgttgggcgttgggttcgggatgcagcgcgtccggagctcgccgaacctcagcaccctggacgcggcggcgcggcgcttgcatcagcacggcgtggacggcagcatatcgggctacgtgagcggctcaccaaggcacgccggcgcggggcccatgctgttgcagaacaatttccaccactaccagcaccagtacccgacggcgcccgtgcccgtgcccgtgcctgtgcccgtgccgcaccacggtgggcggtacgacgcgcgcgggtacgtccgggtaggcaactacctggcgccgatggtgcccgctgccaggccgctctcgaggggaggaccggcgccgcacagcgacatggtgacgccgaagaagtctgctattgtgtgggactgacccggccggtcgtacgccggaggggcctcttgtgagttgagtgtttgagactgagatgtgtaaatagacggtcggatggatggatggatgcacgcggccttattttagctgttgcgtttgtgtccacgctgaatttgtttgtccgttttctactggtcgtgttcacggccttgttttagctctcccatagtctgaaatttatttttcttaaatcactgtactaacttttaagaaaaaaaaataaattattgtacta

SEQ ID NO: 76492 - DNA, 2517 bp, Zea Mays
atagccacgcgatccccacacccacacaaccgcacctcgcacccattgaccagacggcggcgctcatctcctcccccacggttctccccatcggcctgctggcttctccccggcttccccgatactgatcctcatcactcatgtctgctgaagttgctggaggacacccttatttcctctcgtgctacttctggttcatatactgcataaaattccgagattttacttgatacaagtggaacactcagagttttgtgcgaatacttcctaccatgtgaatcagttgtagctggtgaatttggcaagactcaatttctctcatctgagttcagaaacgtttgcttggtctcctgcttcccttgagtcttgccaaccatagttttctctcatctctttctgtgacttgaccaacatctcttttggtcctgtcagtctcgcaatactcccttccaaagacttgtctagaggttggattgccctgctctctgctggcactgcagcctgctgaagtctttacttgctgcattctgtgctcacttttgaaagctgctctcttctgctctgcgttgttgatttctgcactcaagcttctcttgcctgtgcactcaagcttctctcttcctgggcaactagtgatctccttgaagcatttcagcttttacctagagatctttctgttgttgaaggcaagagaggctttagggtgatggcgcaaactagcctgcctcctggttttcgtttccacccaaccgatgttgagctcgtttcctattacttgaagaggaagatcatgggaaagaaacatatcgtggatgctatagcagaggttgatctgtacaagtttcctccctgggatctatgtgacaagtcctctcttcgaagtaaagatcttgaatggttctttttttgtcctcgtgacaagaagtatcctaacgggtctaggacaaatcgtgccacaccaaatggttactggaagactagtggaaaggatagaataattatgcttaactcccgcaccgttgggatgaagaaaacattgatatttcatgaaggcaaggcccctaagggcgacagaactgattgggtgatgtatgaatacagaatggaagatgaggatttggtttctgctggtttctcaaaggatgcttatgtactctgcaaaattttcaagaaaagtggccttggtccaagaatcggagagcaatatggggctccatttaatgaagacgaatgggataatgcagaagtcgaaacttctctgtttcctttgacttgttcagaagtgaatccaacagagggacaacgtgctcagcctactgtcctggctggtgctcttctggaacccgaaccacctctacataattcatcttctacatgtgctggagaggaatcatcatttggtcatgccactgctgaggacttaacttttagccatagtgttgctagctctgctatccaagatacacctgctcggatgtcaggagacggtgtggtttctgtgaacaacatatccaatgtggccaatgacatgcgtagtcctcgtgactgtgatgaatttctatcggagttgtctagatttatgaatgattctcctctgcgtaacactcctcttggagagtgctctggtcttcctccgatgtctgaagctgaggctcatgcttttgaagtcaactcttttggcctctacaatgaattatcagagcttgttgggttaggatgcgcggataacaacttaaacaccagcaatgtggaaactacggattatctcatgttgccacctgacagagaactgtcggctaatgattacatggaactaaacgatctccttgctcctgacccaagcttccccagtgaattttctgctcaggacaatcaatatatgcagcatcctcttgctcagtacaatggacattatgatctgtcaggtccttcggagccaacaatgcctagcattttcgatgtttttcctcccaataatggagtcctcgcaacagatgatccagccaactacttggacccagccatgcagttccctttctcatgattggttaccatttgtcatggaggattgataagtagacctgctcgtcatagagttgcactcggccaaaagaaaggacatcaagtgccaccaccggtagagaagacggctgcatcgacgagcgcgccgcgtgacatgatggctttctcaagaaatataaaggccggaaggagaatttgagtgtccacctaaattctatgaatttagtagatgccttattttgtttttttgtctggtgatcgatatttagctacgaggggttgaatagggacgtagagagtaacctttttttttgtttaaagtgcggtctgggcctgccaccggttcgaatattatgggaatcaggaagtaagtaaatactccctccgtttctttttatttgtcgctggatagtgcaattttgcactatccagcgacaaataaaaagaaacggagggagtattggactgccaactgcttccgaaacttttacgtcc

SEQ ID NO: 76493 - DNA, 2592 bp, Zea Mays
atagccacgcgatccccacacccacacaaccgcacctcgcacccattgaccagacggcggcgctcatctcctcccccacggttctccccatcggcctgctggcttctccccggcttccccgatactgatcctcatcactcatgtctgctgaagttgctggaggacacccttatttcctctcgtgctacttctggttcatatactgcataaaattccgagattttacttgatacaagtggaacactcagagttttgtgcgaatacttcctaccatgtgaatcagttgtagctggtgaatttggcaagactcaatttctctcatctgagttcagaaacgtttgcttggtctcctgcttcccttgagtcttgccaaccatagttttctctcatctctttctgtgacttgaccaacatctcttttggtcctgtcagtctcgcaatactcccttccaaagacttgtctagaggttggattgccctgctctctgctggcactgcagcctgctgaagtctttacttgctgcattctgtgctcacttttgaaagctgctctcttctgctctgcgttgttgatttctgcactcaagcttctcttgcctgtgcactcaagcttctctcttcctgggcaactagtgatctccttgaagcatttcagcttttacctagagatctttctgttgttgaaggcaagagaggctttagggtgatggcgcaaactagcctgcctcctggttttcgtttccacccaaccgatgttgagctcgtttcctattacttgaagaggaagatcatgggaaagaaacatatcgtggatgctatagcagaggttgatctgtacaagtttcctccctgggatctatgtgacaagtcctctcttcgaagtaaagatcttgaatggttctttttttgtcctcgtgacaagaagtatcctaacgggtctaggacaaatcgtgccacaccaaatggttactggaagactagtggaaaggatagaataattatgcttaactcccgcaccgttgggatgaagaaaacattgatatttcatgaaggcaaggcccctaagggcgacagaactgattgggtgatgtatgaatacagaatggaagatgaggatttggtttctgctggtttctcaaaggatgcttatgtactctgcaaaattttcaagaaaagtggccttggtccaagaatcggagagcaatatggggctccatttaatgaagacgaatgggataatgcagaagtcgaaacttctctgtttcctttgacttgttcagaagtgaatccaacagagggacaacgtgctcagcctactgtcctggctggtgctcttctggaacccgaaccacctctacataattcatcttctacatgtgctggagaggaatcatcatttggtcatgccactgctgaggacttaacttttagccatagtgttgctagctctgctatccaagatacacctgctcggatgtcaggagacggtgtggtttctgtgaacaacatatccaatgtggccaatgacatgcgtagtcctcgtgactgtgatgaatttctatcggagttgtctagatttatgaatgattctcctctgcgtaacactcctcttggagagtgctctggtcttcctccgatgtctgaagctgaggctcatgcttttgaagtcaactcttttggcctctacaatgaattatcagagcttgttgggttaggatgcgcggataacaacttaaacaccagcaatgtggaaactacggattatctcatgttgccacctgacagagaactgtcggctaatgattacatggaactaaacgatctccttgctcctgacccaagcttccccagtgaattttctgctcaggacaatcaatatatgcagcatcctcttgctcagtacaatggacattatgatctgtcaggtccttcggagccaacaatgcctagcattttcgatgtttttcctcccaataatggagtcctcgcaacagatgatccagccaactacttggacccagccatgcagttccctttctcatgattggttaccatttgtcatggagggctaggtttcaactattttgtggtctctgttttaacagtggctttcaaaagtgccctcgaattcattgactcaggattgataagtagacctgctcgtcatagagttgcactcggccaaaagaaaggacatcaagtgccaccaccggtagagaagacggctgcatcgacgagcgcgccgcgtgacatgatggctttctcaagaaatataaaggccggaaggagaatttgagtgtccacctaaattctatgaatttagtagatgccttattttgtttttttgtctggtgatcgatatttagctacgaggggttgaatagggacgtagagagtaacctttttttttgtttaaagtgcggtctgggcctgccaccggttcgaatattatgggaatcaggaagtaagtaaatactccctccgtttctttttatttgtcgctggatagtgcaattttgcactatccagcgacaaataaaaagaaacggagggagtattggactgccaactgcttccgaaacttttacgtcc

SEQ ID NO: 76494 - DNA, 2584 bp, Zea Mays
caaacccccgcctctttaaaagggcccttccatagccacgcgatccccacacccacacaaccgcacctcgcacccattgaccagacggcggcgctcatctcctcccccacggttctccccatcggcctgctggcttctccccggcttccccgatactgatcctcatcactcatgtctgctgaagttgctggaggacacccttatttcctctcgtgctacttctggttcatatactgcataaaattccgagattttacttgatacaagtggaacactcagagttttgtgcgaatacttcctaccatgtgaatcagttgtagctggtgaatttggcaagactcaatttctctcatctgagttcagaaacgtttgcttggtctcctgcttcccttgagtcttgccaaccatagttttctctcatctctttctgtgacttgaccaacatctcttttggtcctgtcagtctcgcaatactcccttccaaagacttgtctagaggttggattgccctgctctctgctggcactgcagcctgctgaagtctttacttgctgcattctgtgctcacttttgaaagctgctctcttctgctctgcgttgttgatttctgcactcaagcttctcttgcctgtgcactcaagcttctctcttcctgggcaactagtgatctccttgaagcatttcagcttttacctagagatctttctgttgttgaaggcaagagaggctttagggtgatggcgcaaactagcctgcctcctggttttcgtttccacccaaccgatgttgagctcgtttcctattacttgaagaggaagatcatgggaaagaaacatatcgtggatgctatagcagaggttgatctgtacaagtttcctccctgggatctatgtgacaagtcctctcttcgaagtaaagatcttgaatggttctttttttgtcctcgtgacaagaagtatcctaacgggtctaggacaaatcgtgccacaccaaatggttactggaagactagtggaaaggatagaataattatgcttaactcccgcaccgttgggatgaagaaaacattgatatttcatgaaggcaaggcccctaagggcgacagaactgattgggtgatgtatgaatacagaatggaagatgaggatttggtttctgctggtttctcaaaggatgcttatgtactctgcaaaattttcaagaaaagtggccttggtccaagaatcggagagcaatatggggctccatttaatgaagacgaatgggataatgcagaagtcgaaacttctctgtttcctttgacttgttcagaagtgaatccaacagagggacaacgtgctcagcctactgtcctggctggtgctcttctggaacccgaaccacctctacataattcatcttctacatgtgctggagaggaatcatcatttggtcatgccactgctgaggacttaacttttagccatagtgttgctagctctgctatccaagatacacctgctcggatgtcaggagacggtgtggtttctgtgaacaacatatccaatgtggccaatgacatgcgtagtcctcgtgactgtgatgaatttctatcggagttgtctagatttatgaatgattctcctctgcgtaacactcctcttggagagtgctctggtcttcctccgatgtctgaagctgaggctcatgcttttgaagtcaactcttttggcctctacaatgaattatcagagcttgttgggttaggatgcgcggataacaacttaaacaccagcaatgtggaaactacggattatctcatgttgccacctgacagagaactgtcggctaatgattacatggaactaaacgatctccttgctcctgacccaagcttccccagtgaattttctgctcaggacaatcaatatatgcagcatcctcttgctcagtacaatggacattatgatctgtcaggtccttcggagccaacaatgcctagcattttcgatgtttttcctcccaataatggagtcctcgcaacagatgatccagccaactacttggacccagccatgcagttccctttctcatgattggttaccatttgtcatggagtggctttcaaaagtgccctcgaattcattgactcaggattgataagtagacctgctcgtcatagagttgcactcggccaaaagaaaggacatcaagtgccaccaccggtagagaagacggctgcatcgacgagcgcgccgcgtgacatgatggctttctcaagaaatataaaggccggaaggagaatttgagtgtccacctaaattctatgaatttagtagatgccttattttgtttttttgtctggtgatcgatatttagctacgaggggttgaatagggacgtagagagtaacctttttttttgtttaaagtgcggtctgggcctgccaccggttcgaatattatgggaatcaggaagtaagtaaatactccctccgtttctttttatttgtcgctggatagtgcaattttgcactatccagcgacaaataaaaagaaacggagggagtattggactgccaactgcttccgaaacttttacgtcc

SEQ ID NO: 76495 - DNA, 2008 bp, Zea Mays
tctgcgtgcgtgcaccaactaactaaccaagctactgcgggagggagaagggtgtgtgccggcccgccgccaagcactgctacccggccggcggccatggaggtgagctccgtggagttcggtcatcacgcggcggccgcctcaaagtgctttgacgacgacggtcgcctcaagcgcacagggacgatgtggacggcgagcgcgcacattatcacggccgtgatagggtccggggtgctgtcgctcgcgtgggccatcgcgcagctcggctgggtggcaggccccaccgtcatgctgctcttctccttcgtcacctactacacatcggccctactcgccgactgctaccgctccggcgacgcctgcaccggcaagcgcaactacacgtacatggacgcggttaacgccaatctcagtggcgtcaaggtctggttctgcgggttcctgcagtacgccaacatcgtcggagtcgccataggctacaccattgccgcctctattagcatgctggcgatccagagggcgaactgcttccacgtggaggggcacggggacccctgcaacatctccagcacgccctacatgatcatcttcggcgtcgtgcagattttcttctcgcagatcccggacttcgaccagatatcgtggctctccatcctcgccgccgtcatgtcgttcacctactccaccatcggcctgggcctgggcatcgcgcaggtggtgtccaacaagggcgtgcagggcagcctgacggggatcagcgtcggcttggtcaccccggtcgacaagatgtggcgcagcctgcaggcgttcggcgacatcgccttcgcctactcctactcgctcatcctcatcgagatccaggacaccatccgcgcgccgccgccgtccgagtccaaggtcatgcggcgcgccaccgtcgtcagcgtggccgtcaccacgttcttctacatgctgtgcgggtgcatggggtacgccgcgttcggggacaacgcccccgggaacctcctcacgggcttcggcttctacgagcccttctggctcctcgacgtcgccaacgccgccatcgccgtgcacctcgtcggcgcctaccaggtctactgccagcccctgttcgccttcgtcgagaagtgggcgcgccagaggtggcccaagtcccgctacatcacgggcgaggtcgacgtcccgctcccgctcgggaccgccggcggccggtgctacaagctcagcctgttccggctgacgtggcggacggcgttcgtggtggccacgacggtggtgtccatgctgctgcccttcttcaacgacgtggtcgggctcctgggcgcgctggggttctggccgctcaccgtctacttccccgtggagatgtacatcgtgcagaagaaggtgcccaggtggagcacgcggtgggtgtgcctgcagctgctcagcgtcgcctgcctcgtcatcaccgtcgcctccgccgcaggctccgttgccgggatcgtctctgacctcaaagtgtacaaaccgttcgtcaccacctcctgatcgaccgtacgtcctagcttccgtgcagttcaaaacacatacgcacgaacagatcattaattggcgcctagtatatatgtgcagtctttaattaaattaactaggcattaatcgatcgattaccactacgtcgttctagtgatgcgcgtagcttgcatcatcgctcgctgatttaatttccattgtttttctttgatgatctggttagccgaaatggctagtgaattaagagaaaacaaatagtagcagtactgtgtgagtaatcccaagtcaaatacgttattgaagttgtcggcggtacaaaacgcttgtaaaatgtttgtgtttcaattaatcaagaagaattgtacgtgtttcatatatgaggaaaagaaaaaaggacatatgtttgtttctacaacttctaaataaacaacttgatcgagatgttttcttcatggtacgtctttaatggcaaaaattcagcgtcagcgat

SEQ ID NO: 76496 - DNA, 2354 bp, Zea Mays
cccgtgggcgcgcgaaggcctcagcgccctccgtccctagctagcttaattcttcgtcttcatatcaccggtccaacaatacaacgcagaaagaaaagaaaaaaaatccatggcgttaattagggcttttggttaaatggttaccaggccagcctgcactgcagctgcagtgccgccgcaccgcacccctataaaaaccaaggcatgcagcctgcatacagaagacacacagcagcacacaccaagctagtttgatctatacgacgacgctttagaagcagcagtagcaccttgatcacttactctcttcgagctagcaagctcttgctgcattattgcaagaggaacaacgaaggagaagagctagggggaccaagctactgcgggagggagaagggtgtgtgccggcccgccgccaagcactgctacccggccggcggccatggaggtgagctccgtggagttcggtcatcacgcggcggccgcctcaaagtgctttgacgacgacggtcgcctcaagcgcacagggacgatgtggacggcgagcgcgcacattatcacggccgtgatagggtccggggtgctgtcgctcgcgtgggccatcgcgcagctcggctgggtggcaggccccaccgtcatgctgctcttctccttcgtcacctactacacatcggccctactcgccgactgctaccgctccggcgacgcctgcaccggcaagcgcaactacacgtacatggacgcggttaacgccaatctcagtggcgtcaaggtctggttctgcgggttcctgcagtacgccaacatcgtcggagtcgccataggctacaccattgccgcctctattagcatgctggcgatccagagggcgaactgcttccacgtggaggggcacggggacccctgcaacatctccagcacgccctacatgatcatcttcggcgtcgtgcagattttcttctcgcagatcccggacttcgaccagatatcgtggctctccatcctcgccgccgtcatgtcgttcacctactccaccatcggcctgggcctgggcatcgcgcaggtggtgtccaacaagggcgtgcagggcagcctgacggggatcagcgtcggcttggtcaccccggtcgacaagatgtggcgcagcctgcaggcgttcggcgacatcgccttcgcctactcctactcgctcatcctcatcgagatccaggacaccatccgcgcgccgccgccgtccgagtccaaggtcatgcggcgcgccaccgtcgtcagcgtggccgtcaccacgttcttctacatgctgtgcgggtgcatggggtacgccgcgttcggggacaacgcccccgggaacctcctcacgggcttcggcttctacgagcccttctggctcctcgacgtcgccaacgccgccatcgccgtgcacctcgtcggcgcctaccaggtctactgccagcccctgttcgccttcgtcgagaagtgggcgcgccagaggtggcccaagtcccgctacatcacgggcgaggtcgacgtcccgctcccgctcgggaccgccggcggccggtgctacaagctcagcctgttccggctgacgtggcggacggcgttcgtggtggccacgacggtggtgtccatgctgctgcccttcttcaacgacgtggtcgggctcctgggcgcgctggggttctggccgctcaccgtctacttccccgtggagatgtacatcgtgcagaagaaggtgcccaggtggagcacgcggtgggtgtgcctgcagctgctcagcgtcgcctgcctcgtcatcaccgtcgcctccgccgcaggctccgttgccgggatcgtctctgacctcaaagtgtacaaaccgttcgtcaccacctcctgatcgaccgtacgtcctagcttccgtgcagttcaaaacacatacgcacgaacagatcattaattggcgcctagtatatatgtgcagtctttaattaaattaactaggcattaatcgatcgattaccactacgtcgttctagtgatgcgcgtagcttgcatcatcgctcgctgatttaatttccattgtttttctttgatgatctggttagccgaaatggctagtgaattaagagaaaacaaatagtagcagtactgtgtgagtaatcccaagtcaaatacgttattgaagttgtcggcggtacaaaacgcttgtaaaatgtttgtgtttcaattaatcaagaagaattgtacgtgtttcatatatgaggaaaagaaaaaaggacatatgtttgtttctacaacttctaaataaacaacttgatcgagatgttttcttcatggtacgtctttaatggcaaaaattcagcgtcagcgat

SEQ ID NO: 76497 - DNA, 1839 bp, Zea Mays
gtttcgtgttcatacgagctagaataattaatatccaataataataagtcagatttcaacatatattgcatgtaatgtatagacaggttggccagtaaaaagaaaaagaaaaaagataaaaacgtagggcctagtgatcagcacagcatgcagaattgcagatgcggcgcacatgcgaacgtaacaaacacagcaacacgcccacgctagcggtttccatttccggccctgcaatcctgcaccggcgcgaaagccccctcacggcctcacctccactccggtgatggccgcctctcctttacttctcagatctcagtgctcacgccgtccacggtccactagttgcatcggctcccgcataaagatccacaccacttgagcagcagctagctcaagggaaggagaaggctggaagtggaaagaagtgggttcttgcttgagctgagctcttgctgcccttgaatctgttagggagtggagaacggagtatggggcgcggcaagatcgagatcaagaggatcgagaactctaccaaccggcaggtgaccttctccaagcgccgggccggactggtcaagaaggcacgggagatcggcgtgctctgcgacgccgaggtcggcgtcgtcatcttctccagcggcggcaagctctacgactactgctcgcccaggacctcgctgtccaggatcttggagaagtaccagaccaactccgggaagattctgtggggtgagaagcacaagaacctgagtgcagagatcgacagagtcaagaaggagaacgacaacatgcagattcagctcaggcatctgaaaggcgaggacctgaactccctgcagcccagggagctgatcgctattgaagagggcctccagaatgggcagaccaacatgcgcgagaagcagatggactactggaggatgcacaagacgaatgggaagatgctggaggacgaacacaagatactgacttttaggatgcaccaacaggctgttgatctgagcggcggcatgagggagctggagaccggataccatcaggtccagcacgacagggatttcatttcccagatgccgttcaccttccgggtgcagcccaaccaccccaacctgcaggaagacgagtagctacagcctgctggatagtgttctgcatgccgctctgaactgaagctgcaggaagacgagtagctacagcctgctggatagtgttctgcatgccgctctgaactggagctcctcacctgcagcttctatctcgcgtttcatcattcagcgttagctgggtatctttcttttcatggcaccctggatgaagtctgtcagttgttactacgatgtggtcttgtctttgatgatgatgttggggcgaaggcggagacgctacccttggctcgatgccttcgtcgccttcgtcgtctcgcttcaccaacgatgccaaagacgtcggtccgatgaggacttcgcgactggacttcgcgggcgtccttcgcccttctccattgcgagacgaaggcaagactccgacgatgtctgctagcctcacgtcctcatcgggtccggaagcccaagggagattcggtccactgtaacgggccccgcaaggataagcgtgttacgggcctcatctgtaatagtcttttctgtaatgacggtctgtaacctcccctggggaatattctaaggatactttgggttcccgagggcataaacgtcatttttttagcgcggtaggcactcgggcacctataaatacccccgtacagtacccttgaggggacagattaacagagctattgtcgttccccgttgaaccttgcgaactatttcttcactctcc

SEQ ID NO: 76498 - DNA, 1683 bp, Zea Mays
gtttcgtgttcatacgagctagaataattaatatccaataataataagtcagatttcaacatatattgcatgtaatgtatagacaggttggccagtaaaaagaaaaagaaaaaagataaaaacgtagggcctagtgatcagcacagcatgcagaattgcagatgcggcgcacatgcgaacgtaacaaacacagcaacacgcccacgctagcggtttccatttccggccctgcaatcctgcaccggcgcgaaagccccctcacggcctcacctccactccggtgatggccgcctctcctttacttctcagatctcagtgctcacgccgtccacggtccactagttgcatcggctcccgcataaagatccacaccacttgagcagcagctagctcaagggaaggagaaggctggaagtggaaagaagtgggttcttgcttgagctgagctcttgctgcccttgaatctgttagggagtggagaacggagtatggggcgcggcaagatcgagatcaagaggatcgagaactctaccaaccggcaggtgaccttctccaagcgccgggccggactggtcaagaaggcacgggagatcggcgtgctctgcgacgccgaggtcggcgtcgtcatcttctccagcggcggcaagctctacgactactgctcgcccaggacctcgctgtccaggatcttggagaagtaccagaccaactccgggaagattctgtggggtgagaagcacaagaacctgagtgcagagatcgacagagtcaagaaggagaacgacaacatgcagattcagctcaggcatctgaaaggcgaggacctgaactccctgcagcccagggagctgatcgctattgaagagggcctccagaatgggcagaccaacatgcgcgagaagcagatggactactggaggatgcacaagacgaatgggaagatgctggaggacgaacacaagatactgacttttaggatgcaccaacaggctgttgatctgagcggcggcatgagggagctggagaccggataccatcaggtccagcacgacagggatttcatttcccagatgccgttcaccttccgggtgcagcccaaccaccccaacctgcaggaagacgagtagctacagcctgctggatagtgttctgcctgcagcttctatctcgcgtttcatcattcagcgttagctggtgatgatgatgttggggcgaaggcggagacgctacccttggctcgatgccttcgtcgccttcgtcgtctcgcttcaccaacgatgccaaagacgtcggtccgatgaggacttcgcgactggacttcgcgggcgtccttcgcccttctccattgcgagacgaaggcaagactccgacgatgtctgctagcctcacgtcctcatcgggtccggaagcccaagggagattcggtccactgtaacgggccccgcaaggataagcgtgttacgggcctcatctgtaatagtcttttctgtaatgacggtctgtaacctcccctggggaatattctaaggatactttgggttcccgagggcataaacgtcatttttttagcgcggtaggcactcgggcacctataaatacccccgtacagtacccttgaggggacagattaacagagctattgtcgttccccgttgaaccttgcgaactatttcttcactctcc

SEQ ID NO: 76499 - DNA, 1474 bp, Zea Mays
gtttcgtgttcatacgagctagaataattaatatccaataataataagtcagatttcaacatatattgcatgtaatgtatagacaggttggccagtaaaaagaaaaagaaaaaagataaaaacgtagggcctagtgatcagcacagcatgcagaattgcagatgcggcgcacatgcgaacgtaacaaacacagcaacacgcccacgctagcggtttccatttccggccctgcaatcctgcaccggcgcgaaagccccctcacggcctcacctccactccggtgatggccgcctctcctttacttctcagatctcagtgctcacgccgtccacggtccactagttgcatcggctcccgcataaagatccacaccacttgagcagcagctagctcaagggaaggagaaggctggaagtggaaagaagtgggttcttgcttgagctgagctcttgctgcccttgaatctgttagggagtggagaacggagtatggggcgcggcaagatcgagatcaagaggatcgagaactctaccaaccggcaggtgaccttctccaagcgccgggccggactggtcaagaaggcacgggagatcggcgtgctctgcgacgccgaggtcggcgtcgtcatcttctccagcggcggcaagctctacgactactgctcgcccaggacctcgctgtccaggatcttggagaagtaccagaccaactccgggaagattctgtggggtgagaagcacaagaacctgagtgcagagatcgacagagtcaagaaggagaacgacaacatgcagattcagctcaggcatctgaaaggcgaggacctgaactccctgcagcccagggagctgatcgctattgaagagggcctccagaatgggcagaccaacatgcgcgagaagcaggcaataatccttcctcgtccagttgctcctgagcttattagtgtcgcttgcagcacacaagcacggcacagttcattaggggaagggttttgtttctgatgttgctttattctactgttgctgtagatggactactggaggatgcacaagacgaatgtacgagctctaatcttgaattctatcctttgttcctactctatacatcctgggatactttttttttctttttcttttgaaagaagtcgttgagtaattttttttacagaaaagtttttgcagcttcgggtcattaacagtcatttgtgattggttacaggggaagatgctggaggacgaacacaagatactgacttttaggatggtaattctccccatctgaatagcagttgaaactttgcttgatcatccttcctcctttcaactccttagcataacttatcagtatgcaatattctaaacaaactcaatgttccgagctaaccgaagaaactgcacaaccacgctgagcaaatttccaaggacatgaaaattcttgtcttgggatttctagttggaacgcaattctgctc

SEQ ID NO: 76500 - DNA, 1521 bp, Zea Mays
gtttcgtgttcatacgagctagaataattaatatccaataataataagtcagatttcaacatatattgcatgtaatgtatagacaggttggccagtaaaaagaaaaagaaaaaagataaaaacgtagggcctagtgatcagcacagcatgcagaattgcagatgcggcgcacatgcgaacgtaacaaacacagcaacacgcccacgctagcggtttccatttccggccctgcaatcctgcaccggcgcgaaagccccctcacggcctcacctccactccggtgatggccgcctctcctttacttctcagatctcagtgctcacgccgtccacggtccactagttgcatcggctcccgcataaagatccacaccacttgagcagcagctagctcaagggaaggagaaggctggaagtggaaagaagtgggttcttgcttgagctgagctcttgctgcccttgaatctgttagggagtggagaacggagtatggggcgcggcaagatcgagatcaagaggatcgagaactctaccaaccggcaggtgaccttctccaagcgccgggccggactggtcaagaaggcacgggagatcggcgtgctctgcgacgccgaggtcggcgtcgtcatcttctccagcggcggcaagctctacgactactgctcgcccaggacctcgtctgtccattgcccctctcattctttttattcttttgcttgtttattatcgtccttcttcttttcttgtgtgcaagcaaaactgatcgcaaagacccaaacttggttggaaaggcaaaactgagtaaaaaacacgattaagcgtaaaattgaggacaccaataaaaatgagggcaccagcctaaaaaacccaaatttggtttggtggcaggctgtccaggatcttggagaagtaccagaccaactccgggaagattctgtggggtgagaagcacaagaacctgagtgcagagatcgacagagtcaagaaggagaacgacaacatgcagattcagctcaggccagtgtttctgattcagatctgctcccgatctctagctgcgcgcgcacttcactagctcgctgttcgtgtgtgttcttgttgtgattgtgctagcgtgtccgtgacctgtgacggtgcaggcatctgaaaggcgaggacctgaactccctgcagcccagggagctgatcgctattgaagagggcctccagaatgggcagaccaacatgcgcgagaagcagatggactactggaggatgcacaagacgaatgggaagatgctggaggacgaacacaagatactgacttttaggatggtaattctccccatctgaatagcagttgaaactttgcttgatcatccttcctcctttcaactccttagcataacttatcagtatgcaatattctaaacaaactcaatgttccgagctaaccgaagaaactgcacaaccacgctgagcaaatttccaaggacatgaaaattcttgtcttgggatttctagttggaacgcaattctgctc

SEQ ID NO: 76501 - DNA, 2788 bp, Zea Mays
gttcaatttcacatggggaaagcaacaggaaaaaaatcccgctttccaaacaggggctgccagaaagcttaccatcctgcttgcgtggggaaagatagcggcttcctcaattcagatgaagaattcatctgtgaatggcatacttgctttatttgtaaagggcgttcacgttattattgcttttgctgtccgtggcaagccttttgtcaaaattgcgtgaaacaagcagaattcgtcccagtcttgaggaagacaaagggattctgcaccaactgtttaaggatggcaatcatgattgagaagaatgttgatgttgactccgatggggagagggttgatttcaatgacagggcaacttatgaatttttattcaaggagtattgggaggagatagttaaaggcaaggagagcatgactctggataagcttgaaaaagcatatgcttttctgaaagaaaaactaaactgcaaacaagatctagatttagaaaaggttcatgatgaagaacacagttcagatgatgattttgtgggcaatagtgatgacgacgatgacaacaagccatcttccacaaccaaatttaatggaacatcgaatacaatgaaattcttcctgagggaagataggccaatgaagaatggctatgtgggctggggttcaaaagagctcatggagttcctttcctctataggcaaagatacattgaattccctagatcaacatggtgctactgaagttgtgaaggtgtacattcaacaaaaaggtctcttagcaagagataagaaaaaacttgtcatatgtgatgacaagctcaagattttgtttaggagatcaaaagtgaggtacaacaggatatatagcttgttaggtaagcatattgctgtgaatatgacatcagaggatgaaacttttgctaactctgatgataacaatgaaacatttgtgagaaagaaagctcgtattgggaactacagttccagtactccaaagtgtactccagaaataaacaagagatgttttgctgctcttgttcgccataacattgatttaatctacttgaagaaatctttggttgtggatctactaagggagccggatacatttggcagcaaagttattggctgttttgtgagaataaagattgatctcaacgattatagtttctacatgcataaaaaggtgcaccaacatagaaagttgtatcagcttggactagtaacaggcaccagtaaatcccctgaagaatacaagataaatgatgtatcaacagatattcttttatgtatttccagcatacctgacatcaaaatttcaagtttgtcagatgaagaatacgaagaggaagaatgtcaagaccttcggctgctggccaagaatgaatcctttaaaaggcctactgttggggatctagaggagaaagcaagaagtttacgtagggagatagtgaatcattggatcagtaaagaactccagaggctagaaagattaattgacagggcgagtgagaaaggttggcgcaaggaaaagtttgaataccttgataagaaacaactcttgcgcaagccatctgaacaacaacgtttacttgaagaggtgcctcaagttattccagagacagaagataataaagatactgaatttcaagttacaggacaagacaaacctattcaaaagagtactgtcgctttacaaggtaccaatggagagagcattgtttctttgaaaaaaggctcagaagaaaaatgtacatatgtgacaagggcttcttttttgaagagccacacagggaaaaaatccaaaggtactgatggggagagagatctttccttggaaagtttatcggaagaaaaacctgaagttaataaggcccacaccgatggtggtacagctgtaatacacaatcaaaatcggagcactacagctgctattgctgcgctaccaaagtatttgcatcgccatgctgccactgaagccaataatgctggtgatatttcatctgttcaggagctggatggtgaaggtgttaaagctagcacggatgttgatacaactggaacagatgtccagcacgggagcattgaagctactaaagccaacgctgctggtgatgcacctggagcattttttcaaaagcagtgtgctaaagctgctgatgttattaccattgacgacgatgacgaggacaacagtcatcgttgttataaagaagaacaaacagcagtagttgatcttgaagctgattatgctggggataaccatcccgtgcagcttgaggcaaatagtcgaggccataaacacgtgaaggtgaaggagcgcatttggtattacattgatcctcagggtgatgagcaagggccatttacaatgcagcatctgagcatctggtggagcaatggcttcttccccggcgacttcagggtctggagaacaggccaaactagtaatgacgccatcttgctcgtggacgcactgcagatgactaggtaggctagttaggagcctcgtagaagactagatgtatttatgtatcgcggaaaaagcgggggggcttcgaggcagatatatgtgttctgctggggtgtacatccttctgtgttatatgatatgatgatgacatcctatccccaccatcacctcacccaccaatcaaaaacatcttgccaaacaaaacaatggttgtttgatggcaaagaggatttgttgggatgaaatatttgtggactattcagtatccctgtgctgtgacaatgctactgaaaatctggttctttggcatgttaggctgttt

SEQ ID NO: 76502 - DNA, 3276 bp, Zea Mays
gacacctgccacgattcacactcacacacaggtccactgcaggctgcagtgctgcacaccgccgcctggaacgaagcccctcttcggaatccacctacacgccccgtcggcggtccctcgcccgcatcgctagttcggcacacggagtttataaacccctctgcagtctgcacgaataatccccaacccggctctcggctcctctagtccttttctcgcattgcatttactgcggcatctttgcgtcggattcggttcccctcgattcctctcccgttgattgcctcgccgggtccggggtcaccggccggcgggggttgattgggtcggcggttatggggaaaggggcgaggaggcgcagccgtgcgtctggcgccggcgggggtggacacgggagcaagcgcccgcggcgggccgaggaggaggaacaggaggaagaggaaatggaaccgctggtgggggaggaggaggaggtggcggcgctggagggggaggactattgcttcgtctgcaaggacggcggtgacctccgcgtctgcgatttcaggggctgccagaaagcttaccatcctgcttgcgtggggaaagatagcggcttcctcaattcagatgaagaattcatctgtgaatggcatacttgctttatttgtaaagggcgttcacgttattattgcttttgctgtccgtggcaagccttttgtcaaaattgcgtgaaacaagcagaattcgtcccagtcttgaggaagacaaagggattctgcaccaactgtttaaggatggcaatcatgattgagaagaatgttgatgttgactccgatggggagagggttgatttcaatgacagggcaacttatgaatttttattcaaggagtattgggaggagatagttaaaggcaaggagagcatgactctggataagcttgaaaaagcatatgcttttctgaaagaaaaactaaactgcaaacaagatctagatttagaaaaggttcatgatgaagaacacagttcagatgatgattttgtgggcaatagtgatgacgacgatgacaacaagccatcttccacaaccaaatttaatggaacatcgaatacaatgaaattcttcctgagggaagataggccaatgaagaatggctatgtgggctggggttcaaaagagctcatggagttcctttcctctataggcaaagatacattgaattccctagatcaacatggtgctactgaagttgtgaaggtgtacattcaacaaaaaggtctcttagcaagagataagaaaaaacttgtcatatgtgatgacaagctcaagattttgtttaggagatcaaaagtgaggtacaacaggatatatagcttgttaggtaagcatattgctgtgaatatgacatcagaggatgaaacttttgctaactctgatgataacaatgaaacatttgtgagaaagaaagctcgtattgggaactacagttccagtactccaaagtgtactccagaaataaacaagagatgttttgctgctcttgttcgccataacattgatttaatctacttgaagaaatctttggttgtggatctactaagggagccggatacatttggcagcaaagttattggctgttttgtgagaataaagattgatctcaacgattatagtttctacatgcataaaaaggtgcaccaacatagaaagttgtatcagcttggactagtaacaggcaccagtaaatcccctgaagaatacaagataaatgatgtatcaacagatattcttttatgtatttccagcatacctgacatcaaaatttcaagtttgtcagatgaagaatacgaagaggaagaatgtcaagaccttcggctgctggccaagaatgaatcctttaaaaggcctactgttggggatctagaggagaaagcaagaagtttacgtagggagatagtgaatcattggatcagtaaagaactccagaggctagaaagattaattgacagggcgagtgagaaaggttggcgcaaggaaaagtttgaataccttgataagaaacaactcttgcgcaagccatctgaacaacaacgtttacttgaagaggtgcctcaagttattccagagacagaagataataaagatactgaatttcaagttacaggacaagacaaacctattcaaaagagtactgtcgctttacaaggtaccaatggagagagcattgtttctttgaaaaaaggctcagaagaaaaatgtacatatgtgacaagggcttcttttttgaagagccacacagggaaaaaatccaaaggtactgatggggagagagatctttccttggaaagtttatcggaagaaaaacctgaagttaataaggcccacaccgatggtggtacagctgtaatacacaatcaaaatcggagcactacagctgctattgctgcgctaccaaagtatttgcatcgccatgctgccactgaagccaataatgctggtgatatttcatctgttcaggagctggatggtgttaaagctagcacggatgttgatacaactggaacagatgtccagcacgggagcattgaagctactaaagccaacgctgctggtgatgcacctggagcattttttcaaaagcagtgtgctaaagctgctgatgttattaccattgacgacgatgacgaggacaacagtcatcgttgttataaagaagaacaaacagcagtagttgatcttgaagctgattatgctggggataaccatcccgtgcagcttgaggcaaatagtcgaggccataaacacgtgaaggtgaaggagcgcatttggtattacattgatcctcagggtgatgagcaagggccatttacaatgcagcatctgagcatctggtggagcaatggcttcttccccggcgacttcagggtctggagaacaggccaaactagtaatgacgccatcttgctcgtggacgcactgcagatgactaggtaggctagttaggagcctcgtagaagactagatgtatttatgtatcgcggaaaaagcgggggggcttcgaggcagatatatgtgttctgctggggtgtacatccttctgtgttatatgatatgatgatgacatcctatccccaccatcacctcacccaccaatcaaaaacatcttgccaaacaaaacaatggttgtttgatggcaaagaggatttgttgggatgaaatatttgtggactattcagtatccctgtgctgtgacaatgctactgaaaatctggttctttggcatgttaggctgttt

SEQ ID NO: 76503 - DNA, 3320 bp, Zea Mays
gacacctgccacgattcacactcacacacaggtccactgcaggctgcagtgctgcacaccgccgcctggaacgaagcccctcttcggaatccacctacacgccccgtcggcggtccctcgcccgcatcgctagttcggcacacggagtttataaacccctctgcagtctgcacgaataatccccaacccggctctcggctcctctagtccttttctcgcattgcatttactgcggcatctttgcgtcggattcggttcccctcgattcctctcccgttgattgcctcgccgggtccggggtcaccggccggcgggggttgattgggtcggcggttatggggaaaggggcgaggaggcgcagccgtgcgtctggcgccggcgggggtggacacgggagcaagcgcccgcggcgggccgaggaggaggaacaggaggaagaggaaatggaaccgctggtgggggaggaggaggaggtggcggcgctggagggggaggactattgcttcgtctgcaaggacggcggtgacctccgcgtctgcgatttcaggggctgccagaaagcttaccatcctgcttgcgtggggaaagatagcggcttcctcaattcagatgaagaattcatctgtgaatggcatacttgctttatttgtaaagggcgttcacgttattattgcttttgctgtccgtggcaagccttttgtcaaaattgcgtgaaacaagcagaattcgtcccagtcttgaggaagacaaagggattctgcaccaactgtttaaggatggcaatcatgattgagaagaatgttgatgttgactccgatggggagagggttgatttcaatgacagggcaacttatgaatttttattcaaggagtattgggaggagatagttaaaggcaaggagagcatgactctggataagcttgaaaaagcatatgcttttctgaaagaaaaactaaactgcaaacaagatctagatttagaaaaggttcatgatgaagaacacagttcagatgatgattttgtgggcaatagtgatgacgacgatgacaacaagccatcttccacaaccaaatttaatggaacatcgaatacaatgaaattcttcctgagggaagataggccaatgaagaatggctatgtgggctggggttcaaaagagctcatggagttcctttcctctataggcaaagatacattgaattccctagatcaacatggtgctactgaagttgtgaaggtgtacattcaacaaaaaggtctcttagcaagagataagaaaaaacttgtcatatgtgatgacaagctcaagattttgtttaggagatcaaaagtgaggtacaacaggatatatagcttgttaggtaagcatattgctgtgaatatgacatcagaggatgaaacttttgctaactctgatgataacaatgaaacatttgtgagaaagaaagctcgtattgggaactacagttccagtactccaaagtgtactccagaaataaacaagagatgttttgctgctcttgttcgccataacattgatttaatctacttgaagaaatctttggttgtggatctactaagggagccggatacatttggcagcaaagttattggctgttttgtgagaataaagattgatctcaacgattatagtttctacatgcataaaaaggtgcaccaacatagaaagttgtatcagcttggactagtaacaggcaccagtaaatcccctgaagaatacaagataaatgatgtatcaacagatattcttttatgtatttccagcatacctgacatcaaaatttcaagtttgtcagatgaagaatacgaagaggaagaatgtcaagaccttcggctgctggccaagaatgaatcctttaaaaggcctactgttggggatctagaggagaaagcaagaagtttacgtagggagatagtgaatcattggatcagtaaagaactccagaggctagaaagattaattgacagggcgagtgagaaaggttggcgcaaggaaaagtttgaataccttgataagaaacaactcttgcgcaagccatctgaacaacaacgtttacttgaagaggtgcctcaagttattccagagacagaagataataaagatactgaatttcaagttacaggacaagacaaacctattcaaaagagtactgtcgctttacaaggtaccaatggagagagcattgtttctttgaaaaaaggctcagaagaaaaatgtaaacatttgcttctatagtatgtgttaaaaaaaaatccatgcaaggcgaacattgtgatgtttttattgtaggtacatatgtgacaagggcttcttttttgaagagccacacagggaaaaaatccaaaggtactgatggggagagagatctttccttggaaagtttatcggaagaaaaacctgaagttaataaggcccacaccgatggtggtacagctgtaatacacaatcaaaatcggagcactacagctgctattgctgcgctaccaaagtatttgcatcgccatgctgccactgaagccaataatgctggtgttaaagctagcacggatgttgatacaactggaacagatgtccagcacgggagcattgaagctactaaagccaacgctgctggtgatgcacctggagcattttttcaaaagcagtgtgctaaagctgctgatgttattaccattgacgacgatgacgaggacaacagtcatcgttgttataaagaagaacaaacagcagtagttgatcttgaagctgattatgctggggataaccatcccgtgcagcttgaggcaaatagtcgaggccataaacacgtgaaggtgaaggagcgcatttggtattacattgatcctcagggtgatgagcaagggccatttacaatgcagcatctgagcatctggtggagcaatggcttcttccccggcgacttcagggtctggagaacaggccaaactagtaatgacgccatcttgctcgtggacgcactgcagatgactaggtaggctagttaggagcctcgtagaagactagatgtatttatgtatcgcggaaaaagcgggggggcttcgaggcagatatatgtgttctgctggggtgtacatccttctgtgttatatgatatgatgatgacatcctatccccaccatcacctcacccaccaatcaaaaacatcttgccaaacaaaacaatggttgtttgatggcaaagaggatttgttgggatgaaatatttgtggactattcagtatccctgtgctgtgacaatgctactgaaaatctggttctttggcatgttaggctgttt

SEQ ID NO: 76504 - DNA, 3225 bp, Zea Mays
gacacctgccacgattcacactcacacacaggtccactgcaggctgcagtgctgcacaccgccgcctggaacgaagcccctcttcggaatccacctacacgccccgtcggcggtccctcgcccgcatcgctagttcggcacacggagtttataaacccctctgcagtctgcacgaataatccccaacccggctctcggctcctctagtccttttctcgcattgcatttactgcggcatctttgcgtcggattcggttcccctcgattcctctcccgttgattgcctcgccgggtccggggtcaccggccggcgggggttgattgggtcggcggttatggggaaaggggcgaggaggcgcagccgtgcgtctggcgccggcgggggtggacacgggagcaagcgcccgcggcgggccgaggaggaggaacaggaggaagaggaaatggaaccgctggtgggggaggaggaggaggtggcggcgctggagggggaggactattgcttcgtctgcaaggacggcggtgacctccgcgtctgcgatttcaggggctgccagaaagcttaccatcctgcttgcgtggggaaagatagcggcttcctcaattcagatgaagaattcatctgtgaatggcatacttgctttatttgtaaagggcgttcacgttattattgcttttgctgtccgtggcaagccttttgtcaaaattgcgtgaaacaagcagaattcgtcccagtcttgaggaagacaaagggattctgcaccaactgtttaaggatggcaatcatgattgagaagaatgttgatgttgactccgatggggagagggttgatttcaatgacagggcaacttatgaatttttattcaaggagtattgggaggagatagttaaaggcaaggagagcatgactctggataagcttgaaaaagcatatgcttttctgaaagaaaaactaaactgcaaacaagatctagatttagaaaaggttcatgatgaagaacacagttcagatgatgattttgtgggcaatagtgatgacgacgatgacaacaagccatcttccacaaccaaatttaatggaacatcgaatacaatgaaattcttcctgagggaagataggccaatgaagaatggctatgtgggctggggttcaaaagagctcatggagttcctttcctctataggcaaagatacattgaattccctagatcaacatggtgctactgaagttgtgaaggtgtacattcaacaaaaaggtctcttagcaagagataagaaaaaacttgtcatatgtgatgacaagctcaagattttgtttaggagatcaaaagtgaggtacaacaggatatatagcttgttaggtaagcatattgctgtgaatatgacatcagaggatgaaacttttgctaactctgatgataacaatgaaacatttgtgagaaagaaagctcgtattgggaactacagttccagtactccaaagtgtactccagaaataaacaagagatgttttgctgctcttgttcgccataacattgatttaatctacttgaagaaatctttggttgtggatctactaagggagccggatacatttggcagcaaagttattggctgttttgtgagaataaagattgatctcaacgattatagtttctacatgcataaaaaggtgcaccaacatagaaagttgtatcagcttggactagtaacaggcaccagtaaatcccctgaagaatacaagataaatgatgtatcaacagatattcttttatgtatttccagcatacctgacatcaaaatttcaagtttgtcagatgaagaatacgaagaggaagaatgtcaagaccttcggctgctggccaagaatgaatcctttaaaaggcctactgttggggatctagaggagaaagcaagaagtttacgtagggagatagtgaatcattggatcagtaaagaactccagaggctagaaagattaattgacagggcgagtgagaaaggttggcgcaaggaaaagtttgaataccttgataagaaacaactcttgcgcaagccatctgaacaacaacgtttacttgaagaggtgcctcaagttattccagagacagaagataataaagatactgaatttcaagttacaggacaagacaaacctattcaaaagagtactgtcgctttacaaggtacatatgtgacaagggcttcttttttgaagagccacacagggaaaaaatccaaaggtactgatggggagagagatctttccttggaaagtttatcggaagaaaaacctgaagttaataaggcccacaccgatggtggtacagctgtaatacacaatcaaaatcggagcactacagctgctattgctgcgctaccaaagtatttgcatcgccatgctgccactgaagccaataatgctggtgatatttcatctgttcaggagctggatggtgttaaagctagcacggatgttgatacaactggaacagatgtccagcacgggagcattgaagctactaaagccaacgctgctggtgatgcacctggagcattttttcaaaagcagtgtgctaaagctgctgatgttattaccattgacgacgatgacgaggacaacagtcatcgttgttataaagaagaacaaacagcagtagttgatcttgaagctgattatgctggggataaccatcccgtgcagcttgaggcaaatagtcgaggccataaacacgtgaaggtgaaggagcgcatttggtattacattgatcctcagggtgatgagcaagggccatttacaatgcagcatctgagcatctggtggagcaatggcttcttccccggcgacttcagggtctggagaacaggccaaactagtaatgacgccatcttgctcgtggacgcactgcagatgactaggtaggctagttaggagcctcgtagaagactagatgtatttatgtatcgcggaaaaagcgggggggcttcgaggcagatatatgtgttctgctggggtgtacatccttctgtgttatatgatatgatgatgacatcctatccccaccatcacctcacccaccaatcaaaaacatcttgccaaacaaaacaatggttgtttgatggcaaagaggatttgttgggatgaaatatttgtggactattcagtatccctgtgctgtgacaatgctactgaaaatctggttctttggcatgttaggctgttt

SEQ ID NO: 76505 - DNA, 3231 bp, Zea Mays
gacacctgccacgattcacactcacacacaggtccactgcaggctgcagtgctgcacaccgccgcctggaacgaagcccctcttcggaatccacctacacgccccgtcggcggtccctcgcccgcatcgctagttcggcacacggagtttataaacccctctgcagtctgcacgaataatccccaacccggctctcggctcctctagtccttttctcgcattgcatttactgcggcatctttgcgtcggattcggttcccctcgattcctctcccgttgattgcctcgccgggtccggggtcaccggccggcgggggttgattgggtcggcggttatggggaaaggggcgaggaggcgcagccgtgcgtctggcgccggcgggggtggacacgggagcaagcgcccgcggcgggccgaggaggaggaacaggaggaagaggaaatggaaccgctggtgggggaggaggaggaggtggcggcgctggagggggaggactattgcttcgtctgcaaggacggcggtgacctccgcgtctgcgatttcaggggctgccagaaagcttaccatcctgcttgcgtggggaaagatagcggcttcctcaattcagatgaagaattcatctgtgaatggcatacttgctttatttgtaaagggcgttcacgttattattgcttttgctgtccgtggcaagccttttgtcaaaattgcgtgaaacaagcagaattcgtcccagtcttgaggaagacaaagggattctgcaccaactgtttaaggatggcaatcatgattgagaagaatgttgatgttgactccgatggggagagggttgatttcaatgacagggcaacttatgaatttttattcaaggagtattgggaggagatagttaaaggcaaggagagcatgactctggataagcttgaaaaagcatatgcttttctgaaagaaaaactaaactgcaaacaagatctagatttagaaaaggttcatgatgaagaacacagttcagatgatgattttgtgggcaatagtgatgacgacgatgacaacaagccatcttccacaaccaaatttaatggaacatcgaatacaatgaaattcttcctgagggaagataggccaatgaagaatggctatgtgggctggggttcaaaagagctcatggagttcctttcctctataggcaaagatacattgaattccctagatcaacatggtgctactgaagttgtgaaggtgtacattcaacaaaaaggtctcttagcaagagataagaaaaaacttgtcatatgtgatgacaagctcaagattttgtttaggagatcaaaagtgaggtacaacaggatatatagcttgttaggtaagcatattgctgtgaatatgacatcagaggatgaaacttttgctaactctgatgataacaatgaaacatttgtgagaaagaaagctcgtattgggaactacagttccagtactccaaagtgtactccagaaataaacaagagatgttttgctgctcttgttcgccataacattgatttaatctacttgaagaaatctttggttgtggatctactaagggagccggatacatttggcagcaaagttattggctgttttgtgagaataaagattgatctcaacgattatagtttctacatgcataaaaaggtgcaccaacatagaaagttgtatcagcttggactagtaacaggcaccagtaaatcccctgaagaatacaagataaatgatgtatcaacagatattcttttatgtatttccagcatacctgacatcaaaatttcaagtttgtcagatgaagaatacgaagaggaagaatgtcaagaccttcggctgctggccaagaatgaatcctttaaaaggcctactgttggggatctagaggagaaagcaagaagtttacgtagggagatagtgaatcattggatcagtaaagaactccagaggctagaaagattaattgacagggcgagtgagaaaggttggcgcaaggaaaagtttgaataccttgataagaaacaactcttgcgcaagccatctgaacaacaacgtttacttgaagaggtgcctcaagttattccagagacagaagataataaagatactgaatttcaagttacaggacaagacaaacctattcaaaagagtactgtcgctttacaaggtacatatgtgacaagggcttcttttttgaagagccacacagggaaaaaatccaaaggtactgatggggagagagatctttccttggaaagtttatcggaagaaaaacctgaagttaataaggcccacaccgatggtggtacagctgtaatacacaatcaaaatcggagcactacagctgctattgctgcgctaccaaagtatttgcatcgccatgctgccactgaagccaataatgctggtgatatttcatctgttcaggagctggatggtgaaggtgttaaagctagcacggatgttgatacaactggaacagatgtccagcacgggagcattgaagctactaaagccaacgctgctggtgatgcacctggagcattttttcaaaagcagtgtgctaaagctgctgatgttattaccattgacgacgatgacgaggacaacagtcatcgttgttataaagaagaacaaacagcagtagttgatcttgaagctgattatgctggggataaccatcccgtgcagcttgaggcaaatagtcgaggccataaacacgtgaaggtgaaggagcgcatttggtattacattgatcctcagggtgatgagcaagggccatttacaatgcagcatctgagcatctggtggagcaatggcttcttccccggcgacttcagggtctggagaacaggccaaactagtaatgacgccatcttgctcgtggacgcactgcagatgactaggtaggctagttaggagcctcgtagaagactagatgtatttatgtatcgcggaaaaagcgggggggcttcgaggcagatatatgtgttctgctggggtgtacatccttctgtgttatatgatatgatgatgacatcctatccccaccatcacctcacccaccaatcaaaaacatcttgccaaacaaaacaatggttgtttgatggcaaagaggatttgttgggatgaaatatttgtggactattcagtatccctgtgctgtgacaatgctactgaaaatctggttctttggcatgttaggctgttt

SEQ ID NO: 76506 - DNA, 5850 bp, Zea Mays
gacacctgccacgattcacactcacacacaggtccactgcaggctgcagtgctgcacaccgccgcctggaacgaagcccctcttcggaatccacctacacgccccgtcggcggtccctcgcccgcatcgctagttcggcacacggagtttataaacccctctgcagtctgcacgaataatccccaacccggctctcggctcctctagtccttttctcgcattgcatttactgcggcatctttgcgtcggattcggttcccctcgattcctctcccgttgattgcctcgccgggtccggggtcaccggccggcgggggttgattgggtcggcggttatggggaaaggggcgaggaggcgcagccgtgcgtctggcgccggcgggggtggacacgggagcaagcgcccgcggcgggccgaggaggaggaacaggaggaagaggaaatggaaccgctggtgggggaggaggaggaggtggcggcgctggagggggaggactattgcttcgtctgcaaggacggcggtgacctccgcgtctgcgatttcaggggctgccagaaagcttaccatcctgcttgcgtggggaaagatagcggcttcctcaattcagatgaagaattcatctgtgaatggcatacttgctttatttgtaaagggcgttcacgttattattgcttttgctgtccgtggcaagccttttgtcaaaattgcgtgaaacaagcagaattcgtcccagtcttgaggaagacaaagggattctgcaccaactgtttaaggatggcaatcatgattgagaagaatgttgatgttgactccgatggggagagggttgatttcaatgacagggcaacttatgaatttttattcaaggagtattgggaggagatagttaaaggcaaggagagcatgactctggataagcttgaaaaagcatatgcttttctgaaagaaaaactaaactgcaaacaagatctagatttagaaaaggttcatgatgaagaacacagttcagatgatgattttgtgggcaatagtgatgacgacgatgacaacaagccatcttccacaaccaaatttaatggaacatcgaatacaatgaaattcttcctgagggaagataggccaatgaagaatggctatgtgggctggggttcaaaagagctcatggagttcctttcctctataggcaaagatacattgaattccctagatcaacatggtgctactgaagttgtgaaggtgtacattcaacaaaaaggtctcttagcaagagataagaaaaaacttgtcatatgtgatgacaagctcaagattttgtttaggagatcaaaagtgaggtacaacaggatatatagcttgttaggtaagcatattgctgtgaatatgacatcagaggatgaaacttttgctaactctgatgataacaatgaaacatttgtgagaaagaaagctcgtattgggaactacagttccagtactccaaagtgtactccagaaataaacaagagatgttttgctgctcttgttcgccataacattgatttaatctacttgaagaaatctttggttgtggatctactaagggagccggatacatttggcagcaaagttattggctgttttgtgagaataaagattgatctcaacgattatagtttctacatgcataaaaaggtgcaccaacatagaaagttgtatcagcttggactagtaacaggcaccagtaaatcccctgaagaatacaagataaatgatgtatcaacagatattcttttatgtatttccagcatacctgacatcaaaatttcaagtttgtcagatgaagaatacgaagaggtatgatttactgtgactttgtgtgttccagcagctatagatgggcaggctgtgttagggaacagaggtatacctacacttttttgggaaaaaatgtttattttttatgaaaagtaaatatatatcctatcaaactgcattttttgttattctcattcagaataatagtttcctccatgtatcacttaatattttcccttgcattcataatgttgagcaaaacattctattgtttattataataggaagaatgtcaagaccttcggctgctggccaagaatgaatcctttaaaaggcctactgttgtaagttacccttgctttttgtttcctttaacaaaaatgtttgtggcccagtagcagatgataatgcaagccactgaagttctaatttcaattggcattctttgtgataacaggagaggagttaccaccaataacaataaacaaaacctttgagtttagtcctaaacaagttggggtaggctacactacacatgaaacctaataagaagaaaaaaaactcggtcggtaggggaaagaccgcccccacgacattatattaagaagctcaatcagagccccgaccgagaaaggtcacgaaagctggcctcccgtgcagcatgagggtccgtcctctatagaccaaatctttactcgtgctttgatccctcccagcctctacgcgaggatccgcccccataggccagtccatctcgtgtgcacacaaccaggggaaccagctagtgacctttttttaacctcagcctaaaattcactcccactaaattgggataatcatcttgtatcttgtaattattagaggttatcttagggcacaactccaacggtagcatgtcagctagctcgaagggagctaatgatggattcttgcttttgtggaagaaagagaaagcaaaaaattctccatgctagcaacaaaacaagagctaggatcaattgtgtgtcccaaggaaaacctgacccaacacatgatcaaccctccactgcatctctctccaaaataaagaatgccttttctacctctcactctctctagatgacgactatccactcatccaccattgatcataagaatgtgtgcagagagctgggacctgggagccgctctctagagaagcattagagagggaagcgagctctgcggtggtggtcgtcagtggcacacacacatgtgcggggacgtggtggtgtgagcgtatgatggcggcagatctgatgtggcgtgagcttagtggcgtctcgtgagtgtcttggcatgcgttgtgcaagcacaagacgatagaagctagatgcacacgagccctgcagcccgccacatggagtgagctcggtggcgtcgcgagcgacccaatgtgcggtgggttcttggtgacatctcacgagtgacccggtgcacgatgcgtgagcttaggacaacatatgccagacgcggtgttagccagacgacggtcgcatcgcatgaggacccagtgtggcacgcaagctccgcagcgtctcgcgagcggcctggctctcatgtgaacgacaaagtgagtgcgagcatggcgttcggtgccattggcggagctatcatgcatcatggttgggagatataacgaagataggtgagagaaaggtaagatgtgggacccaccttgaaaagtttgcgctagactactgaggctactggagagtatgactcatgtactcagatgacgtgataatatatgagctagcaggctgactcaaccgttgaggttgcccttatagtttggtgcatacattgaacaacacggtaaagagccacaataacttttacccatctcagttctgacaatcatatcttattagtgatgatctgatgatacaatattgcagcaatttgctatttgtttaaaattgttgaaggaatttgtatttaatgtacacatttttgttcaagagatgtcaagtatatttattagcggttaactgatggtgcaatatcacaacaatactttatttggctaaaattgcttaaggaattggcacttcacatactaatacaagtcagtaacacaaaatgtttggttatatcatgacatgcagtattgttcactggatcattcacaattctgctcttcaactttgacctctagttgcacatttgctctccttttctcaactttgcaccattgctgctactatgtccaagtcaatgcatcattgcccctagttttgccatcaaagaaggcgaaggcaggggcaatggtgcattgacttggtcaaatcaggggggcaatgatgcaaagatgaaaaacctgtatttaaatgtgtaattgcgggtacttaggctatctccagcagaccccttatccaatccaatatattctcccctatttcaaactccactctgcaaacagtatcaaacaatgttatctacagttccgtgtcccctattttaccctatctactggagacagtcttattatgcaattgccccctgaccgtgatgaaattgtcttattgaatcagattgagatcatgcattgttggtgtggcatggcgagtaatcagatggaagcttgtttgttttaattgagtattttttctaactaatgagctaaagttcttgtagttgtcttagcttgctgaattttacagggggatctagaggagaaagcaagaagtttacgtagggagatagtgaatcattggatcagtaaagaactccagaggctagaaagattaattgacagggcgagtgagaaagtttgaataccttgataagaaacaactcttgcgcaagccatctgaacaacaacgtttacttgaagaggtgcctcaagttattccagagacagaagataataaagatactgaatttcaagttacaggacaagacaaacctattcaaaagagtactgtcgctttacaaggtaccaatggagagagcattgtttctttgaaaaaaggctcagaagaaaaatgtacatatgtgacaagggcttcttttttgaagagccacacagggaaaaaatccaaaggtactgatggggagagagatctttccttggaaagtttatcggaagaaaaacctgaagttaataaggcccacaccgatggtggtacagctgtaatacacaatcaaaatcggagcactacagctgctattgctgcgctaccaaagtatttgcatcgccatgctgccactgaagccaataatgctggtgatatttcatctgttcaggagctggatggtgaaggtgttaaagctagcacggatgttgatacaactggaacagatgtccagcacgggagcattgaagctactaaagccaacgctgctggtgatgcacctggagcattttttcaaaagcagtgtgctaaagctgctgatgttattaccattgacgacgatgacgaggacaacagtcatcgttgttataaagaagaacaaacagcagtagttgatcttgaagctgattatgctggggataaccatcccgtgcagcttgaggcaaatagtcgaggccataaacacgtgaaggtgaaggagcgcatttggtattacattgatcctcagggtgatgagcaagggccatttacaatgcagcatctgagcatctggtggagcaatggcttcttccccggcgacttcagggtctggagaacaggccaaactagtaatgacgccatcttgctcgtggacgcactgcagatgactaggtaggctagttaggagcctcgtagaagactagatgtatttatgtatcgcggaaaaagcgggggggcttcgaggcagatatatgtgttctgctggggtgtacatccttctgtgttatatgatatgatgatgacatcctatccccaccatcacctcacccaccaatcaaaaacatcttgccaaacaaaacaatggttgtttgatggcaaagaggatttgttgggatgaaatatttgtggactattcagtatccctgtgctgtgacaatgctactgaaaatctggttctttggcatgttaggctgttt

SEQ ID NO: 76507 - DNA, 5622 bp, Zea Mays
gacacctgccacgattcacactcacacacaggtccactgcaggctgcagtgctgcacaccgccgcctggaacgaagcccctcttcggaatccacctacacgccccgtcggcggtccctcgcccgcatcgctagttcggcacacggagtttataaacccctctgcagtctgcacgaataatccccaacccggctctcggctcctctagtccttttctcgcattgcatttactgcggcatctttgcgtcggattcggttcccctcgattcctctcccgttgattgcctcgccgggtccggggtcaccggccggcgggggttgattgggtcggcggttatggggaaaggggcgaggaggcgcagccgtgcgtctggcgccggcgggggtggacacgggagcaagcgcccgcggcgggccgaggaggaggaacaggaggaagaggaaatggaaccgctggtgggggaggaggaggaggtggcggcgctggagggggaggactattgcttcgtctgcaaggacggcggtgacctccgcgtctgcgatttcaggggctgccagaaagcttaccatcctgcttgcgtggggaaagatagcggcttcctcaattcagatgaagaattcatctgtgaatggcatacttgctttatttgtaaagggcgttcacgttattattgcttttgctgtccgtggcaagccttttgtcaaaattgcgtgaaacaagcagaattcgtcccagtcttgaggaagacaaagggattctgcaccaactgtttaaggatggcaatcatgattgagaagaatgttgatgttgactccgatggggagagggttgatttcaatgacagggcaacttatgaatttttattcaaggagtattgggaggagatagttaaaggcaaggagagcatgactctggataagcttgaaaaagcatatgcttttctgaaagaaaaactaaactgcaaacaagatctagatttagaaaaggttcatgatgaagaacacagttcagatgatgattttgtgggcaatagtgatgacgacgatgacaacaagccatcttccacaaccaaatttaatggaacatcgaatacaatgaaattcttcctgagggaagataggccaatgaagaatggctatgtgggctggggttcaaaagagctcatggagttcctttcctctataggcaaagatacattgaattccctagatcaacatggtgctactgaagttgtgaaggtgtacattcaacaaaaaggtctcttagcaagagataagaaaaaacttgtcatatgtgatgacaagctcaagattttgtttaggagatcaaaagtgaggtacaacaggatatatagcttgttaggtaagcatattgctgtgaatatgacatcagaggatgaaacttttgctaactctgatgataacaatgaaacatttgtgagaaagaaagctcgtattgggaactacagttccagtactccaaagtgtactccagaaataaacaagagatgttttgctgctcttgttcgccataacattgatttaatctacttgaagaaatctttggttgtggatctactaagggagccggatacatttggcagcaaagttattggctgttttgtgagaataaagattgatctcaacgattatagtttctacatgcataaaaaggtgcaccaacatagaaagttgtatcagcttggactagtaacaggcaccagtaaatcccctgaagaatacaagataaatgatgtatcaacagatattcttttatgtatttccagcatacctgacatcaaaatttcaagtttgtcagatgaagaatacgaagaggaagaatgtcaagaccttcggctgctggccaagaatgaatcctttaaaaggcctactgttgtaagttacccttgctttttgtttcctttaacaaaaatgtttgtggcccagtagcagatgataatgcaagccactgaagttctaatttcaattggcattctttgtgataacaggagaggagttaccaccaataacaataaacaaaacctttgagtttagtcctaaacaagttggggtaggctacactacacatgaaacctaataagaagaaaaaaaactcggtcggtaggggaaagaccgcccccacgacattatattaagaagctcaatcagagccccgaccgagaaaggtcacgaaagctggcctcccgtgcagcatgagggtccgtcctctatagaccaaatctttactcgtgctttgatccctcccagcctctacgcgaggatccgcccccataggccagtccatctcgtgtgcacacaaccaggggaaccagctagtgacctttttttaacctcagcctaaaattcactcccactaaattgggataatcatcttgtatcttgtaattattagaggttatcttagggcacaactccaacggtagcatgtcagctagctcgaagggagctaatgatggattcttgcttttgtggaagaaagagaaagcaaaaaattctccatgctagcaacaaaacaagagctaggatcaattgtgtgtcccaaggaaaacctgacccaacacatgatcaaccctccactgcatctctctccaaaataaagaatgccttttctacctctcactctctctagatgacgactatccactcatccaccattgatcataagaatgtgtgcagagagctgggacctgggagccgctctctagagaagcattagagagggaagcgagctctgcggtggtggtcgtcagtggcacacacacatgtgcggggacgtggtggtgtgagcgtatgatggcggcagatctgatgtggcgtgagcttagtggcgtctcgtgagtgtcttggcatgcgttgtgcaagcacaagacgatagaagctagatgcacacgagccctgcagcccgccacatggagtgagctcggtggcgtcgcgagcgacccaatgtgcggtgggttcttggtgacatctcacgagtgacccggtgcacgatgcgtgagcttaggacaacatatgccagacgcggtgttagccagacgacggtcgcatcgcatgaggacccagtgtggcacgcaagctccgcagcgtctcgcgagcggcctggctctcatgtgaacgacaaagtgagtgcgagcatggcgttcggtgccattggcggagctatcatgcatcatggttgggagatataacgaagataggtgagagaaaggtaagatgtgggacccaccttgaaaagtttgcgctagactactgaggctactggagagtatgactcatgtactcagatgacgtgataatatatgagctagcaggctgactcaaccgttgaggttgcccttatagtttggtgcatacattgaacaacacggtaaagagccacaataacttttacccatctcagttctgacaatcatatcttattagtgatgatctgatgatacaatattgcagcaatttgctatttgtttaaaattgttgaaggaatttgtatttaatgtacacatttttgttcaagagatgtcaagtatatttattagcggttaactgatggtgcaatatcacaacaatactttatttggctaaaattgcttaaggaattggcacttcacatactaatacaagtcagtaacacaaaatgtttggttatatcatgacatgcagtattgttcactggatcattcacaattctgctcttcaactttgacctctagttgcacatttgctctccttttctcaactttgcaccattgctgctactatgtccaagtcaatgcatcattgcccctagttttgccatcaaagaaggcgaaggcaggggcaatggtgcattgacttggtcaaatcaggggggcaatgatgcaaagatgaaaaacctgtatttaaatgtgtaattgcgggtacttaggctatctccagcagaccccttatccaatccaatatattctcccctatttcaaactccactctgcaaacagtatcaaacaatgttatctacagttccgtgtcccctattttaccctatctactggagacagtcttattatgcaattgccccctgaccgtgatgaaattgtcttattgaatcagattgagatcatgcattgttggtgtggcatggcgagtaatcagatggaagcttgtttgttttaattgagtattttttctaactaatgagctaaagttcttgtagttgtcttagcttgctgaattttacagggggatctagaggagaaagcaagaagtttacgtagggagatagtgaatcattggatcagtaaagaactccagaggctagaaagattaattgacagggcgagtgagaaaggttggcgcaaggaaaagtttgaataccttgataagaaacaactcttgcgcaagccatctgaacaacaacgtttacttgaagaggtgcctcaagttattccagagacagaagataataaagatactgaatttcaagttacaggacaagacaaacctattcaaaagagtactgtcgctttacaaggtaccaatggagagagcattgtttctttgaaaaaaggctcagaagaaaaatgtacatatgtgacaagggcttcttttttgaagagccacacagggaaaaaatccaaaggtactgatggggagagagatctttccttggaaagtttatcggaagaaaaacctgaagttaataaggcccacaccgatggtggtacagctgtaatacacaatcaaaatcggagcactacagctgctattgctgcgctaccaaagtatttgcatcgccatgctgccactgaagccaataatgctggtgatatttcatctgttcaggagctggatggtgaaggtgttaaagctagcacggatgttgatacaactggaacagatgtccagcacgggagcattgaagctactaaagccaacgctgctggtgatgcacctggagcattttttcaaaagcagtgtgctaaagctgctgatgttattaccattgacgacgatgacgaggacaacagtcatcgttgttataaagaagaacaaacagcagtagttgatcttgaagctgattatgctggggataaccatcccgtgcagcttgaggcaaatagtcgaggccataaacacgtgaaggtgaaggagcgcatttggtattacattgatcctcagggtgatgagcaagggccatttacaatgcagcatctgagcatctggtggagcaatggcttcttccccggcgacttcagggtctggagaacaggccaaactagtaatgacgccatcttgctcgtggacgcactgcagatgactaggtaggctagttaggagcctcgtagaagactagatgtatttatgtatcgcggaaaaagcgggggggcttcgaggcagatatatgtgttctgctggggtgtacatccttctgtgttatatgatatgatgatgacatcctatccccaccatcacctcacccaccaatcaaaaacatcttgccaaacaaaacaatggttgtttgatggcaaagaggatttgttgggatgaaatatttgtggactattcagtatccctgtgctgtgacaatgctactgaaaatctggttctttggcatgttaggctgttt

SEQ ID NO: 76508 - DNA, 3411 bp, Zea Mays
gacacctgccacgattcacactcacacacaggtccactgcaggctgcagtgctgcacaccgccgcctggaacgaagcccctcttcggaatccacctacacgccccgtcggcggtccctcgcccgcatcgctagttcggcacacggagtttataaacccctctgcagtctgcacgaataatccccaacccggctctcggctcctctagtccttttctcgcattgcatttactgcggcatctttgcgtcggattcggttcccctcgattcctctcccgttgattgcctcgccgggtccggggtcaccggccggcgggggttgattgggtcggcggttatggggaaaggggcgaggaggcgcagccgtgcgtctggcgccggcgggggtggacacgggagcaagcgcccgcggcgggccgaggaggaggaacaggaggaagaggaaatggaaccgctggtgggggaggaggaggaggtggcggcgctggagggggaggactattgcttcgtctgcaaggacggcggtgacctccgcgtctgcgatttcaggggctgccagaaagcttaccatcctgcttgcgtggggaaagatagcggcttcctcaattcagatgaagaattcatctgtgaatggcatacttgctttatttgtaaagggcgttcacgttattattgcttttgctgtccgtggcaagccttttgtcaaaattgcgtgaaacaagcagaattcgtcccagtcttgaggaagacaaagggattctgcaccaactgtttaaggatggcaatcatgattgagaagaatgttgatgttgactccgatggggagagggttgatttcaatgacagggcaacttatgaatttttattcaaggagtattgggaggagatagttaaaggcaaggagagcatgactctggataagcttgaaaaagcatatgcttttctgaaagaaaaactaaactgcaaacaagatctagatttagaaaaggttcatgatgaagaacacagttcagatgatgattttgtgggcaatagtgatgacgacgatgacaacaagccatcttccacaaccaaatttaatggaacatcgaatacaatgaaattcttcctgagggaagataggccaatgaagaatggctatgtgggctggggttcaaaagagctcatggagttcctttcctctataggcaaagatacattgaattccctagatcaacatggtgctactgaagttgtgaaggtgtacattcaacaaaaaggtctcttagcaagagataagaaaaaacttgtcatatgtgatgacaagctcaagattttgtttaggagatcaaaagtgaggtacaacaggatatatagcttgttaggtaagcatattgctgtgaatatgacatcagaggatgaaacttttgctaactctgatgataacaatgaaacatttgtgagaaagaaagctcgtattgggaactacagttccagtactccaaagtgtactccagaaataaacaagagatgttttgctgctcttgttcgccataacattgatttaatctacttgaagaaatctttggttgtggatctactaagggagccggatacatttggcagcaaagttattggctgttttgtgagaataaagattgatctcaacgattatagtttctacatgcataaaaaggtgcaccaacatagaaagttgtatcagcttggactagtaacaggcaccagtaaatcccctgaagaatacaagataaatgatgtatcaacagatattcttttatgtatttccagcatacctgacatcaaaatttcaagtttgtcagatgaagaatacgaagaggaagaatgtcaagaccttcggctgctggccaagaatgaatcctttaaaaggcctactgttattgagatcatgcattgttggtgtggcatggcgagtaatcagatggaagcttgtttgttttaattgagtattttttctaactaatgagctaaagttcttgtagttgtcttagcttgctgaattttacagggggatctagaggagaaagcaagaagtttacgtagggagatagtgaatcattggatcagtaaagaactccagaggctagaaagattaattgacagggcgagtgagaaaggttggcgcaaggaaaagtttgaataccttgataagaaacaactcttgcgcaagccatctgaacaacaacgtttacttgaagaggtgcctcaagttattccagagacagaagataataaagatactgaatttcaagttacaggacaagacaaacctattcaaaagagtactgtcgctttacaaggtaccaatggagagagcattgtttctttgaaaaaaggctcagaagaaaaatgtacatatgtgacaagggcttcttttttgaagagccacacagggaaaaaatccaaaggtactgatggggagagagatctttccttggaaagtttatcggaagaaaaacctgaagttaataaggcccacaccgatggtggtacagctgtaatacacaatcaaaatcggagcactacagctgctattgctgcgctaccaaagtatttgcatcgccatgctgccactgaagccaataatgctggtgatatttcatctgttcaggagctggatggtgaaggtgttaaagctagcacggatgttgatacaactggaacagatgtccagcacgggagcattgaagctactaaagccaacgctgctggtgatgcacctggagcattttttcaaaagcagtgtgctaaagctgctgatgttattaccattgacgacgatgacgaggacaacagtcatcgttgttataaagaagaacaaacagcagtagttgatcttgaagctgattatgctggggataaccatcccgtgcagcttgaggcaaatagtcgaggccataaacacgtgaaggtgaaggagcgcatttggtattacattgatcctcagggtgatgagcaagggccatttacaatgcagcatctgagcatctggtggagcaatggcttcttccccggcgacttcagggtctggagaacaggccaaactagtaatgacgccatcttgctcgtggacgcactgcagatgactaggtaggctagttaggagcctcgtagaagactagatgtatttatgtatcgcggaaaaagcgggggggcttcgaggcagatatatgtgttctgctggggtgtacatccttctgtgttatatgatatgatgatgacatcctatccccaccatcacctcacccaccaatcaaaaacatcttgccaaacaaaacaatggttgtttgatggcaaagaggatttgttgggatgaaatatttgtggactattcagtatccctgtgctgtgacaatgctactgaaaatctggttctttggcatgttaggctgttt

SEQ ID NO: 76509 - DNA, 3267 bp, Zea Mays
gacagtctgacacctgccacgattcacactcacacacaggtccactgcaggctgcagtgctgcacaccgccgcctggaacgaagcccctcttcggaatccacctacacgccccgtcggcggtccctcgcccgcatcgctagttcggcacacggagtttataaacccctctgcagtctgcacgaataatccccaacccggctctcggctcctctagtccttttctcgcattgcatttactgcggcatctttgcgtcggattcggttcccctcgattcctctcccgttgattgcctcgccgggtccggggtcaccggccggcgggggttgattgggtcggcggttatggggaaaggggcgaggaggcgcagccgtgcgtctggcgccggcgggggtggacacgggagcaagcgcccgcggcgggccgaggaggaggaacaggaggaagaggaaatggaaccgctggtgggggaggaggaggaggtggcggcgctggagggggaggactattgcttcgtctgcaaggacggcggtgacctccgcgtctgcgatttcaggggctgccagaaagcttaccatcctgcttgcgtggggaaagatagcggcttcctcaattcagatgaagaattcatctgtgaatggcatacttgctttatttgtaaagggcgttcacgttattattgcttttgctgtccgtggcaagccttttgtcaaaattgcgtgaaacaagcagaattcgtcccagtcttgaggaagacaaagggattctgcaccaactgtttaaggatggcaatcatgattgagaagaatgttgatgttgactccgatggggagagggttgatttcaatgacagggcaacttatgaatttttattcaaggagtattgggaggagatagttaaaggcaaggagagcatgactctggataagcttgaaaaagcatatgcttttctgaaagaaaaactaaactgcaaacaagatctagatttagaaaaggttcatgatgaagaacacagttcagatgatgattttgtgggcaatagtgatgacgacgatgacaacaagccatcttccacaaccaaatttaatggaacatcgaatacaatgaaattcttcctgagggaagataggccaatgaagaatggctatgtgggctggggttcaaaagagctcatggagttcctttcctctataggcaaagatacattgaattccctagatcaacatggtgctactgaagttgtgaaggtgtacattcaacaaaaaggtctcttagcaagagataagaaaaaacttgtcatatgtgatgacaagctcaagattttgtttaggagatcaaaagtgaggtacaacaggatatatagcttgttaggtaagcatattgctgtgaatatgacatcagaggatgaaacttttgctaactctgatgataacaatgaaacatttgtgagaaagaaagctcgtattgggaactacagttccagtactccaaagtgtactccagaaataaacaagagatgttttgctgctcttgttcgccataacattgatttaatctacttgaagaaatctttggttgtggatctactaagggagccggatacatttggcagcaaagttattggctgttttgtgagaataaagattgatctcaacgattatagtttctacatgcataaaaaggtgcaccaacatagaaagttgtatcagcttggactagtaacaggcaccagtaaatcccctgaagaatacaagataaatgatgtatcaacagatattcttttatgtatttccagcatacctgacatcaaaatttcaagtttgtcagatgaagaatacgaagaggaagaatgtcaagaccttcggctgctggccaagaatgaatcctttaaaaggcctactgttggggatctagaggagaaagcaagaagtttacgtagggagatagtgaatcattggatcagtaaagaactccagaggctagaaagattaattgacagggcgagtgagaaagtttgaataccttgataagaaacaactcttgcgcaagccatctgaacaacaacgtttacttgaagaggtgcctcaagttattccagagacagaagataataaagatactgaatttcaagttacaggacaagacaaacctattcaaaagagtactgtcgctttacaaggtaccaatggagagagcattgtttctttgaaaaaaggctcagaagaaaaatgtacatatgtgacaagggcttcttttttgaagagccacacagggaaaaaatccaaaggtactgatggggagagagatctttccttggaaagtttatcggaagaaaaacctgaagttaataaggcccacaccgatggtggtacagctgtaatacacaatcaaaatcggagcactacagctgctattgctgcgctaccaaagtatttgcatcgccatgctgccactgaagccaataatgctggtgatatttcatctgttcaggagctggatggtgttaaagctagcacggatgttgatacaactggaacagatgtccagcacgggagcattgaagctactaaagccaacgctgctggtgatgcacctggagcattttttcaaaagcagtgtgctaaagctgctgatgttattaccattgacgacgatgacgaggacaacagtcatcgttgttataaagaagaacaaacagcagtagttgatcttgaagctgattatgctggggataaccatcccgtgcagcttgaggcaaatagtcgaggccataaacacgtgaaggtgaaggagcgcatttggtattacattgatcctcagggtgatgagcaagggccatttacaatgcagcatctgagcatctggtggagcaatggcttcttccccggcgacttcagggtctggagaacaggccaaactagtaatgacgccatcttgctcgtggacgcactgcagatgactaggtaggctagttaggagcctcgtagaagactagatgtatttatgtatcgcggaaaaagcgggggggcttcgaggcagatatatgtgttctgctggggtgtacatccttctgtgttatatgatatgatgatgacatcctatccccaccatcacctcacccaccaatcaaaaacatcttgccaaacaaaacaatggttgtttgatggcaaagaggatttgttgggatgaaatatttgtggactattcagtatccctgtgctgtgacaatgctactgaaaatctggttctttggcatgttaggctgttt

SEQ ID NO: 76510 - DNA, 1329 bp, Zea Mays
cgcgtcgaagtctctgctttcgttcttcttccactccactcctctcctctcttctccttgggatcccgatcccgcttctcctcctgtatatatttctaattctttcctactcaactttactgggatgctccaatcaagtgccaatgcaccacgagcacgcgcaggccaggaagcccgtcgccctctctccgctcagatgacgctaataatggcctcgtcgagcctcgcccgcctcttggtggccttgttgctgacgtcgttagccctccttttgtgtcgatgcgttggtgcacgactatgctggcgaacggttcgcgatcgatggcaatgccttcgtcctctacggcggcagcgagggagtctatgcctccgctaaggcgggcgcgttcatccgatacgtttttgaaaccaccttcgagaaagtcacgttcagaaggatgcccgagtcggcgaccgcgaccgaggaggacggcatctgcacgaccacggtcacaacggtcatcttcaaggccggcgattgcgacaccgttgggggtgcggacgtctccatcgccggcgggcgcgcactctgctgcacgcgggacatggcgaggctcgaggcctgcacagagggggcagtgacgtactgcgcgtggaacggcagcaccggctggcccatggtgctcacggcctccatcctcctgggcggcctcgacgcggctttcccggatgagaccgtcgccgtggcgcgcaccgacatgtacacgctcctgttcgtccactgcaacgcgtcgcttgccgaccagcaagtggccacggtgaaagtcgcctagagaggaggcgaatagggcgaatcttaaatttataaacttaagcacaactacaagccaggttagcgttagaaatatgaacgagtccgggagaaagggcgaaaaacaaatcgcaagcaaataaagagtgagacgcaaggatttgttttaccgaggttcggttcttgcaaacctactccccgttgaggtggtcacaaagaccgggtctctttcaaccatttccctctctcaaacggtcacttagaccgagtgagcttctctttctcaatcaaacgggacacaaagtccccgcaaggaccaccacacaattggtgtctcttgcctcagttacaattgaattgatcacaagaaagaatgagaaaaagaggcaatccaagcgcaagagctcaaatgaacacaagtcactctctcactagtcactatttgattgggaatgatctatggacttgggagaggatttgatctctttggtgtgtattgtattgaattctatagctcttgtaaggtgtaggaagtgtga

SEQ ID NO: 76511 - DNA, 1372 bp, Zea Mays
ctcgatcgtctccttgaatgttcgtccgagatctctctctgccgcgtctacaagcgctccggcatcgacgacacccacgggcagtcatcctccagcacccaattcgcttcctcggcgcggcggacctcgtcccgcactggtgcgccgacggtcattcgtcacggatcgtcgccgtcgccgtcgtcgacgccactgtcaccgacgcagcagctcagcagcttccatctgctccaaggagaatgctcgtctgcgtcaccgccggcgcccatgatggaccaagtggtcaccgtgcacagcgcgccgcagcagcttctgactcacccaagcccatgtacgtacgcgccggcgacaacgatctcaatctcaacagcggaagctgtgccggaatgggcacagggcgcggaggctgcctttgcctcctcgtactcgctcttcaacatggccgccgccgccgggcctatggcggccggcagctcaaggtcgtccgtcgacgagctgagcacgctggttggtcacagccaggcctacgccaacctctcggccgcgacgggcggccacctcctcccattactgacgccgccgccaccgccaatgctacaaacgatgccgcttggtgcgctgccgatcgtggcgccgccatcgtcttcagtcgctgacaagcttagctgggactggaaccagatacctgacacgacaggacgggattacaataacacttctggttttaagtgagcccaaaactcactgttatatatatatatatgttctgaaaacctgccatcagtgtaggttaacatatatacagctcatgcatgtccactagtaaatacgatcaagaatactaataaatgatgaggattatattcagaactactgaagatatgtgatctctaagcataatgggatcactaaaaacaattgcatgcaggtttaactactccttattccatgtgtccctttaacaactagtagtagtattaagagttgctgtattttttaaaaaaatcccaaaaggttttggtaggtttaattttacagttaattaaactactgcaaggagctaagacacatgaaataatgtaaggatgattggacgcagaccgttgcagcagggtttgtttctttctgcatgattgggaggacgacttgcaggggggtggacaaggttagataaaaagcttcgcatatatgcccacaggagtggtgtattctttcagatccagtcttggcatccatggaatgattcatgtgattattgcgacagcttttgttctttacctttgctacagtgtttggtcgtcattgctctttacttggtgctaactgtcacagagtatatattgtttgttccttttcttttctgctgatgctt

SEQ ID NO: 76512 - DNA, 907 bp, Zea Mays
tccaggtttgggtgctgggattctatactcaaaagtagccaagaaaaggaaaacttgtgcctttatggctaccccaacgaaacatgggaagtaactttgccagcagaggaagttcctccagagatccctgaaccagctttgggtataaactttgctagggatggcatgaatgagaaggattggttagcgctagttgctgtccacagcgattcctggttactagcagttgcattctactttgcagcccggtttgggtttgacaaagaggccagacggcggctcttcaacatgataaataacttgcccacgatatttgaagtagtgactggggttgcaaataaacaaaacaaggagaagggccccaatagtaccagcaaaagcaacaaaacaagttcaaaaatgacatcaagacccgagtctcattccaaggcgacaaaagtggcagtgccccctaaggatgacgatgatgagagcggtgaagaatatgaagaggaagagcgtgataacaccttatgtggatcatgtggaacaaatgacggcaaggacgaattctggatctgttgtgatagttgtgagcggtggtaccatgggaagtgtgtcaagatcactcctgcacgtgctgagcacatcaagcactacaaatgcccagattgcaacaacaagagggcaagagcctagcgtcaagccctggtgtgaccctggagtgaaggctgatagaacatattatactcagaggggtagctatacttcaatatgctgatgacaccattatttgtgtaaagcatgatttggagagagcaagggatatgaagtttctgttgtacttatatgaaatgttggtaggcttaaaaatcaattttaatagaagtgaaattgtggtggtaaatgatagaaattggggtcagat

SEQ ID NO: 76513 - DNA, 2230 bp, Zea Mays
aaaataaaacctcacccctccttggtctgcggccctttgtcctgtctcctcccacccttgcctccgagtcacctcctcccttggtctccgccgtcgctgcctccttgccggaaccctaaatggaccccggcgccggcgcacactactccgtccgtaccgcggaggaggttttccgcgacttccgcggccgccgcgcgggcatgatcaaggccctcaccaacgaaaaggaaaacttgtgcctttatggctaccccaacgaaacatgggaagtaactttgccagcagaggaagttcctccagagatccctgaaccagctttgggtataaactttgctagggatggcatgaatgagaaggattggttagcgctagttgctgtccacagcgattcctggttactagcagttgcattctactttgcagcccggtttgggtttgacaaagaggccagacggcggctcttcaacatgataaataacttgcccacgatatttgaagtagtgactggggttgcaaataaacaaaacaaggagaagggccccaatagtaccagcaaaagcaacaaaacaagttcaaaaatgacatcaagacccgagtctcattccaaggcgacaaaagtggcagtgccccctaaggatgacgatgatgagagcggtgaagaatatgaagaggaagagcgtgataacaccttatgtggatcatgtggaacaaatgacggcaaggacgaattctggatctgttgtgatagttgtgagcggtggtaccatgggaagtgtgtcaagatcactcctgcacgtgctgagcacatcaagcactacaaatgcccagattgcaacaacaagagggcaagagcctagcgtcaagccctggtgtgaccctggagtgaagtaagcgtcaaatcattgatgtctgcagatatatgcctacttgtctagcttgtagacttgcttttcatttcgcatgaacgctattgattcactcggttgccctctgcagctcatattgctcgggcttaattgtgtttaatgttttataagcggttgttgttgtagtaccaggcagtcttgcagacatgtgatagacgtttttggactcggcttaactgaccgttctacattgctagtctagtactctagtttcagttgatcgttgccatttgacttttcacaatggcataggtgtttcgatttttgactgaccatgtttaggttttaatcctcaaacctttgatcgattgctttgttcaaagccaatatatgtcaaaattatacttctgcaattttgtttaatcactggacaggatatttaagattttgtgagctaagaataagagcaactaaaaactttttatacctcctgctgtacggtacaaatagagatttgattaaaagaatcccctttagtaacactttttaggtactctcttcaatatcttttagaggcacattatatctagatttatcttgttcttcattaatattgcatcttaaaagagtgtcttgcaatcttctcaactggctttgcaactcctgctcttcattgttttcaatcagttgaggaaacttatcctttggaggcacatcccacacatttatcatgccagagtcttgtatatttgccatttttaatcaccatactcttgccattcatataaatttgtttgactttcagaagattattccatacaggtgaatcttattgtttttcttaagctgtactttacctctgttttaaatacttctttctgacaatttcctgtcagatttcagtgtcattttcaatcttccaccgccatttgcaaagaggactaatgttcattcttttcaaatctttgatcctcagacccccttctcaaaggtgtaaagatgttaagcaggggggcctattatccctagtcttgtttaattttgttgatgactggcttgactagaatggttgtcaaggcacaacataatggtttcaaaatcatttttttctctggcatggttgtcaagacccattatccttagtcttgtttcataatggtttcagggctgatagaacatattatactcagaggggtagctatacttcaatatgctgatgacaccattatttgtgtaaagcatgatttggagagagcaagggatatgaagtttctgttgtacttatatgaaatgttggtaggcttaaaaatcaattttaatagaagtgaaattgtggtggtaaatgatagaaattggggtcagat

SEQ ID NO: 76514 - DNA, 2266 bp, Zea Mays
ctcaaaataaaacctcacccctccttggtctgcggccctttgtcctgtctcctcccacccttgcctccgagtcacctcctcccttggtctccgccgtcgctgcctccttgccggaaccctaaatggaccccggcgccggcgcacactactccgtccgtaccgcggaggaggttttccgcgacttccgcggccgccgcgcgggcatgatcaaggccctcaccaacgatgtggagaagttctaccagctgtgtgaccccgaaaaggaaaacttgtgcctttatggctaccccaacgaaacatgggaagtaactttgccagcagaggaagttcctccagagatccctgaaccagctttgggtataaactttgctagggatggcatgaatgagaaggattggttagcgctagttgctgtccacagcgattcctggttactagcagttgcattctactttgcagcccggtttgggtttgacaaagaggccagacggcggctcttcaacatgataaataacttgcccacgatatttgaagtagtgactggggttgcaaataaacaaaacaaggagaagggccccaatagtaccagcaaaagcaacaaaacaagttcaaaaatgacatcaagacccgagtctcattccaaggcgacaaaagtggcagtgccccctaaggatgacgatgatgagagcggtgaagaatatgaagaggaagagcgtgataacaccttatgtggatcatgtggaacaaatgacggcaaggacgaattctggatctgttgtgatagttgtgagcggtggtaccatgggaagtgtgtcaagatcactcctgcacgtgctgagcacatcaagcactacaaatgcccagattgcaacaacaagagggcaagagcctagcgtcaagccctggtgtgaccctggagtgaagtaagcgtcaaatcattgatgtctgcagatatatgcctacttgtctagcttgtagacttgcttttcatttcgcatgaacgctattgattcactcggttgccctctgcagctcatattgctcgggcttaattgtgtttaatgttttataagcggttgttgttgtagtaccaggcagtcttgcagacatgtgatagacgtttttggactcggcttaactgaccgttctacattgctagtctagtactctagtttcagttgatcgttgccatttgacttttcacaatggcataggtgtttcgatttttgactgaccatgtttaggttttaatcctcaaacctttgatcgattgctttgttcaaagccaatatatgtcaaaattatacttctgcaattttgtttaatcactggacaggatatttaagattttgtgagctaagaataagagcaactaaaaactttttatacctcctgctgtacggtacaaatagagatttgattaaaagaatcccctttagtaacactttttaggtactctcttcaatatcttttagaggcacattatatctagatttatcttgttcttcattaatattgcatcttaaaagagtgtcttgcaatcttctcaactggctttgcaactcctgctcttcattgttttcaatcagttgaggaaacttatcctttggaggcacatcccacacatttatcatgccagagtcttgtatatttgccatttttaatcaccatactcttgccattcatataaatttgtttgactttcagaagattattccatacaggtgaatcttattgtttttcttaagctgtactttacctctgttttaaatacttctttctgacaatttcctgtcagatttcagtgtcattttcaatcttccaccgccatttgcaaagaggactaatgttcattcttttcaaatctttgatcctcagacccccttctcaaaggtgtaaagatgttaagcaggggggcctattatccctagtcttgtttaattttgttgatgactggcttgactagaatggttgtcaaggcacaacataatggtttcaaaatcatttttttctctggcatggttgtcaagacccattatccttagtcttgtttcataatggtttcagggctgatagaacatattatactcagaggggtagctatacttcaatatgctgatgacaccattatttgtgtaaagcatgatttggagagagcaagggatatgaagtttctgttgtacttatatgaaatgttggtaggcttaaaaatcaattttaatagaagtgaaattgtggtggtaaatgatagaaattggggtcagat

SEQ ID NO: 76515 - DNA, 1600 bp, Zea Mays
ctcaaaataaaacctcacccctccttggtctgcggccctttgtcctgtctcctcccacccttgcctccgagtcacctcctcccttggtctccgccgtcgctgcctccttgccggaaccctaaatggaccccggcgccggcgcacactactccgtccgtaccgcggaggaggttttccgcgacttccgcggccgccgcgcgggcatgatcaaggccctcaccaacgatgtggagaagttctaccagctgtgtgaccccgaaaaggaaaacttgtgcctttatggctaccccaacgaaacatgggaagtaactttgccagcagaggaagttcctccagagatccctgaaccagctttgggtataaactttgctagggatggcatgaatgagaaggattggttagcgctagttgctgtccacagcgattcctggttactagcagttgcattctactttgcagcccggtttgggtttgacaaagaggccagacggcggctcttcaacatgataaataacttgcccacgatatttgaagtagtgactggggttgcaaataaacaaaacaaggagaagggccccaatagtaccagcaaaagcaacaaaacaagttcaaaaatgacatcaagacccgagtctcattccaaggcgacaaaagtggcagtgccccctaaggatgacgatgatgagagcggtgaagaatatgaagaggaagagcgtgataacaccttatgtggatcatgtggaacaaatgacggcaaggacgaattctggatctgttgtgatagttgtgagcggtggtaccatgggaagtgtgtcaagatcactcctgcacgtgctgagcacatcaagcactacaaatgcccagattgcaacaacaagagggcaagagcctagcgtcaagccctggtgtgaccctggagtgaattgaggaaacttatcctttggaggcacatcccacacatttatcatgccagagtcttgtatatttgccatttttaatcaccatactcttgccattcatataaatttgtttgactttcagaagattattccatacaggtgaatcttattgtttttcttaagctgtactttacctctgttttaaatacttctttctgacaatttcctgtcagatttcagtgtcattttcaatcttccaccgccatttgcaaagaggactaatgttcattcttttcaaatctttgatcctcagacccccttctcaaaggtgtaaagatgttaagcaggggggcctattatccctagtcttgtttaattttgttgatgactggcttgactagaatggttgtcaaggcacaacataatggtttcaaaatcatttttttctctggcatggttgtcaagacccattatccttagtcttgtttcataatggtttcagggctgatagaacatattatactcagaggggtagctatacttcaatatgctgatgacaccattatttgtgtaaagcatgatttggagagagcaagggatatgaagtttctgttgtacttatatgaaatgttggtaggcttaaaaatcaattttaatagaagtgaaattgtggtggtaaatgatagaaattggggtcagat

SEQ ID NO: 76516 - DNA, 1311 bp, Zea Mays
ctcaaaataaaacctcacccctccttggtctgcggccctttgtcctgtctcctcccacccttgcctccgagtcacctcctcccttggtctccgccgtcgctgcctccttgccggaaccctaaatggaccccggcgccggcgcacactactccgtccgtaccgcggaggaggttttccgcgacttccgcggccgccgcgcgggcatgatcaaggccctcaccaacgatgtggagaagttctaccagctgtgtgaccccgaaaaggaaaacttgtgcctttatggctaccccaacgaaacatgggaagtaactttgccagcagaggaagttcctccagagatccctgaaccagctttgggtataaactttgctagggatggcatgaatgagaaggattggttagcgctagttgctgtccacagcgattcctggttactagcagttgcattctactttgcagcccggtttgggtttgacaaagaggccagacggcggctcttcaacatgataaataacttgcccacgatatttgaagtagtgactggggttgcaaataaacaaaacaaggagaagggccccaatagtaccagcaaaagcaacaaaacaagttcaaaaatgacatcaagacccgagtctcattccaaggcgacaaaagtggcagtgccccctaaggatgacgatgatgagagcggtgaagaatatgaagaggaagagcgtgataacaccttatgtggatcatgtggaacaaatgacggcaaggacgaattctggatctgttgtgatagttgtgagcggtggtaccatgggaagtgtgtcaagatcactcctgcacgtgctgagcacatcaagcactacaaatgcccagattgcaacaacaagagggcaagagcctagcgtcaagccctggtgtgaccctggagtgaaacccccttctcaaaggtgtaaagatgttaagcaggggggcctattatccctagtcttgtttaattttgttgatgactggcttgactagaatggttgtcaaggcacaacataatggtttcaaaatcatttttttctctggcatggttgtcaagacccattatccttagtcttgtttcataatggtttcagggctgatagaacatattatactcagaggggtagctatacttcaatatgctgatgacaccattatttgtgtaaagcatgatttggagagagcaagggatatgaagtttctgttgtacttatatgaaatgttggtaggcttaaaaatcaattttaatagaagtgaaattgtggtggtaaatgatagaaattggggtcagat

SEQ ID NO: 76517 - DNA, 1128 bp, Zea Mays
ctttctctcaaaataaaacctcacccctccttggtctgcggccctttgtcctgtctcctcccacccttgcctccgagtcacctcctcccttggtctccgccgtcgctgcctccttgccggaaccctaaatggaccccggcgccggcgcacactactccgtccgtaccgcggaggaggttttccgcgacttccgcggccgccgcgcgggcatgatcaaggccctcaccaacgatgtggagaagttctaccagctgtgtgaccccgaaaaggaaaacttgtgcctttatggctaccccaacgaaacatgggaagtaactttgccagcagaggaagttcctccagagatccctgaaccagctttgggtataaactttgctagggatggcatgaatgagaaggattggttagcgctagttgctgtccacagcgattcctggttactagcagttgcattctactttgcagcccggtttgggtttgacaaagaggccagacggcggctcttcaacatgataaataacttgcccacgatatttgaagtagtgactggggttgcaaataaacaaaacaaggagaagggccccaatagtaccagcaaaagcaacaaaacaagttcaaaaatgacatcaagacccgagtctcattccaaggcgacaaaagtggcagtgccccctaaggatgacgatgatgagagcggtgaagaatatgaagaggaagagcgtgataacaccttatgtggatcatgtggaacaaatgacggcaaggacgaattctggatctgttgtgatagttgtgagcggtggtaccatgggaagtgtgtcaagatcactcctgcacgtgctgagcacatcaagcactacaaatgcccagattgcaacaacaagagggcaagagcctagcgtcaagccctggtgtgaccctggagtgaaggctgatagaacatattatactcagaggggtagctatacttcaatatgctgatgacaccattatttgtgtaaagcatgatttggagagagcaagggatatgaagtttctgttgtacttatatgaaatgttggtaggcttaaaaatcaattttaatagaagtgaaattgtggtggtaaatgatagaaattggggtcagat

SEQ ID NO: 76518 - DNA, 523 bp, Zea Mays
aaaataaaacctcacccctccttggtctgcggccctttgtcctgtctcctcccacccttgcctccgagtcacctcctcccttggtctccgccgtcgctgcctccttgccggaaccctaaatggaccccggcgccggcgcacactactccgtccgtaccgcggaggaggttttccgcgacttccgcggccgccgcgcgggcatgatcaaggccctcaccaacgatgtggagaagttctaccagctgtgtgaccccgaaaaggaaaacttgtgcctttatggctaccccaacgaaacatgggaagtaactttgccagcagaggaagttcctccagagatccctgaaccagctttgggtataaactttgctagggatggcatgaatgagaaggattggttagcgctagttgctgtccacagcgattcctggttactagcagttgcattctactttgcagcccggtttgggtttgacaaagaggccagcctacattttcacaaattcctctacaagttagtattgac

SEQ ID NO: 76519 - DNA, 709 bp, Zea Mays
cttcgatgcgaaccagccgcgtccgacccgtcgccacgggctactactactacaaaagccaaggccaaacaggcacggcaagtcggcaaccaccgcaccaccagcgccaggccgccaagcgccagcaccaccgcgccgcgcccaagcaggcaagcaccactgacccaccaggccaccaccccaccgcttcgagccgagggagaaggcggcgcggggcggcgcgctcaggtcggagatgaggggcggatccagacgggcctcggtcgccctgtttctcctcgctgcgtccgggatctgtgcccagttcaccgcagtgctagctggtgatcctcaaacattcaatgacgataagaaggctgaagctcagcccaagggccatactgaagaagaaaagggaggaacaacatgcacgtctactaaagctatttgaagaggatgatgacattgaggttgagcttggtcttagagactgataatcttcaatgtacagcaagagtatctcggctgaccaggttttgctggcttgccttcagagcattttcacgttaatgtaaagaatttgttgtatttaaacttggtagacccccacaagaaagttctgttgtacttccactttatatgaacatctctgcgtgcagggtgtgcttgagaatagctctaaggaggaagtatcaagtcatttttatgtcgatcgactcggtcgggcgag

SEQ ID NO: 76520 - DNA, 1924 bp, Zea Mays
agtttttttagaaaccactctcatcctctcgcaccgcaccgttcgcttcctttcgtcaactccactcctcttggccgccgcattacctcctcttcgccgctgccgccaccgctccaccgggcagccagccagccatggatgaggagtacgacgtgatcgtgcttggcacggggctcaaggagtgcatcctcagtggtctcctttccgtcgacggcctcaagaaacgactactatggaggagattccacctcgctcaaccttaatcagctctggaagaggtttagaggggaagacaagcccccagcacatctaggtgcaagcagagactacaatgtggacatggtgccaaagtttatgatggcaaatgggacattggttcgaaccctcatccacactgatgtgacaaagtacttgtcattcaaagctgttgatgggagctatgttttcagcaaagggaagatttacaaggtccctgccactgatatggaggctctgaagtcccctttgatgggtctattcgagaagcgcagagcaaggaacttcttcatttatgtccaagattacaatgaagctgatccaaggacacatcaaggattagaccttactagggtgacaactagagaacttatagcaaaatatggtttaagtgatgatacagtggatttcattggacatgcacttgctcttcatagagatgatcgctatcttgatgaaccggcacttgatacagtgaaaaggatgaaactatattcagagtctcttgcgcgctttcaaggaggctcgccatatatctatccattgtatggtctgggtgagctaccacagggttttgcacgattgagtgctgtttatggtggtacttacatgttaaacaagccagagtgcaaggttgaattcgatatggaggggaaagtgtgtggtgtcacatctgaaggtgaaactgcaaagtgcaagaaggtggtctgtgatccttcgtatttaccaaacaaggttaggaagattggtagagttgttcgtgcaattgctatcatgagccacccaatccctaatacaaatgagtcccactcggttcaaattattttgcctcagaaacaacttggacgtagatcagacatgtatgttttctgttgttcatacacgcacaatgttgcgccaagagggaagttcattgcatttgtgtctgcagaagcagagactgataacccgcaatctgagctaaagcctggaattgatctacttggttctgtggatgagatattatatgatatttatgacagatatgaaccagtgaatgaaccatctcttgataattgctttgtcacaacgagctatgacgccaccacacattttgagacaactgtaacagatgtcctgaacatgtatacaatgatcactggaaagactgtggatcttagtgtggatttgagtgcagctagtgctgctgaagaatactgatttcagtcataatgtttatcaaagatcacatcattggggacagcacatgaccaaacttcaatgagtggctagtatgagtttagtcggttccagattataccatgccgacttctactgtacctcgtgaatcgtgatgtctattgggcacttgttgctgacagaactgtgcacaatgttgatccaatttgatggatggtggtggttctgttatttactagtcggtcaaaacactaaacggtggccatcatggctgtgtgatgtatcataactgttcagtaaatttgtgttcttctgcccggagttctgctcgatgctattgcgggcggcccgaggtgcttgctctactgtgaatgaatgaagtttgtcacgcatcgtgttcgattttttttaccaaagatcttttctggtctgatgtgccagactatggcctttggagatatataaaagttctggtgttgctggtgctggc

SEQ ID NO: 76521 - DNA, 1744 bp, Zea Mays
atggacgaggagtacgacgtgatcgttctgggcacggggctcaaggagtgcatcctcagcggtctcctctctgtcgacggcctcaaggttctacacatggatagaaatgattactacggaggagattccacctccctaaacctgaaccagctctggaagaggtttaggggggaagacaagccaccggcacatctaggtgcaagcagagattacaatgtagacatggttccaaagtttatgatggcaaatgggacattggttcgaaccctcatccacactgatgtgacaaagtacttgtcattcaaagctgttgatgggagctatgttttcagcaaagggaagatttacaaggtccctgccactgatatggaggctctgaagtcccctttgatgggtctattcgagaagcgcagagcaaggaacttcttcatttatgtccaagattacaatgaagctgatccaaggacacatcaaggattagaccttactagggtgacaactagagaacttatagcaaaatatggtttaagtgatgatacagtggatttcattggacatgcacttgctcttcatagagatgatcgctatcttgatgaaccggcacttgatacagtgaaaaggatgaaactatattcagagtctcttgcgcgctttcaaggaggctcgccatatatctatccattgtatggtctgggtgagctaccacaggttgaattcgatatggaggggaaagtgtgtggtgtcacatctgaaggtgaaactgcaaagtgcaagaaggtggtctgtgatccttcgtatttaccaaacaaggttaggaagattggtagagttgttcgtgcaattgctatcatgagccacccaatccctaatacaaatgagtcccactcggttcaaattattttgcctcagaaacaacttggacgtagatcagacatgtatgttttctgttgttcatacacgcacaatgttgcgccaagagggaagttcattgcatttgtgtctgcagaagcagagactgataacccgcaatctgagctaaagcctggaattgatctacttggttctgtggatgagatattatatgatatttatgacagatatgaaccagtgaatgaaccatctcttgataattgctttgtcacaacgagctatgacgccaccacacattttgagacaactgtaacagatgtcctgaacatgtatacaatgatcactggaaagactgtggatcttagtgtggatttgagtgcagctagtgctgctgaagaatactgatttcagtcataatgtttatcaaagatcacatcattggggacagcacatgaccaaacttcaatgagtggctagtatgagtttagtcggttccagattataccatgccgacttctactgtacctcgtgaatcgtgatgtctattgggcacttgttgctgacagaactgtgcacaatgttgatccaatttgatggatggtggtggttctgttatttactagtcggtcaaaacactaaacggtggccatcatggctgtgtgatgtatcataactgttcagtaaatttgtgttcttctgcccggagttctgctcgatgctattgcgggcggcccgaggtgcttgctctactgtgaatgaatgaagtttgtcacgcatcgtgttcgattttttttaccaaagatcttttctggtctgatgtgccagactatggcctttggagatatataaaagttctggtgttgctggtgctggc

SEQ ID NO: 76522 - DNA, 1774 bp, Zea Mays
atggacgaggagtacgacgtgatcgttctgggcacggggctcaaggagtgcatcctcagcggtctcctctctgtcgacggcctcaaggttctacacatggatagaaatgattactacggaggagattccacctccctaaacctgaaccagctctggaagaggtttaggggggaagacaagccaccggcacatctaggtgcaagcagagattacaatgtagacatggttccaaagtttatgatggcaaatgggacattggttcgaaccctcatccacactgatgtgacaaagtacttgtcattcaaagctgttgatgggagctatgttttcagcaaagggaagatttacaaggtccctgccactgatatggaggctctgaagtcccctttgatgggtctattcgagaagcgcagagcaaggaacttcttcatttatgtccaagattacaatgaagctgatccaaggacacatcaaggattagaccttactaggaaaatatggtttaagtgatgatacagtggatttcattggacatgcacttgctcttcatagagatgatcgctatcttgatgaaccggcacttgatacagtgaaaaggatgaaaagtctcttgcgcgctttcaaggaggctcgccatatatctatccattgtatggtctgggtgagctaccacagggttttgcacgattgagtgctgtttatggtggtacttacatgttaaacaagccagagtgcaaggttgaattcgatatggaggggaaagtgtgtggtgtcacatctgaaggtgaaactgcaaagtgcaagaaggtggtctgtgatccttcgtatttaccaaacaaggttaggaagattggtagagttgttcgtgcaattgctatcatgagccacccaatccctaatacaaatgagtcccactcggttcaaattattttgcctcagaaacaacttggacgtagatcagacatgtatgttttctgttgttcatacacgcacaatgttgcgccaagagggaagttcattgcatttgtgtctgcagaagcagagactgataacccgcaatctgagctaaagcctggaattgatctacttggttctgtggatgagatattatatgatatttatgacagatatgaaccagtgaatgaaccatctcttgataattgctttgtcacaacgagctatgacgccaccacacattttgagacaactgtaacagatgtcctgaacatgtatacaatgatcactggaaagactgtggatcttagtgtggatttgagtgcagctagtgctgctgaagaatactgatttcagtcataatgtttatcaaagatcacatcattggggacagcacatgaccaaacttcaatgagtggctagtatgagtttagtcggttccagattataccatgccgacttctactgtacctcgtgaatcgtgatgtctattgggcacttgttgctgacagaactgtgcacaatgttgatccaatttgatggatggtggtggttctgttatttactagtcggtcaaaacactaaacggtggccatcatggctgtgtgatgtatcataactgttcagtaaatttgtgttcttctgcccggagttctgctcgatgctattgcgggcggcccgaggtgcttgctctactgtgaatgaatgaagtttgtcacgcatcgtgttcgattttttttaccaaagatcttttctggtctgatgtgccagactatggcctttggagatatataaaagttctggtgttgctggtgctggc

SEQ ID NO: 76523 - DNA, 1833 bp, Zea Mays
ttcaactcgactccagcatccctcgtccccgcatcaccgcgccgccgacactccgctcgctttcgctcccgagacccgggcctgccgagccgccgccatggacgaggagtacgacgtgatcgttctgggcacggggctcaaggagtgcatcctcagcggtctcctctctgtcgacggcctcaaggttctacacatggatagaaatgattactacggaggagattccacctccctaaacctgaaccagctctggaagaggtttaggggggaagacaagccaccggcacatctaggtgcaagcagagattacaatgtagacatggttccaaagtttatgatggcaaatgggacattggttcgaaccctcatccacactgatgtgacaaagtacttgtcattcaaagctgttgatgggagctatgttttcagcaaagggaagatttacaaggtccctgccactgatatggaggctctgaagtcccctttgatgggtctattcgagaagcgcagagcaaggaacttcttcatttatgtccaagattacaatgaagctgatccaaggacacatcaaggattagaccttactagggtgacaactagagaacttatagcaaaatatggtttaagtgatgatacagtggatttcattggacatgcacttgctcttcatagagatgatcgctatcttgatgaaccggcacttgatacagtgaaaaggatgaaactatattcagagtctcttgcgcgctttcaaggaggctcgccatatatctatccattgtatggtctgggtgagctaccacagggttttgcacgattgagtgctgtttatggtggtacttacatgttaaacaagccagagtgcaaggttgaattcgatatggaggggaaagtgtgtggtgtcacatctgaaggtgaaactgcaaagtgcaagaaggtggtctgtgatccttcgtatttaccaaacaaggttaggaagattggtagagttgttcgtgcaattgctatcatgagccacccaatccctaatacaaatgagtcccactcggttcaaattattttgcctcagaaacaacttggacgtagatcagacataagcagagactgataacccgcaatctgagctaaagcctggaattgatctacttggttctgtggatgagatattatatgatatttatgacagatatgaaccagtgaatgaaccatctcttgataattgctttgtcacaacgagctatgacgccaccacacattttgagacaactgtaacagatgtcctgaacatgtatacaatgatcactggaaagactgtggatcttagtgtggatttgagtgcagctagtgctgctgaagaatactgatttcagtcataatgtttatcaaagatcacatcattggggacagcacatgaccaaacttcaatgagtggctagtatgagtttagtcggttccagattataccatgccgacttctactgtacctcgtgaatcgtgatgtctattgggcacttgttgctgacagaactgtgcacaatgttgatccaatttgatggatggtggtggttctgttatttactagtcggtcaaaacactaaacggtggccatcatggctgtgtgatgtatcataactgttcagtaaatttgtgttcttctgcccggagttctgctcgatgctattgcgggcggcccgaggtgcttgctctactgtgaatgaatgaagtttgtcacgcatcgtgttcgattttttttaccaaagatcttttctggtctgatgtgccagactatggcctttggagatatataaaagttctggtgttgctggtgctggc

SEQ ID NO: 76524 - DNA, 1719 bp, Zea Mays
taccctcccacctgcgagactgcaacgccgttgcttcaactcgactccagcatccctcgtccccgcatcaccgcgccgccgacactccgctcgctttcgctcccgagacccgggcctgccgagccgccgccatggacgaggagtacgacgtgatcgttctgggcacggggctcaaggagtgcatcctcagcggtctcctctctgtcgacggcctcaaggttctacacatggatagaaatgattactacggaggagattccacctccctaaacctgaaccagctctggaagaggtttaggggggaagacaagccaccggcacatctaggtgcaagcagagattacaatgtagacatggttccaaagtttatgatggcaaatgggacattggttcgaaccctcatccacactgatgtgacaaagtacttgtcattcaaagctgttgatgggagctatgttttcagcaaagggaagatttacaaggtccctgccactgatatggaggctctgaagtcccctttgatgggtctattcgagaagcgcagagcaaggaacttcttcatttatgtccaagattacaatgaagctgatccaaggacacatcaaggattagaccttactaggaaaatatggtttaagtgatgatacagtggatttcattggacatgcacttgctcttcatagagatgatcgctatcttgatgaaccggcacttgatacagtgaaaaggatgaaactatattcagagtctcttgcgcgctttcaaggaggctcgccatatatctatccattgtatggtctgggtgagctaccacagggttttgcacgattgagtgctgtttatggtggtacttacatgttaaacaagccagagtgcaaggttgaattcgatatggaggggaaagtgtgtggtgtcacatctgaaggtgaaactgcaaagtgcaagaaggtggtctgtgatccttcgtatttaccaaacaagaagcagagactgataacccgcaatctgagctaaagcctggaattgatctacttggttctgtggatgagatattatatgatatttatgacagatatgaaccagtgaatgaaccatctcttgataattgctttgtcacaacgagctatgacgccaccacacattttgagacaactgtaacagatgtcctgaacatgtatacaatgatcactggaaagactgtggatcttagtgtggatttgagtgcagctagtgctgctgaagaatactgatttcagtcataatgtttatcaaagatcacatcattggggacagcacatgaccaaacttcaatgagtggctagtatgagtttagtcggttccagattataccatgccgacttctactgtacctcgtgaatcgtgatgtctattgggcacttgttgctgacagaactgtgcacaatgttgatccaatttgatggatggtggtggttctgttatttactagtcggtcaaaacactaaacggtggccatcatggctgtgtgatgtatcataactgttcagtaaatttgtgttcttctgcccggagttctgctcgatgctattgcgggcggcccgaggtgcttgctctactgtgaatgaatgaagtttgtcacgcatcgtgttcgattttttttaccaaagatcttttctggtctgatgtgccagactatggcctttggagatatataaaagttctggtgttgctggtgctggc

SEQ ID NO: 76525 - DNA, 1991 bp, Zea Mays
aagactgcgcagtccgcaccgtgttccgcaccccacggcaggcgcttgagagtacttgactactaccctcccacctgcgagactgcaacgccgttgcttcaactcgactccagcatccctcgtccccgcatcaccgcgccgccgacactccgctcgctttcgctcccgagacccgggcctgccgagccgccgccatggacgaggagtacgacgtgatcgttctgggcacggggctcaaggagtgcatcctcagcggtctcctctctgtcgacggcctcaaggttctacacatggatagaaatgattactacggaggagattccacctccctaaacctgaaccagctctggaagaggtttaggggggaagacaagccaccggcacatctaggtgcaagcagagattacaatgtagacatggttccaaagtttatgatggcaaatgggacattggttcgaaccctcatccacactgatgtgacaaagtacttgtcattcaaagctgttgatgggagctatgttttcagcaaagggaagatttacaaggtccctgccactgatatggaggctctgaagtcccctttgatgggtctattcgagaagcgcagagcaaggaacttcttcatttatgtccaagattacaatgaagctgatccaaggacacatcaaggattagaccttactagggtgacaactagagaacttatagcaaaatatggtttaagtgatgatacagtggatttcattggacatgcacttgctcttcatagagatgatcgctatcttgatgaaccggcacttgatacagtgaaaaggatgaaaagtctcttgcgcgctttcaaggaggctcgccatatatctatccattgtatggtctgggtgagctaccacagggttttgcacgattgagtgctgtttatggtggtacttacatgttaaacaagccagagtgcaaggttgaattcgatatggaggggaaagtgtgtggtgtcacatctgaaggtgaaactgcaaagtgcaagaaggtggtctgtgatccttcgtatttaccaaacaaggttaggaagattggtagagttgttcgtgcaattgctatcatgagccacccaatccctaatacaaatgagtcccactcggttcaaattattttgcctcagaaacaacttggacgtagatcagacatgtatgttttctgttgttcatacacgcacaatgttgcgccaagagggaagttcattgcatttgtgtctgcagaagcagagactgataacccgcaatctgagctaaagcctggaattgatctacttggttctgtggatgagatattatatgatatttatgacagatatgaaccagtgaatgaaccatctcttgataattgctttgtcacaacgagctatgacgccaccacacattttgagacaactgtaacagatgtcctgaacatgtatacaatgatcactggaaagactgtggatcttagtgtggatttgagtgcagctagtgctgctgaagaatactgatttcagtcataatgtttatcaaagatcacatcattggggacagcacatgaccaaacttcaatgagtggctagtatgagtttagtcggttccagattataccatgccgacttctactgtacctcgtgaatcgtgatgtctattgggcacttgttgctgacagaactgtgcacaatgttgatccaatttgatggatggtggtggttctgttatttactagtcggtcaaaacactaaacggtggccatcatggctgtgtgatgtatcataactgttcagtaaatttgtgttcttctgcccggagttctgctcgatgctattgcgggcggcccgaggtgcttgctctactgtgaatgaatgaagtttgtcacgcatcgtgttcgattttttttaccaaagatcttttctggtctgatgtgccagactatggcctttggagatatataaaagttctggtgttgctggtgctggc

SEQ ID NO: 76526 - DNA, 1998 bp, Zea Mays
ctacctgtttgcaaaacggcaagactgcgcagtccgcaccgtgttccgcaccccacggcaggcgcttgagagtacttgactactaccctcccacctgcgagactgcaacgccgttgcttcaactcgactccagcatccctcgtccccgcatcaccgcgccgccgacactccgctcgctttcgctcccgagacccgggcctgccgagccgccgccatggacgaggagtacgacgtgatcgttctgggcacggggctcaaggagtgcatcctcagcggtctcctctctgtcgacggcctcaaggttctacacatggatagaaatgattactacggaggagattccacctccctaaacctgaaccagctctggaagaggtttaggggggaagacaagccaccggcacatctaggtgcaagcagagattacaatgtagacatggttccaaagtttatgatggcaaatgggacattggttcgaaccctcatccacactgatgtgacaaagtacttgtcattcaaagctgttgatgggagctatgttttcagcaaagggaagatttacaaggtccctgccactgatatggaggctctgaagtcccctttgatgggtctattcgagaagcgcagagcaaggaacttcttcatttatgtccaagattacaatgaagctgatccaaggacacatcaaggattagaccttactaggaaaatatggtttaagtgatgatacagtggatttcattggacatgcacttgctcttcatagagatgatcgctatcttgatgaaccggcacttgatacagtgaaaaggatgaaactatattcagagtctcttgcgcgctttcaaggaggctcgccatatatctatccattgtatggtctgggtgagctaccacagggttttgcacgattgagtgctgtttatggtggtacttacatgttaaacaagccagagtgcaaggttgaattcgatatggaggggaaagtgtgtggtgtcacatctgaaggtgaaactgcaaagtgcaagaaggtggtctgtgatccttcgtatttaccaaacaaggttaggaagattggtagagttgttcgtgcaattgctatcatgagccacccaatccctaatacaaatgagtcccactcggttcaaattattttgcctcagaaacaacttggacgtagatcagacatgtatgttttctgttgttcatacacgcacaatgttgcgccaagagggaagttcattgcatttgtgtctgcagaagcagagactgataacccgcaatctgagctaaagcctggaattgatctacttggttctgtggatgagatattatatgatatttatgacagatatgaaccagtgaatgaaccatctcttgataattgctttgtcacaacgagctatgacgccaccacacattttgagacaactgtaacagatgtcctgaacatgtatacaatgatcactggaaagactgtggatcttagtgtggatttgagtgcagctagtgctgctgaagaatactgatttcagtcataatgtttatcaaagatcacatcattggggacagcacatgaccaaacttcaatgagtggctagtatgagtttagtcggttccagattataccatgccgacttctactgtacctcgtgaatcgtgatgtctattgggcacttgttgctgacagaactgtgcacaatgttgatccaatttgatggatggtggtggttctgttatttactagtcggtcaaaacactaaacggtggccatcatggctgtgtgatgtatcataactgttcagtaaatttgtgttcttctgcccggagttctgctcgatgctattgcgggcggcccgaggtgcttgctctactgtgaatgaatgaagtttgtcacgcatcgtgttcgattttttttaccaaagatcttttctggtctgatgtgccagactatggcctttggagatatataaaagttctggtgttgctggtgctggc

SEQ ID NO: 76527 - DNA, 1466 bp, Zea Mays
cttgagagtacttgactactaccctcccacctgcgagactgcaacgccgttgcttcaactcgactccagcatccctcgtccccgcatcaccgcgccgccgacactccgctcgctttcgctcccgagacccgggcctgccgagccgccgccatggacgaggagtacgacgtgatcgttctgggcacggggctcaaggagtgcatcctcagcggtctcctctctgtcgacggcctcaaggttctacacatggatagaaatgattactacggaggagattccacctccctaaacctgaaccagctctggaagaggtttaggggggaagacaagccaccggcacatctaggtgcaagcagagattacaatgtagacatggttccaaagtttatgatggcaaatgggacattggttcgaaccctcatccacactgatgtgacaaagtacttgtcattcaaagctgttgatgggagctatgttttcagcaaagggaagatttacaaggtccctgccactgatatggaggctctgaagtcccctttgatgggtctattcgagaagcgcagagcaaggaacttcttcatttatgtccaagattacaatgaagctgatccaaggacacatcaaggattagaccttactagggtgacaactagagaacttatagcaaaatatggtttaagtgatgatacagtggatttcattggacatgcacttgctcttcatagagatgatcgctatcttgatgaaccggcacttgatacagtgaaaaggatgaaactatattcagagtctcttgcgcgctttcaaggaggctcgccatatatctatccattgtatggtctgggtgagctaccacagggttttgcacgattgagtgctgtttatggtggtacttacatgttaaacaagccagagtgcaaggttgaattcgatatggaggggaaagtgtgtggtgtcacatctgaaggtgaaactgcaaagtgcaagaaggtggtctgtgatccttcgtatttaccaaacaaggttaggaagattggtagagttgttcgtgcaattgctatcatgagccacccaatccctaatacaaatgagtcccactcggttcaaattattttgcctcagaaacaacttggacgtagatcagacatgtatgttttctgttgttcatacacgcacaatgttgcgccaagagggaagttcattgcatttgtgtctgcagaagcagagactgataacccgcaatctgagctaaagcctggaattgatctacttggttctgtggatgagatattatatgatatttatgacagatatgaaccagtgaatgaaccatctcttgataattgctttgtcacaacgagctatgacgccaccacacattttgagacaactgtaacagatgtcctgaacatgtatacaatgatcactggaaaggagggcttcatttcaagaattgcaacttcggt

SEQ ID NO: 76528 - DNA, 694 bp, Zea Mays
gtaggttgaatttgatatcgaagggaaagtgtgtggtgttacttcagaaggtgaaaacggcgaaatgcaaaaaggttgtctgtgatcctttcttacttgcctagcaaggtaaggaagattggaaaagttgcacgtgcaatcgctattatgagccacccaattccaaacacaaatgagtcccactcgattcagattattttgccgcagaagcaacttgggcgcaagtcagacatgtatgttttctgttgctcatatacacataatgttgcgccaaaagggaagttcattgcatttgtgtctgcggaagctgagaccgataatccacagtccgaactaaagcctggaattgatctacttggtcaagtagatgaactgttttttgatatgtatgacagatacaaacctgtcaatgaaccatctcttgataattgctttgtttcaatgagttatgatgctactacacactttgagacaactgtgacagatgttctcagtatgtacacagcaattactggaaagaccgttgatctcagtgtggacctgagcgctgccagcgcagctgaagaatactagagattttcctattagagataccatactctaaagaagaacggtgttaacacaggccctgcctggtggcttgccagattttctgtgaaaatcaaccctgaaccaccacattattggtgctggc

SEQ ID NO: 76529 - DNA, 566 bp, Zea Mays
gtaggttgaatttgatatcgaagggaaagtgtgtggtgttacttcagaaggtgaaaacggcgaaatgcaaaaaggttgtctgtgatcctttcttacttgcctagcaaggtaaggaagattggaaaagttgcacgtgcaatcgctattatgagccacccaattccaaacacaaatgagtcccactcgattcagattattttgccgcagaagcaacttgggcgcaagtcagacatgtatgttttctgttgctcatatacacataatgttgcgccaaaagggaagttcattgcatttgtgtctgcggaagctgagaccgataatccacagtccgaactaaagcctggaattgatctacttggtcaagtagatgaactgttttttgatatgtatgacagatacaaacctgtcaatgaaccatctcttgataattgctttgtttcaatgagttatgatgctactacacactttgagacaactgtgacagatgttctcagtatgtacacagcaattactggaaagattttctgtgaaaatcaaccctgaaccaccacattattggtgctggc

SEQ ID NO: 76530 - DNA, 3532 bp, Zea Mays
tcggagaaccactcgaggcctcgtccggttggtgagcgcggcaccccgctcccacaaggcccgtcgcagccgctgactccatcggtcctcactgtcctgtagtctccttggtcacccaacatccgcgcgctgtgcgcagcctcgatctccgatcggcgagatggcggagacgttggccggctggctggtgtgcccgatcatcaagatcgtgatggataaggcaaaatcttgcgcttccgacaggatcaagagcctgggcgacggcgtccccaaggcgctcaagcggatggagcacttgctgtatcagctccgcgccgtgggggccgccgtccagcggcggggctctccgaacggatgcggggacccggacttccgtgagtggctacagcagctcatggatgccgtgtacgaggccctagacgtcgtcgatgacttcgacgactctatgccgccgcctgaatcccccgtcgccagggtcagcaagcggatcttcggcaccgacgagcgcgtcaacaggctcaacgatgtcgtcgacaagctggaagccatctccaaagcctcgccgacactgattctgacggcggaggccaacgcgtcggcgtcgcgcgaacagagcggtcacctgcccccgctcggccgcatcacggcctcgctgcgccaccacaaggacgtggtggttgggcgcgactgggagctgcaaaatatggtgtcctggctcgtcggcgcaggcggcgacgcccaggttgtctctgtccccatcgcggcgatcataggacatggcgggatggggaagaccacgctggcgcaggtcctgttagaggacccgaatgtggtctccacctttgaaatcaaaatctggatccagcctttcccgacggacaacgagcttgagcttgccaagaagatcctcctgggcgccgacgtgggcgtcgacgccttcgacgggctgacgaatttcgacttgctactgaaaaagataaaggagaaagtctcgttgcgcaagttcctgctggtgatcgacgacgtctggaacaaggagaacatgggtcagcatgagtaccgagagatgtggtccaaggtgctggcgcccctcagccacggggaaaggggaagcaggatcgtggtcaccacccgtcaaaagatggtagcgaatttgctgtccgcaagcatggaggtccggttggatgacttgccggccaatgacatctggtctctgttcaagaggtatgccttcggtggcgaggacattgatggtcagccttgtgcactgcaggacatcggaaggaaaattgcccaaaagctcaaggggtctccaatgctcgccaaggccgttgggcagatgcttgaaggcaaccccagtgtctcccactggaggaaggtgcttgagatggacatcttcgacaatgtttccaagacattagagttgtgctaccagaatttaccgggccacctgcaaccatgcttcgcaatctgcagcttattccccaagaactggaggttcaagcgcgataagctggtgaagatttggatggcccttggtttcgtgcaggcagcggatgggaaattggaggatctgggaagtgactacttcgatcagcttgtggccaggtcctttttccataggcagaaggtggggcgtcggagttactattacatccacgaccttatgcatgatttggccaagaaggtttctcggtttgattgtgtgagagttgaagatgcaaagaaggagatccccaagacagttcggcacctgtctgtctgcagtgataccgtggcacagctcaagagccgacctgagcttaaaagattgcacacgttgctgattctcaagagcccttcctcttcgctggatcaactgccaggagatcttttcacagagctgaaaagccttcgagttcttggtttggaagactgcaatatcattcgcctaccggagaggattgggaaccttaagtacatcagatacctggcactttgcaaatcaatcaccaagcttccacaagcactgacaaggctctatcgtcttcagaccttaagtagtcctaaggggtctggccttgaggtcccggaagatatcgtaaacctgacgcgtctgagacatttggacatggatacatccaaaatcaccggcattgggaaactggttcacctgcagggatctgtcaagttccatgttaaaaatgaaaaaggccatactttaggagacttgaatggtatgaatggtcttcgtaaagagcttcatatcaagaatcttgatcttgtagcggataaacaagaagcctgccaggctgggctaaacaagaaggagaatgttaaggtcctggaattagaatggaactcgactggtaagattgtgccctctagtgaggctgatgtcttggatggccttgaacccaaccaatatgttaaaaagcttactgttagaagatatcatggtgatagatcaccaaactggcttaacacaagcttgaaagtgagtgtcttctacgttaaatacctgcatttggtcaactgcagaaaatgggaggtcctgcctcctctggggcagcttccatgcctcaaggctttgcgtctgaaagagatgtgtgcagtgaaaaaaatcagcttccgtgacttctatggaaccaaatcgactgcgtttccatctttggaggaacttgaattcgatgatatgcctcaatgggttgagtggacccaagaagagaagaatatcgatgtgctacctaaactccgtaggctgaagcttttgaactgtcccaagctcgttaggttgccccagctccctctgtccgtgaggaaggtctcggtaaaaaatacaggatttgtttcacagctgaaactatccccctgctcttcctcgccatcaaacgcgtgcaagtttaaattagatacgtgctctgccaccatccttacaaatggcttaatgcaccagcaacataaggaatcaattgctactttggctctgaggaactgtcaagatgcaaagtttgaagagcttgagaagctgacttccctgaagagtctgcaaatatgccattcaagcattaacgatggccagctgggcacttgtttgaggggatcgcgagtacttacctgtctggaattgtccaactgcaacaacatcacatgccttccacagatggaaggttcagactgcttaacaaaaatgcatgagttacgcattcaacagtgttctgaattctcctctctgcgctcactgccaagttttgcggctctagaaagtgtattgattgaaaactgctcgaagatcactgcgggatcgttccctaccgacttcagcagcaacacctctctgagaaaactgggcataatgaattgcgttgagctggagtcgttgccaagcggtttcccatcttcactgcaagttcttcatctaattgggtgcaaagcaagtttgacgaagcaactacaactcaaggatggaccagaatgggataaagtagctagtattcccataaaacaaatccgttgattagaatgttgttatgaagatcaaaagagagagaga

SEQ ID NO: 76531 - DNA, 4166 bp, Zea Mays
tcggagaaccactcgaggcctcgtccggttggtgagcgcggcaccccgctcccacaaggcccgtcgcagccgctgactccatcggtcctcactgtcctgtagtctccttggtcacccaacatccgcgcgctgtgcgcagcctcgatctccgatcggcgagatggcggagacgttggccggctggctggtgtgcccgatcatcaagatcgtgatggataaggcaaaatcttgcgcttccgacaggatcaagagcctgggcgacggcgtccccaaggcgctcaagcggatggagcacttgctgtatcagctccgcgccgtgggggccgccgtccagcggcggggctctccgaacggatgcggggacccggacttccgtgagtggctacagcagctcatggatgccgtgtacgaggccctagacgtcgtcgatgacttcgacgactctatgccgccgcctgaatcccccgtcgccagggtcagcaagcggatcttcggcaccgacgagcgcgtcaacaggctcaacgatgtcgtcgacaagctggaagccatctccaaagcctcgccgacactgattctgacggcggaggccaacgcgtcggcgtcgcgcgaacagagcggtcacctgcccccgctcggccgcatcacggcctcgctgcgccaccacaaggacgtggtggttgggcgcgactgggagctgcaaaatatggtgtcctggctcgtcggcgcaggcggcgacgcccaggttgtctctgtccccatcgcggcgatcataggacatggcgggatggggaagaccacgctggcgcaggtcctgttagaggacccgaatgtggtctccacctttgaaatcaaaatctggatccagcctttcccgacggacaacgagcttgagcttgccaagaagatcctcctgggcgccgacgtgggcgtcgacgccttcgacgggctgacgaatttcgacttgctactgaaaaagataaaggagaaagtctcgttgcgcaagttcctgctggtgatcgacgacgtctggaacaaggagaacatgggtcagcatgagtaccgagagatgtggtccaaggtgctggcgcccctcagccacggggaaaggggaagcaggatcgtggtcaccacccgtcaaaagatggtagcgaatttgctgtccgcaagcatggaggtccggttggatgacttgccggccaatgacatctggtctctgttcaagaggtatgccttcggtggcgaggacattgatggtcagccttgtgcactgcaggacatcggaaggaaaattgcccaaaagctcaaggggtctccaatgctcgccaaggccgttgggcagatgcttgaaggcaaccccagtgtctcccactggaggaaggtgcttgagatggacatcttcgacaatgtttccaagacattagagttgtgctaccagaatttaccgggccacctgcaaccatgcttcgcaatctgcagcttattccccaagaactggaggttcaagcgcgataagctggtgaagatttggatggcccttggtttcgtgcaggcagcggatgggaaattggaggatctgggaagtgactacttcgatcagcttgtggccaggtcctttttccataggcagaaggtggggcgtcggagttactattacatccacgaccttatgcatgatttggccaagaaggtttctcggtttgattgtgtgagagttgaagatgcaaagaaggagatccccaagacagttcggcacctgtctgtctgcagtgataccgtggcacagctcaagagccgacctgagcttaaaagattgcacacgttgctgattctcaagagcccttcctcttcgctggatcaactgccaggagatcttttcacagagctgaaaagccttcgagttcttggtttggaagactgcaatatcattcgcctaccggagaggattgggaaccttaagtacatcagatacctggcactttgcaaatcaatcaccaagcttccacaagcactgacaaggctctatcgtcttcagaccttaagtagtcctaaggggtctggccttgaggtcccggaagatatcgtaaacctgacgcgtctgagacatttggacatggatacatccaaaatcaccggcattgggaaactggttcacctgcagggatctgtcaagttccatgttaaaaatgaaaaaggccatactttaggagacttgaatggtatgaatggtcttcgtaaagagcttcatatcaagaatcttgatcttgtagcggataaacaagaagcctgccaggctgggctaaacaagaaggagaatgttaaggtcctggaattagaatggaactcgactggtaagattgtgccctctagtgaggctgatgtcttggatggccttgaacccaaccaatatgttaaaaagcttactgttagaagatatcatggtgatagatcaccaaactggcttaacacaagcttgaaagtgagtgtcttctacgttaaatacctgcatttggtcaactgcagaaaatgggaggtcctgcctcctctggggcagcttccatgcctcaaggctttgcgtctgaaagagatgtgtgcagtgaaaaaaatcagcttccgtgacttctatggaaccaaatcgactgcgtttccatctttggaggaacttgaattcgatgatatgcctcaatgggttgagtggacccaagaagagaagaatatcgatgtgctacctaaactccgtaggctgaagcttttgaactgtcccaagctcgttaggttgccccagctccctctgtccgtgaggaaggtctcggtaaaaaatacaggatttgtttcacagctgaaactatccccctgctcttcctcgccatcaaacgcgtgcaagtttaaattagatacgtgctctgccaccatccttacaaatggcttaatgcaccagcaacataaggaatcaattgctactttggctctgaggaactgtcaagatgcaaagtttgaagagcttgagaagctgacttccctgaagagtctgcaaatatgccattcaagcattaacgatggccagctgggcacttgtttgaggggatcgcgagtacttacctgtctggaattgtccaactgcaacaacatcacatgccttccacagatggaaggttcagactgcttaacaaaaatgcatgagttacgcattcaacagtgttctgaattctcctctctgcgctcactgccaagttttgcggctctagaaagtgtattgattgaaaactgctcgaagatcactgcgggatcgttccctaccgacttcagcagcaacacctctctgagaaaactgggcataatgaattgcgttgagctggagtcgttgccaagcggtttcccatcttcactgcaagttcttcatctaattgggtgcaaagcaagtttgacgaagcaactacaactcaaggatggaccagaatgggataaagtagctagtattcccataaaacaaatccgttgattagaatgttgttatgaagatcaaaagggatgctcgggaggcggattaggctgagcaagaagacatcagactcaccttgggagatcccaacacctagagccctctagaaggcggaggcaaaggtgcagcgtaggagtatatgagttgtatcttctggtgctacatggcaaacctcgcaggtcttgtctccaggttcacacttcacacgacattgtgttatatacatggtgattagctaaggaggaaattagtggtgaggatttcaatctaggttattcaacattaaggtcctgaattctaagtaaataattgtacgtgtggcagtattcttaagtaatttccttagctgtgcctgtgaacaatattatcctcagttaaacattttatttcttttacagcaagcaaaaaggaccacacacacctatcttctaatctctttggcaagatagaaatatctgtatcgacacttaaaacaggcatcagaccctaattccactcttctgcagcctgcagggcagtgggcaggaacttagcggggcccctctctagttcatcgtttgctaaacgaggccttgagcttgcaatcaagtcctacatatttaaggaactgcttgctatccactgaattatggaaaactgaaacccaacgcaaaaaattacaaaatatccg

SEQ ID NO: 76532 - DNA, 3852 bp, Zea Mays
tcggagaaccactcgaggcctcgtccggttggtgagcgcggcaccccgctcccacaaggcccgtcgcagccgctgactccatcggtcctcactgtcctgtagtctccttggtcacccaacatccgcgcgctgtgcgcagcctcgatctccgatcggcgagatggcggagacgttggccggctggctggtgtgcccgatcatcaagatcgtgatggataaggcaaaatcttgcgcttccgacaggatcaagagcctgggcgacggcgtccccaaggcgctcaagcggatggagcacttgctgtatcagctccgcgccgtgggggccgccgtccagcggcggggctctccgaacggatgcggggacccggacttccgtgagtggctacagcagctcatggatgccgtgtacgaggccctagacgtcgtcgatgacttcgacgactctatgccgccgcctgaatcccccgtcgccagggtcagcaagcggatcttcggcaccgacgagcgcgtcaacaggctcaacgatgtcgtcgacaagctggaagccatctccaaagcctcgccgacactgattctgacggcggaggccaacgcgtcggcgtcgcgcgaacagagcggtcacctgcccccgctcggccgcatcacggcctcgctgcgccaccacaaggacgtggtggttgggcgcgactgggagctgcaaaatatggtgtcctggctcgtcggcgcaggcggcgacgcccaggttgtctctgtccccatcgcggcgatcataggacatggcgggatggggaagaccacgctggcgcaggtcctgttagaggacccgaatgtggtctccacctttgaaatcaaaatctggatccagcctttcccgacggacaacgagcttgagcttgccaagaagatcctcctgggcgccgacgtgggcgtcgacgccttcgacgggctgacgaatttcgacttgctactgaaaaagataaaggagaaagtctcgttgcgcaagttcctgctggtgatcgacgacgtctggaacaaggagaacatgggtcagcatgagtaccgagagatgtggtccaaggtgctggcgcccctcagccacggggaaaggggaagcaggatcgtggtcaccacccgtcaaaagatggtagcgaatttgctgtccgcaagcatggaggtccggttggatgacttgccggccaatgacatctggtctctgttcaagaggtatgccttcggtggcgaggacattgatggtcagccttgtgcactgcaggacatcggaaggaaaattgcccaaaagctcaaggggtctccaatgctcgccaaggccgttgggcagatgcttgaaggcaaccccagtgtctcccactggaggaaggtgcttgagatggacatcttcgacaatgtttccaagacattagagttgtgctaccagaatttaccgggccacctgcaaccatgcttcgcaatctgcagcttattccccaagaactggaggttcaagcgcgataagctggtgaagatttggatggcccttggtttcgtgcaggcagcggatgggaaattggaggatctgggaagtgactacttcgatcagcttgtggccaggtcctttttccataggcagaaggtggggcgtcggagttactattacatccacgaccttatgcatgatttggccaagaaggtttctcggtttgattgtgtgagagttgaagatgcaaagaaggagatccccaagacagttcggcacctgtctgtctgcagtgataccgtggcacagctcaagagccgacctgagcttaaaagattgcacacgttgctgattctcaagagcccttcctcttcgctggatcaactgccaggagatcttttcacagagctgaaaagccttcgagttcttggtttggaagactgcaatatcattcgcctaccggagaggattgggaaccttaagtacatcagatacctggcactttgcaaatcaatcaccaagcttccacaagcactgacaaggctctatcgtcttcagaccttaagtagtcctaaggggtctggccttgaggtcccggaagatatcgtaaacctgacgcgtctgagacatttggacatggatacatccaaaatcaccggcattgggaaactggttcacctgcagggatctgtcaagttccatgttaaaaatgaaaaaggccatactttaggagacttgaatggtatgaatggtcttcgtaaagagcttcatatcaagaatcttgatcttgtagcggataaacaagaagcctgccaggctgggctaaacaagaaggagaatgttaaggtcctggaattagaatggaactcgactggtaagattgtgccctctagtgaggctgatgtcttggatggccttgaacccaaccaatatgttaaaaagcttactgttagaagatatcatggtgatagatcaccaaactggcttaacacaagcttgaaagtgagtgtcttctacgttaaatacctgcatttggtcaactgcagaaaatgggaggtcctgcctcctctggggcagcttccatgcctcaaggctttgcgtctgaaagagatgtgtgcagtgaaaaaaatcagcttccgtgacttctatggaaccaaatcgactgcgtttccatctttggaggaacttgaattcgatgatatgcctcaatgggttgagtggacccaagaagagaagaatatcgatgtgctacctaaactccgtaggctgaagcttttgaactgtcccaagctcgttaggttgccccagctccctctgtccgtgaggaaggtctcggtaaaaaatacaggatttgtttcacagctgaaactatccccctgctcttcctcgccatcaaacgcgtgcaagtttaaattagatacgtgctctgccaccatccttacaaatggcttaatgcaccagcaacataaggaatcaattgctactttggctctgaggaactgtcaagatgcaaagtttgaagagcttgagaagctgacttccctgaagagtctgcaaatatgccattcaagcattaacgatggccagctgggcacttgtttgaggggatcgcgagtacttacctgtctggaattgtccaactgcaacaacatcacatgccttccacagatggaaggttcagactgcttaacaaaaatgcatgagttacgcattcaacagtgttctgaattctcctctctgcgctcactgccaagttttgcggctctagaaagtgtattgattgaaaactgctcgaagatcactgcgggatcgttccctaccgacttcagcagcaacacctctctgagaaaactgggcataatgaattgcgttgagctggagtcgttgccaagcggtttcccatcttcactgcaagttcttcatctaattgggtgcaaagcaagtttgacgaagcaactacaactcaaggatggaccagaatgggataaagtagctagtattcccataaaacaaatccgttgattagaatgttgttatgaagatcaaaagggatgctcgggaggcggattaggctgagcaagaagacatcagactcaccttgggagatcccaacacctagagccctctagaaggcggaggcaaaggtgcagcgtaggagtatatgagttgtatcttctggtgctacatggcaaacctcgcaggtcttgtctccagcctgcagggcagtgggcaggaacttagcggggcccctctctagttcatcgtttgctaaacgaggccttgagcttgcaatcaagtcctacatatttaaggaactgcttgctatccactgaattatggaaaactgaaacccaacgcaaaaaattacaaaatatccg

SEQ ID NO: 76533 - DNA, 4279 bp, Zea Mays
tcggagaaccactcgaggcctcgtccggttggtgagcgcggcaccccgctcccacaaggcccgtcgcagccgctgactccatcggtcctcactgtcctgtagtctccttggtcacccaacatccgcgcgctgtgcgcagcctcgatctccgatcggcgagatggcggagacgttggccggctggctggtgtgcccgatcatcaagatcgtgatggataaggcaaaatcttgcgcttccgacaggatcaagagcctgggcgacggcgtccccaaggcgctcaagcggatggagcacttgctgtatcagctccgcgccgtgggggccgccgtccagcggcggggctctccgaacggatgcggggacccggacttccgtgagtggctacagcagctcatggatgccgtgtacgaggccctagacgtcgtcgatgacttcgacgactctatgccgccgcctgaatcccccgtcgccagggtcagcaagcggatcttcggcaccgacgagcgcgtcaacaggctcaacgatgtcgtcgacaagctggaagccatctccaaagcctcgccgacactgattctgacggcggaggccaacgcgtcggcgtcgcgcgaacagagcggtcacctgcccccgctcggccgcatcacggcctcgctgcgccaccacaaggacgtggtggttgggcgcgactgggagctgcaaaatatggtgtcctggctcgtcggcgcaggcggcgacgcccaggttgtctctgtccccatcgcggcgatcataggacatggcgggatggggaagaccacgctggcgcaggtcctgttagaggacccgaatgtggtctccacctttgaaatcaaaatctggatccagcctttcccgacggacaacgagcttgagcttgccaagaagatcctcctgggcgccgacgtgggcgtcgacgccttcgacgggctgacgaatttcgacttgctactgaaaaagataaaggagaaagtctcgttgcgcaagttcctgctggtgatcgacgacgtctggaacaaggagaacatgggtcagcatgagtaccgagagatgtggtccaaggtgctggcgcccctcagccacggggaaaggggaagcaggatcgtggtcaccacccgtcaaaagatggtagcgaatttgctgtccgcaagcatggaggtccggttggatgacttgccggccaatgacatctggtctctgttcaagaggtatgccttcggtggcgaggacattgatggtcagccttgtgcactgcaggacatcggaaggaaaattgcccaaaagctcaaggggtctccaatgctcgccaaggccgttgggcagatgcttgaaggcaaccccagtgtctcccactggaggaaggtgcttgagatggacatcttcgacaatgtttccaagacattagagttgtgctaccagaatttaccgggccacctgcaaccatgcttcgcaatctgcagcttattccccaagaactggaggttcaagcgcgataagctggtgaagatttggatggcccttggtttcgtgcaggcagcggatgggaaattggaggatctgggaagtgactacttcgatcagcttgtggccaggtcctttttccataggcagaaggtggggcgtcggagttactattacatccacgaccttatgcatgatttggccaagaaggtttctcggtttgattgtgtgagagttgaagatgcaaagaaggagatccccaagacagttcggcacctgtctgtctgcagtgataccgtggcacagctcaagagccgacctgagcttaaaagattgcacacgttgctgattctcaagagcccttcctcttcgctggatcaactgccaggagatcttttcacagagctgaaaagccttcgagttcttggtttggaagactgcaatatcattcgcctaccggagaggattgggaaccttaagtacatcagatacctggcactttgcaaatcaatcaccaagcttccacaagcactgacaaggctctatcgtcttcagaccttaagtagtcctaaggggtctggccttgaggtcccggaagatatcgtaaacctgacgcgtctgagacatttggacatggatacatccaaaatcaccggcattgggaaactggttcacctgcagggatctgtcaagttccatgttaaaaatgaaaaaggccatactttaggagacttgaatggtatgaatggtcttcgtaaagagcttcatatcaagaatcttgatcttgtagcggataaacaagaagcctgccaggctgggctaaacaagaaggagaatgttaaggtcctggaattagaatggaactcgactggtaagattgtgccctctagtgaggctgatgtcttggatggccttgaacccaaccaatatgttaaaaagcttactgttagaagatatcatggtgatagatcaccaaactggcttaacacaagcttgaaagtgagtgtcttctacgttaaatacctgcatttggtcaactgcagaaaatgggaggtcctgcctcctctggggcagcttccatgcctcaaggctttgcgtctgaaagagatgtgtgcagtgaaaaaaatcagcttccgtgacttctatggaaccaaatcgactgcgtttccatctttggaggaacttgaattcgatgatatgcctcaatgggttgagtggacccaagaagagaagaatatcgatgtgctacctaaactccgtaggctgaagcttttgaactgtcccaagctcgttaggttgccccagctccctctgtccgtgaggaaggtctcggtaaaaaatacaggatttgtttcacagctgaaactatccccctgctcttcctcgccatcaaacgcgtgcaagtttaaattagatacgtgctctgccaccatccttacaaatggcttaatgcaccagcaacataaggaatcaattgctactttggctctgaggaactgtcaagatgcaaagtttgaagagcttgagaagctgacttccctgaagagtctgcaaatatgccattcaagcattaacgatggccagctgggcacttgtttgaggggatcgcgagtacttacctgtctggaattgtccaactgcaacaacatcacatgccttccacagatggaaggttcagactgcttaacaaaaatgcatgagttacgcattcaacagtgttctgaattctcctctctgcgctcactgccaagttttgcggctctagaaagtgtattgattgaaaactgctcgaagatcactgcgggatcgttccctaccgacttcagcagcaacacctctctgagaaaactgggcataatgaattgcgttgagctggagtcgttgccaagcggtttcccatcttcactgcaagttcttcatctaattgggtgcaaagcaagtttgacgaagcaactacaactcaaggatggaccagaatgggataaagtagctagtattcccataaaacaaatccgttgattagaatgttgttatgaagatcaaaagagagatagagttgattctagtatcacaatctcattgcggaacaccacggcgttgggtcttttctagagttgccaccaacagagaagaacgaaagtactgaacagcttttgcagggatgctcgggaggcggattaggctgagcaagaagacatcagactcaccttgggagatcccaacacctagagccctctagaaggcggaggcaaaggtgcagcgtaggagtatatgagttgtatcttctggtgctacatggcaaacctcgcaggtcttgtctccaggttcacacttcacacgacattgtgttatatacatggtgattagctaaggaggaaattagtggtgaggatttcaatctaggttattcaacattaaggtcctgaattctaagtaaataattgtacgtgtggcagtattcttaagtaatttccttagctgtgcctgtgaacaatattatcctcagttaaacattttatttcttttacagcaagcaaaaaggaccacacacacctatcttctaatctctttggcaagatagaaatatctgtatcgacacttaaaacaggcatcagaccctaattccactcttctgcagcctgcagggcagtgggcaggaacttagcggggcccctctctagttcatcgtttgctaaacgaggccttgagcttgcaatcaagtcctacatatttaaggaactgcttgctatccactgaattatggaaaactgaaacccaacgcaaaaaattacaaaatatccg

SEQ ID NO: 76534 - DNA, 1869 bp, Zea Mays
gccagcgtccacctttcaaaattcaaaatccaaagccacaaacgggcccatgcgaagcctacgcgccgatctccgcatcggacggatgtgatcttctgggtttcctcgggaaaccccacgtgccgtccgatccggtgacctatcctcaccaccgtataaaaaaccgcccggcatttcgcctcaccattctcagaacacgcgctcactccccgagtcccgatcgcaaccgccccccacattccccagagttagcccgatcagatcgtttttccctcgaggtgagagtaagatgagggagatcctgcatatccagggagggcagtgcgggaaccagatcggctccaagttctgggaggtggtgtgcgatgagcacggcatcgacccgacggggcggtacatggggacgtcggacgtgcagctggagcgcgtcaacgtctactacaacgaggcttcatgtggtaggttcgtgccgcgcgcggtgctcatggaccttgagcccggcaccatggacgccgtccgcacgggcccctacggccagatcttccgcccagacaacttcgtcttcggccagtccggcgccggcaacaactgggccaaggggcactacaccgagggggcggagctcatcgactccgtccttgacgtcgtccgtaaggaggccgagaactgcgactgcctccagggttttcaggtttgccactcgctcggcggtggcacggggtctggcatgggtaccctgctcatttctaagattagagaggagtacccggatcgaatgatgatgacgttctccgtcttcccatcccccaaggtgtcggacacggtggtcgaaccctataacgccacgctctctgtccaccagctcgtggagaacgccgacgagtgcatggtgctggacaatgaggcactatacgacatctgcttccgcacgctgaagctgactactcccagctttggtgatctgaaccacttgatcagtgccaccatgagtggtgtcacttgctgccttcgcttcccagggcagctgaactctgacctccgcaagcttgctgtgaacctgattcccttcccacgcctgcactttttcatgatgtgggactccaagaacatgatgtgtgccgcagacccacgtcatggccgctacctgacggcctctgccatgttccgtggcaagatgagcaccaaggaggtagacgagcaaatgataaatgtgcagaacaagaactcgtcctactttgtggagtggattcctaacaacgtcaaatcgagcgtttgtgacatcccccctcgtggcctctccatgtcttccaccttcgtgggtaactccacctcgattcaggagatgttccggcgtgtaagtgagcagtttacggccatgttcaggaggaaggccttcttgcactggtacacaggcgagggcatggatgagatggagttcactgaggctgagagcaacatgaacgacctcgtctccgagtatcagcagtatcaggatgctacagccgatgaggaggccgactatgaggaagaggaggcggcggcggagtgaggccttctgccatcagttggtgcggggttggctttgtggttttctttgcacttgatgctacctcaacgtatgcaatatctcctgcttgatatatctgctgcttgtgtacgctaccgcgtacgttctgcactcttaataaatatatatgttagttccgtaccagttcctgcgctagtggattggaattctgattaaaatgtttgctgagaagtgtcgtggtgttcttggatgagattctgtgctgccgttgtatgctgttttgaccaaaaattacaatgtttgttgaaaattatgagttcgttctttgtttgttttccagt

SEQ ID NO: 76535 - DNA, 1247 bp, Zea Mays
accaacgatttggatcctgaaccggcctccggtttcggattccaattccaccggccaccccgagcccgatatcgtcttctaatctcatccgctccgtgccgcaccgcaaaacgcagatccctgcctgcacacggcatccggagttccggactcccctcctcttctcgggcagccgggcgccgcttcgcctcctcctcgcaggcaagaagagcagccagccgcttcgcgatcggggacgcggagaggggaaaggcgagtcgtcgtccgtccacggcagcttccctccctctcctctccgcccccgcttacctagcccggcccctcctacgccccccccctcccgccgccgcacgatgagcacctctccggccgcgtccgccgccgcgtcgcctccgccgcctattgcctccgccgccgaggcctcgcgggcgacggagacgttggtggtcgacgagagggtcgcctcacacgtggacccgttcctcgtagaggcgctcgacaaccctcgccaccgcctcatggattctgatgctgcaagtgttttgggaactctttgcactggcagagatgagtcagtaaatgttgaaccttctgttgatgaaatcaaagtcagcacgatgaacaaccgttccagagttgctgttttcaaggatactcaaaaggatcgcagtgacccagattatgatcgaaactacaaaaggtatgttaggagcccagttcctgacttcaacttgagcccaggtgccttcaactttgtgcctcagtttatgcagtatggcgttggttatgtgcaatctcctggcatgtctacaaaccagcctgctgtctactttggccagcctgatctaacaatggggtcttctggagctgctgtttacccacattggccaaccccagcaatgatgtatccccattgctatgacaatgttggttcaatgatttctcaggttcctctgtaccaatctttcaaccatggttagtagattctgcttactggaaagttgggaaccgttctctgttgaacttgttatattgtgccgtcctatgttaagtggagttactttagattcgagccatttcgattacagaaaattccaaaaaattcatgtaatgtcgaacgtattagtttgtataatggggagtcctaattcgttgaaactaatatcgtgaactagtctggaactgtaattcgtgtctaatatctagttctcgtctgcaaaaataaaaagtcaaataaaaagtaaaaa

SEQ ID NO: 76536 - DNA, 1349 bp, Zea Mays
accaacgatttggatcctgaaccggcctccggtttcggattccaattccaccggccaccccgagcccgatatcgtcttctaatctcatccgctccgtgccgcaccgcaaaacgcagatccctgcctgcacacggcatccggagttccggactcccctcctcttctcgggcagccgggcgccgcttcgcctcctcctcgcagttctacggatggaactggatatacgaaactttatgcagaaccctcagctgcaggagttcgaattccagaactttccgacttcttacctacgctgtgctgctcatcgtgttgcacaacattatggcttagagactatagtggcagatagtttagtagaaggctcagttagcaggatcgttgcaagaaaaacaccagagagcaggtgtcctgcaatttcattagcagaagttcctagcaaacaagcaagaaatgatcatgaggcagcagagaagcttaagtttgtcatttatcaaaggcccaaagcattccaaaatggaagcactgatttgggaaacaagaatggtgcaccaaaaactgttgaagagagaatagaggaatataataaagcacgagcacgcatcttcaatggttctgtttctgcagattctgatgctgcaagtgttttgggaactctttgcactggcagagatgagtcagtaaatgttgaaccttctgttgatgaaatcaaagtcagcacgatgaacaaccgttccagagttgctgttttcaaggatactcaaaaggatcgcagtgacccagattatgatcgaaactacaaaaggtatgttaggagcccagttcctgacttcaacttgagcccaggtgccttcaactttgtgcctcagtttatgcagtatggcgttggttatgtgcaatctcctggcatgtctacaaaccagcctgctgtctactttggccagcctgatctaacaatggggtcttctggagctgctgtttacccacattggccaaccccagcaatgatgtatccccattgctatgacaatgttggttcaatgatttctcaggttcctctgtaccaatctttcaaccatggttagtagattctgcttactggaaagttgggaaccgttctctgttgaacttgttatattgtgccgtcctatgttaagtggagttactttagattcgagccatttcgattacagaaaattccaaaaaattcatgtaatgtcgaacgtattagtttgtataatggggagtcctaattcgttgaaactaatatcgtgaactagtctggaactgtaattcgtgtctaatatctagttctcgtctgcaaaaataaaaagtcaaataaaaagtaaaaa

SEQ ID NO: 76537 - DNA, 1400 bp, Zea Mays
accaacgatttggatcctgaaccggcctccggtttcggattccaattccaccggccaccccgagcccgatatcgtcttctaatctcatccgctccgtgccgcaccgcaaaacgcagatccctgcctgcacacggcatccggagttccggactcccctcctcttctcgggcagccgggcgccgcttcgcctcctcctcgcaggcaagaagagcagccagccgcttcgcgatcggggacgcggagaggggaaagttctacggatggaactggatatacgaaactttatgcagaaccctcagctgcaggagttcgaattccagaactttccgacttcttacctacgctgtgctgctcatcgtgttgcacaacattatggcttagagactatagtggcagatagtttagtagaaggctcagttagcaggatcgttgcaagaaaaacaccagagagcaggtgtcctgcaatttcattagcagaagttcctagcaaacaagcaagaaatgatcatgaggcagcagagaagcttaagtttgtcatttatcaaaggcccaaagcattccaaaatggaagcactgatttgggaaacaagaatggtgcaccaaaaactgttgaagagagaatagaggaatataataaagcacgagcacgcatcttcaatggttctgtttctgcagattctgatgctgcaagtgttttgggaactctttgcactggcagagatgagtcagtaaatgttgaaccttctgttgatgaaatcaaagtcagcacgatgaacaaccgttccagagttgctgttttcaaggatactcaaaaggatcgcagtgacccagattatgatcgaaactacaaaaggtatgttaggagcccagttcctgacttcaacttgagcccaggtgccttcaactttgtgcctcagtttatgcagtatggcgttggttatgtgcaatctcctggcatgtctacaaaccagcctgctgtctactttggccagcctgatctaacaatggggtcttctggagctgctgtttacccacattggccaaccccagcaatgatgtatccccattgctatgacaatgttggttcaatgatttctcaggttcctctgtaccaatctttcaaccatggttagtagattctgcttactggaaagttgggaaccgttctctgttgaacttgttatattgtgccgtcctatgttaagtggagttactttagattcgagccatttcgattacagaaaattccaaaaaattcatgtaatgtcgaacgtattagtttgtataatggggagtcctaattcgttgaaactaatatcgtgaactagtctggaactgtaattcgtgtctaatatctagttctcgtctgcaaaaataaaaagtcaaataaaaagtaaaaa

SEQ ID NO: 76538 - DNA, 1121 bp, Zea Mays
accaacgatttggatcctgaaccggcctccggtttcggattccaattccaccggccaccccgagcccgatatcgtcttctaatctcatccgctccgtgccgcaccgcaaaacgcagatccctgcctgcacacggcatccggagttccggactcccctcctcttctcgggcagccgggcgccgcttcgcctcctcctcgcaggcaagaagagcagccagccgcttcgcgatcggggacgcggagaggggaaaggcgagtcgtcgtccgtccacggcagcttccctccctctcctctccgcccccgcttacctagcccggccccaaaaactgttgaagagagaatagaggaatataataaagcacgagcacgcatcttcaatggttctgtttctgcagattctgatgctgcaagtgttttgggaactctttgcactggcagagatgagtcagtaaatgttgaaccttctgttgatgaaatcaaagtcagcacgatgaacaaccgttccagagttgctgttttcaaggatactcaaaaggatcgcagtgacccagattatgatcgaaactacaaaaggtatgttaggagcccagttcctgacttcaacttgagcccaggtgccttcaactttgtgcctcagtttatgcagtatggcgttggttatgtgcaatctcctggcatgtctacaaaccagcctgctgtctactttggccagcctgatctaacaatggggtcttctggagctgctgtttacccacattggccaaccccagcaatgatgtatccccattgctatgacaatgttggttcaatgatttctcaggttcctctgtaccaatctttcaaccatggttagtagattctgcttactggaaagttgggaaccgttctctgttgaacttgttatattgtgccgtcctatgttaagtggagttactttagattcgagccatttcgattacagaaaattccaaaaaattcatgtaatgtcgaacgtattagtttgtataatggggagtcctaattcgttgaaactaatatcgtgaactagtctggaactgtaattcgtgtctaatatctagttctcgtctgcaaaaataaaaagtcaaataaaaagtaaaaa

SEQ ID NO: 76539 - DNA, 1572 bp, Zea Mays
accaacgatttggatcctgaaccggcctccggtttcggattccaattccaccggccaccccgagcccgatatcgtcttctaatctcatccgctccgtgccgcaccgcaaaacgcagatccctgcctgcacacggcatccggagttccggactcccctcctcttctcgggcagccgggcgccgcttcgcctcctcctcgcaggcaagaagagcagccagccgcttcgcgatcggggacgcggagaggggaaaggcgagtcgtcgtccgtccacggcagcttccctccctctcctctccgcccccgcttacctagcccggcccctcctacgccccccccctcccgccgccgcacgatgagcacctctccggccgcgtccgccgccgcgtcgcctccgccgcctattgcctccgccgccgaggcctcgcgggcgacggagacgttggtggtcgacgagagggtcgcctcacacgtggacccgttcctcgtagaggcgctcgacaaccctcgccaccgcctcatggttctacggatggaactggatatacgaaactttatgcagaaccctcagctgcaggagttcgaattccagaactttccgacttcttacctacgctgtgctgctcatcgtgttgcacaacattatggcttagagactatagtggcagatagtttagtagaaggctcagttagcaggatcgttgcaagaaaaacaccagagagcaggtgtcctgcaatttcattagcagaagttcctagcaaacaagcaagaaatgatcatgaggcagcagagaagcttaagtttgtcatttatcaaaggcccaaagcattccaaaatggaagcactgatttgggaaacaagaatggtgcaccaaaaactgttgaagagagaatagaggaatataataaagcacgagcacgcatcttcaatggttctgtttctgcagattctgatgctgcaagtgttttgggaactctttgcactggcagagatgagtcagtaaatgttgaaccttctgttgatgaaatcaaagtcagcacgatgaacaaccgttccagagttgctgttttcaaggatactcaaaaggatcgcagtgacccagattatgatcgaaactacaaaaggtatgttaggagcccagttcctgacttcaacttgagcccagcctgatctaacaatggggtcttctggagctgctgtttacccacattggccaaccccagcaatgatgtatccccattgctatgacaatgttggttcaatgatttctcaggttcctctgtaccaatctttcaaccatggttagtagattctgcttactggaaagttgggaaccgttctctgttgaacttgttatattgtgccgtcctatgttaagtggagttactttagattcgagccatttcgattacagaaaattccaaaaaattcatgtaatgtcgaacgtattagtttgtataatggggagtcctaattcgttgaaactaatatcgtgaactagtctggaactgtaattcgtgtctaatatctagttctcgtctgcaaaaataaaaagtcaaataaaaagtaaaaa

SEQ ID NO: 76540 - DNA, 691 bp, Zea Mays
ctcaacgcagtcccgccaccgccattctcagggtgctgctttggagttcactagggtgctcaaatcgaagcggcaggttgtgaccgggaccctgcatgacctgatactggaggcagctgatgctggaaaaaagagtctgtacagagcaaaagtctgggtgaagccgtgggaggatttcaagtccgttgtcgagtttcgccttgctggagactctgaatctgaacccgagccttctgttgcttctgatgaaggctctgggcaaggtattgctggagttgccaagctctctcttgaagcagacatcatacacgaagaggctcacctgcacaccattgagaatgatggactttccagcgatttcgcatcatccgcttagacatacttggtgtgactaggattccaggcaaggatggaaagcgtgaaagtttaaaatgaaggtttaggtatttagaattctaatagtaggttgctgtcaagctgaaatgctttgcctctatcggaatatgtatgttttgtttggaacgtaggagcatagaactgtatatttcggtatttcacaccgttcatttccatgtctgtatataagactatctccagccatattctcccatatatatttcactacctatactttttattatattttacatttttactacattcattaaaagattcttcttctacctacaga

SEQ ID NO: 76541 - DNA, 889 bp, Zea Mays
ataggcaatatctgaaaaaaataaagttcaacagtgcctcattttaaaatttattataaaaatataatagggcagcatgccaagtgtcccaaataaggcatcgaaatcaggctgcctcaaatggatcacaactgaatgaagtttcacatctacgcccaagcgtcgccgaacagtcgccgccacacgactactctctgcctcggcttcctcaacgcagtcccgccaccgccattctcagggtgctgctttggagttcactagggtgctcaaatcgaagcggcaggttgtgaccgggaccctgcatgacctgatactggaggcagctgatgctggaaaaaagagtctgtacagagcaaaagtctgggtgaagccgtgggaggatttcaagtccgttgtcgagtttcgccttgctggagactctgaatctgaacccgagccttctgttgcttctgatgaaggctctgggcaaggagttgccaagctctctcttgaagcagacatcatacacgaagaggctcacctgcacaccattgagaatgatggactttccagcgatttcgcatcatccgcttagacatacttggtgtgactaggattccaggcaaggatggaaagcgtgaaagtttaaaatgaaggtttaggtatttagaattctaatagtaggttgctgtcaagctgaaatgctttgcctctatcggaatatgtatgttttgtttggaacgtaggagcatagaactgtatatttcggtatttcacaccgttcatttccatgtctgtatataagactatctccagccatattctcccatatatatttcactacctatactttttattatattttacatttttactacattcattaaaagattcttcttctacctacaga

SEQ ID NO: 76542 - DNA, 978 bp, Zea Mays
acccacatgctggtaaggttttaggcgagaaagctattttaaccacagaggcacgtgagcttctatcacgacatcagaggctttcggatgagaggaataaatatctggtgataattgaagagatacaccaaattcttgctgaaagattggttgctgcacaacaagaaattgcagcagctgagaaagaaaatgctgaaaaggaggctgctgctcaggcagtactcgatgaacaggaaaaaatgatgaattctatcgtagaagaatcaagaaagctgcagaaagaagctgaggagaacctgaagctgaaggaattcttggttgagcgcggtcaaattgttgatatgctgcaaggtgagatggctgtgacatgtgaggacgtttcgttgctcaagcgagtggtagatgagcgcctaccgttgagcaagttgcagcgctcagctatgtcgagcctctcttcttcactgcattcttctcatcacaagagctggacttcctcggataaagccattagatctccagataagcacacccttgctgaacctgcaagcccagtggggaaagatctggatggcaacgagtgcaccgtggaagtgtcagatggcaacgacagtggtgaaggcattttgaagcgcgtggattccaaggaggatgtcgatggatgggagctttgctgaagatgttcaggaatagcggcgttgccagaggatgctgaagcataaactaacaataattgtgtataaacgcatactagcacggtgctaatctaatcgttttcacatgaatcgggaagtctcgctggctcaccacagttgtacgtgagatgagtccaactggcaactgcagcttgatgtggtatatataaaagtgaaggtttcagctcccttactgtccaaattttatgtcgtttctaattttgttctaggttaaatatctgacttttactatgtcttctaaaaatattaatatctacaatactct

SEQ ID NO: 76543 - DNA, 2418 bp, Zea Mays
ttttatccacctcgctttccttcacttggtttctaatacgcaattcgcggggaacccaaaaccctaatcctctctctccacgccgccagagagccgtgtgggagctcggtcctcggacttctgcatcgatctctgctatgagtgctatctaggtttctcagatgggtgacctcaaggaggttttccgctccctccaagaactcttccctgaggttgatcatcgtatactaaaggctatcgcaattgagcatcgtaaagatgttgattccgcggttgttactgttcttgatgaagtcatgccgttcatgacgggttcagctggagtggatggttctgttgggaatttgtcatctatggatggttctgttgggaatttgtttggtaatcacagcacacatgaagtgggaagttcatcatctgtttggcgtgatatatgtatcaatgagattgatgcaagtgtttactctgtgcaatacacttcttatggggatgtcaaaactggcaagcaagaaaacataaacaacacatatgtgggaagacttgcatcaatcgaaggggtcaatgagcaactaaatctacattcttatcctatcccaaatggtggtcaacatgatttgcttcccaaccttgatgtgctatcttcaaataccgatccagagaaaacgttggccaacacagataatgaagttggatacagtggattatttagtgaatgtttttcccaaccaccgacaggggaagatggtggtaatatcatagccccacaaccctgtgatcaagatcctaatggcatgattccagttggggattactttccacagaacagttcaatggagttcttcagtggctatgaggactacaattttgatgacggccttttgcctattggttctaatgatcaaatatcttttcgaattttgggtactgaaaaagatccttttgcgcctgtgctagatgttcctggtcgagataaagaagaatcatccactgagacttctggatttatagaatcctccaataatgttgcagatatgcttcctgatcttaatctgaaccattttacttctacggcttcaactcactcaaaccattctgttagtattgagtctcttgaggattctgttgctgatgccagaagcaataaggaacgtgctgcccatgccgtcgtcctgatgctgttgctcggatttgaccgcagacgcctccaagtccaaggtgacactgtacagtacggctgtagtgtcgagggtgctgttctcggctcctttgataatgatctgttaccttctatagaattggttacaaaaatgatagaggatgttgagcttctagaagaaaaggctaaagtggccaaacatgaattgtccgttgctgggacaggcattctggcaaaagttgaggagctcagagaaatgataacttatgcgaaggaagcaaatgatatgcatgctggtaaggttttaggcgagaaagctattttaaccacagaggcacgtgagcttctatcacgacatcagaggctttcggatgagaggaataaatatctggtgataattgaagagatacaccaaattcttgctgaaagattggttgctgcacaacaagaaattgcagcagctgagaaagaaaatgctgaaaaggaggctgctgctcaggcagtactcgatgaacaggaaaaaatgatgaattctatcgtagaagaatcaagaaagctgcagaaagaagctgaggagaacctgaagctgaaggaattcttggttgagcgcggtcaaattgttgatatgctgcaaggtgagatggctgtgacatgtgaggacgtttcgttgctcaagcgagtggtagatgagcgcctaccgttgagcaagttgcagcgctcagctatgtcgagcctctcttcttcactgcattcttctcatcacaagagctggacttcctcggataaagccattagatctccagataagcacacccttgctgaacctgcaagcccagtggggaaagatctggatggcaacgagtgcaccgtggaagtgtcagatggcaacgacagtggtgaaggcattttgaagcgcgtggattccaaggaggatgtcgatggatgggagctttgctgaagatgttcaggaatagcggcgttgccagaggatgctgaagcataaactaacaataattgtgtataaacgcatactagcacggtgctaatctaatcgttttcacatgaatcgggaagtctcgctggctcaccacagttgtacgtgagatgagtccaactggcaactgcagcttgatgtggtatatataaaagtgaaggtttcagctcccttactgtccaaattttatgtcgtttctaattttgttctaggttaaatatctgacttttactatgtcttctaaaaatattaatatctacaatactct

SEQ ID NO: 76544 - DNA, 3431 bp, Zea Mays
ttttatccacctcgctttccttcacttggtttctaatacgcaattcgcggggaacccaaaaccctaatcctctctctccacgccgccagagagccgtgtgggagctcggtcctcggacttctgcatcgatctctgctatgagtgctatctaggtttctcagatgggtgacctcaaggaggttttccgctccctccaagaactcttccctgaggttgatcatcgtatactaaaggctatcgcaattgagcatcgtaaagatgttgattccgcggttgttactgttcttgatgaagtcatgccgttcatgacgggttcagctggagtggatggttctgttgggaatttgtcatctatggatggttctgttgggaatttgtttggtaatcacagcacacatgaagtgggaagttcatcatctgtttggcgtgatatatgtatcaatgagattgatgcaagtgtttactctgtgcaatacacttcttatggggatgtcaaaactggcaagcaagaaaacataaacaacacatatgtgggaagacttgcatcaatcgaaggggtcaatgagcaactaaatctacattcttatcctatcccaaatggtggtcaacatgatttgcttcccaaccttgatgtgctatcttcaaataccgatccagagaaaacgttggccaacacagataatgaagttggatacagtggattatttagtgaatgtttttcccaaccaccgacaggggaagatggtggtaatatcatagccccacaaccctgtgatcaagatcctaatggcatgattccagttggggattactttccacagaacagttcaatggagttcttcagtggctatgaggactacaattttgatgacggccttttgcctattggttctaatgatcaaatatcttttcgaattttgggtactgaaaaagatccttttgcgcctgtgctagatgttcctggtcgagataaagaagaatcatccactgagacttctggatttatagaatcctccaataatgttgcagatatgcttcctgatcttaatctgaaccattttacttctacggcttcaactcactcaaaccattctgttagtattgagtctcttgaggattctgttgctgatgccagaagcaataaggaacgtgctgcccatgccgtcgtcctgatgctgttgctcggatttgaccgcagacgcctccaagtccaaggtgacactgtacagtacggctgtagtgtcgagggtgctgttctcggctcctttgatgtacgtagttccgggtcataaaactgcacacatggttccggcttgtgcgcctgacctggcacgctggcctatatcacagacctcggcgccaagatctatggtgccgaggtctgccacgtgagctgcaagttcgatccatgtacgtcaccggggccagcacctcggcgccaagatctgtggcgccgagacgtgttacctcggcgtcacagtttatggcgctgagcaacgggtataaatttggaaattgtttctacaggagtctaaatgtgaaatttcttcattaaaaagggctaagatgaaaaaaaatcgggattgacgacagccactccaagccatcttgcacattaatcagtactctgaaccctacgtaattacatacccccattccaaattataagacgtttggcttatttagatacatagcctttatgcacttaggtatatatcactgttcatctacatggccgtttagcccgtgtacaaaccgtgtaaacgctacacaatggcttaccgtgttcgtttaatcagccatttgccccgtttaatcaccatttagtctgtatggccgtttgccctgaataaatagacaaacggtacatgatcatttaaacgtttaggctaacattggtctatattattatagtaaaaacaacatatatagaaaatccaaagcgtcttataatatggaacggagggagtattttatttaagttgttgcggtatatttttccaaaagatatgttgggaagtcatttatttagtttcctactaggatctgtttctttgtcatgagcctgaattttctgaataacgaggactgccaattatagttcctcaaaagaaaaacttctatgcaatgtatatttcttcttgcatatatgtacacaggggcaagcctagtgcagtggtgagagctgtctcacttagtcaccagtttgcggctcgaagtagcctctctgtatttgcggagagaaggcttgcttcagtttattctttccttagaccccactcataatgatctgttaccttctatagaattggttacaaaaatgatagaggatgttgagcttctagaagaaaaggctaaagtggccaaacatgaattgtccgttgctgggacaggcattctggcaaaagttgaggagctcagagaaatgataacttatgcgaaggaagcaaatgatatgcatgctggtaaggttttaggcgagaaagctattttaaccacagaggcacgtgagcttctatcacgacatcagaggctttcggatgagaggaataaatatctggtgataattgaagagatacaccaaattcttgctgaaagattggttgctgcacaacaagaaattgcagcagctgagaaagaaaatgctgaaaaggaggctgctgctcaggcagtactcgatgaacaggaaaaaatgatgaattctatcgtagaagaatcaagaaagctgcagaaagaagctgaggagaacctgaagctgaaggaattcttggttgagcgcggtcaaattgttgatatgctgcaaggtgagatggctgtgacatgtgaggacgtttcgttgctcaagcgagtggtagatgagcgcctaccgttgagcaagttgcagcgctcagctatgtcgagcctctcttcttcactgcattcttctcatcacaagagctggacttcctcggataaagccattagatctccagataagcacacccttgctgaacctgcaagcccagtggggaaagatctggatggcaacgagtgcaccgtggaagtgtcagatggcaacgacagtggtgaaggcattttgaagcgcgtggattccaaggaggatgtcgatggatgggagctttgctgaagatgttcaggaatagcggcgttgccagaggatgctgaagcataaactaacaataattgtgtataaacgcatactagcacggtgctaatctaatcgttttcacatgaatcgggaagtctcgctggctcaccacagttgtacgtgagatgagtccaactggcaactgcagcttgatgtggtatatataaaagtgaaggtttcagctcccttactgtccaaattttatgtcgtttctaattttgttctaggttaaatatctgacttttactatgtcttctaaaaatattaatatctacaatactct

SEQ ID NO: 76545 - DNA, 2340 bp, Zea Mays
ttttatccacctcgctttccttcacttggtttctaatacgcaattcgcggggaacccaaaaccctaatcctctctctccacgccgccagagagccgtgtgggagctcggtcctcggacttctgcatcgatctctgctatgagtgctatctaggtttctcagatgggtgacctcaaggaggttttccgctccctccaagaactcttccctgaggttgatcatcgtatactaaaggctatcgcaattgagcatcgtaaagatgttgattccgcggttgttactgttcttgatgaagtcatgccgttcatgacgggttcagctggagtggatggttctgttgggaatttgtcatctatggatggttctgttgggaatttgtttggtaatcacagcacacatgaagtgggaagttcatcatctgtttggcgtgatatatgtatcaatgagattgatgcaagtgtttactctgtgcaatacacttcttatggggatgtcaaaactggcaagcaagaaaacataaacaacacatatgtgggaagacttgcatcaatcgaaggggtcaatgagcaactaaatctacattcttatcctatcccaaatggtggtcaacatgatttgcttcccaaccttgatgtgctatcttcaaataccgatccagagaaaacgttggccaacacagataatgaagttggatacagtggattatttagtgaatgtttttcccaaccaccgacaggggaagatggtggtaatatcatagccccacaaccctgtgatcaagatcctaatggcatgattccagttggggattactttccacagaacagttcaatggagttcttcagtggctatgaggactacaattttgatgacggccttttgcctattggttctaatgatcaaatatcttttcgaattttgggtactgaaaaagatccttttgcgcctgtgctagatgttcctggtcgagataaagaagaatcatccactgagacttctggatttatagaatcctccaataatgttgcagatatgcttcctgatcttaatctgaaccattttacttctacggcttcaactcactcaaaccattctgttagtattgagtctcttgaggattctgttgctgatgccagaagcaataaggaacgtgctgcccatgccgtcgtcctgatgctgttgctcggatttgaccgcagacgcctccaagtccaagaattggttacaaaaatgatagaggatgttgagcttctagaagaaaaggctaaagtggccaaacatgaattgtccgttgctgggacaggcattctggcaaaagttgaggagctcagagaaatgataacttatgcgaaggaagcaaatgatatgcatgctggtaaggttttaggcgagaaagctattttaaccacagaggcacgtgagcttctatcacgacatcagaggctttcggatgagaggaataaatatctggtgataattgaagagatacaccaaattcttgctgaaagattggttgctgcacaacaagaaattgcagcagctgagaaagaaaatgctgaaaaggaggctgctgctcaggcagtactcgatgaacaggaaaaaatgatgaattctatcgtagaagaatcaagaaagctgcagaaagaagctgaggagaacctgaagctgaaggaattcttggttgagcgcggtcaaattgttgatatgctgcaaggtgagatggctgtgacatgtgaggacgtttcgttgctcaagcgagtggtagatgagcgcctaccgttgagcaagttgcagcgctcagctatgtcgagcctctcttcttcactgcattcttctcatcacaagagctggacttcctcggataaagccattagatctccagataagcacacccttgctgaacctgcaagcccagtggggaaagatctggatggcaacgagtgcaccgtggaagtgtcagatggcaacgacagtggtgaaggcattttgaagcgcgtggattccaaggaggatgtcgatggatgggagctttgctgaagatgttcaggaatagcggcgttgccagaggatgctgaagcataaactaacaataattgtgtataaacgcatactagcacggtgctaatctaatcgttttcacatgaatcgggaagtctcgctggctcaccacagttgtacgtgagatgagtccaactggcaactgcagcttgatgtggtatatataaaagtgaaggtttcagctcccttactgtccaaattttatgtcgtttctaattttgttctaggttaaatatctgacttttactatgtcttctaaaaatattaatatctacaatactct

SEQ ID NO: 76546 - DNA, 2423 bp, Zea Mays
aaaaagggtagggacatgctatatagcaaggctagaacaagaagctggtcatcccccgcgtttttatccacctcgctttccttcacttggtttctaatacgcaattcgcggggaacccaaaaccctaatcctctctctccacgccgccagagagccgtgtgggagctcggtcctcggacttctgcatcgatctctgctatgagtgctatctaggtttctcagatgggtgacctcaaggaggttttccgctccctccaagaactcttccctgaggttgatcatcgtatactaaaggctatcgcaattgagcatcgtaaagatgttgattccgcggttgttactgttcttgatgaagtcatgccgttcatgacgggttcagctggagtggatggttctgttgggaatttgtcatctatggatggttctgttgggaatttgtttggtaatcacagcacacatgaagtgggaagttcatcatctgtttggcgtgatatatgtatcaatgagattgatgcaagtgtttactctgtgcaatacacttcttatggggatgtcaaaactggcaagcaagaaaacataaacaacacatatgtgggaagacttgcatcaatcgaaggggtcaatgagcaactaaatctacattcttatcctatcccaaatggtggtcaacatgatttgcttcccaaccttgatgtgctatcttcaaataccgatccagagaaaacgttggccaacacagataatgaagttggatacagtggattatttagtgaatgtttttcccaaccaccgacaggggaagatggtggtaatatcatagccccacaaccctgtgatcaagatcctaatggcatgattccagttggggattactttccacagaacagttcaatggagttcttcagtggctatgaggactacaattttgatgacggccttttgcctattggttctaatgatcaaatatcttttcgaattttgggtactgaaaaagatccttttgcgcctgtgctagatgttcctggtcgagataaagaagaatcatccactgagacttctggatttatagaatcctccaataatgttgcagatatgcttcctgatcttaatctgaaccattttacttctacggcttcaactcactcaaaccattctgttagtattgagtctcttgaggattctgttgctgatgccagaagcaataaggaacgtgctgcccatgccgtcgtcctgatgctgttgctcggatttgaccgcagacgcctccaagtccaagaatgatctgttaccttctatagaattggttacaaaaatgatagaggatgttgagcttctagaagaaaaggctaaagtggccaaacatgaattgtccgttgctgggacaggcattctggcaaaagttgaggagctcagagaaatgataacttatgcgaaggaagcaaatgatatgcatgctggtaaggttttaggcgagaaagctattttaaccacagaggcacgtgagcttctatcacgacatcagaggctttcggatgagaggaataaatatctggtgataattgaagagatacaccaaattcttgctgaaagattggttgctgcacaacaagaaattgcagcagctgagaaagaaaatgctgaaaaggaggctgctgctcaggcagtactcgatgaacaggaaaaaatgatgaattctatcgtagaagaatcaagaaagctgcagaaagaagctgaggagaacctgaagctgaaggaattcttggttgagcgcggtcaaattgttgatatgctgcaaggtgagatggctgtgacatgtgaggacgtttcgttgctcaagcgagtggtagatgagcgcctaccgttgagcaagttgcagcgctcagctatgtcgagcctctcttcttcactgcattcttctcatcacaagagctggacttcctcggataaagccattagatctccagataagcacacccttgctgaacctgcaagcccagtggggaaagatctggatggcaacgagtgcaccgtggaagtgtcagatggcaacgacagtggtgaaggcattttgaagcgcgtggattccaaggaggatgtcgatggatgggagctttgctgaagatgttcaggaatagcggcgttgccagaggatgctgaagcataaactaacaataattgtgtataaacgcatactagcacggtgctaatctaatcgttttcacatgaatcgggaagtctcgctggctcaccacagttgtacgtgagatgagtccaactggcaactgcagcttgatgtggtatatataaaagtgaaggtttcagctcccttactgtccaaattttatgtcgtttctaattttgttctaggttaaatatctgacttttactatgtcttctaaaaatattaatatctacaatactct

SEQ ID NO: 76547 - DNA, 2102 bp, Zea Mays
ctctacaagcccttttttttttgttatccggtccgcccaggctcttcccattctccggcgcttccctctgtcccttggctcgctctggcgtggttctcccgtcccctggtgcgtgcgcgcttctcgctctctcgtggcggcgactgggcgactatcgcctccgccctacaacagttgctcaggtcttctttgggcccttcgccggggacaagcacccaccggagaaaatcaataaatacatcggcctgaaagaatgggttatggcatgagtaggctagacgatgaatactatgaggctgaagggcagaatactggtggatctggctcagttcaagtgaacgatgagtttgcaacactacataatgatatttttcatatgacccgaatgagatcaggacttactgaaagctacaagtccatgggtaccaacagaggcataatatcaactgccaagttattatctcgaagggaaattgattgttctggaaaggggatgttctcttctggtgaccgtgcatttgttctaggtcgtcatgttccgatgaacaatcctgaattattggataggatggattctcgtgcttacgtttcacagttttctgctgatggtactctttttgttgctggttttcagggaagtcacataagaatatacgatgttgatagaggctggagcatacacaaagacattcatgctaggtgtttaagatggacaatcagtgatgtatccttatcacctgatcagcggtatcttgcctactctagtctggcacctattatccatattgtcaatgttgggaatgcggcaagagaatcctatgctaacgtcactgacatccatgatggattggatttttcacagcatgaagatgttcaatattcatttggaatattttctgtaaaattttcctctgatggacgggaacttgttgctggcagcaatgatgactcaatatatgtctatgatcttcatgcaaacaaattgacattacgtttatctgctcatacatctgatgtcaatacagtagcatttgctgatgaaaccggccatctcatatattctggaagtgacgacactttatgcaagtctgcaggtctgggacaggcggtgtttgtccgcaggacaggctgccggagttttgactggacatttgcatgggataacacatattgatagtcgtggagatggccgaagtttcatatccaatggaaaagatcaagcaatcaaactgtgggatatcaggaaaatgatgtccaatgctgatagttgtgcagatggagccccagcctgggactacagatattcaaggtatccgcatcaacataaacagttaaagcatccgcatgatcagtcaatagcgacgtaccgtggacatacagtcctccggacattgatccgttgctacttttctccttcgtatagcactgggcaaaagtacatatatacagggtcgtatgattccaatgtttgcatctatgatgtggtaagtggatcccaggttgcgaagctgaaatggcatcaaatggcgattcgggactgcagttggcacccatttgagcccacgcttgtgagctcatcctgggacggccgggtagtgaaatggaccagcgcacgtgatgaaggggcttctgatgtcgattgagttgagtcgaccgtgcaggtgcagcgcgagtgatctttactgttcgtggttgtgggctaaaaaaaaacatacccaatcttgcactaaaaaaaaggagagtaagcacagctcgtaataaagaaagaagatcatgtgttgcagtggtaatttgtaaatgtaaatactgaactgaaaccatgtgggcaggaccgagtgcataagcacctttgtgaatatggttgttccataaagccttttccatgtcctttggagggagcgtgtttttgttggcatttggttttcgacgttccgttttttttgggtatgggtatgggcaatgcgctttttttagaagatgtttggtttctagggactaatttttagaaacggggagatctaggggtgcagagtactccaccagtttttctgatccaaccctcgcgccaaaactgcgagcgaggtgtcgcaaggcatgaaaag

SEQ ID NO: 76548 - DNA, 2163 bp, Zea Mays
gaaaaccctctacaagcccttttttttttgttatccggtccgcccaggctcttcccattctccggcgcttccctctgtcccttggctcgctctggcgtggttctcccgtcccctggtgcgtgcgcgcttctcgctctctcgtggcggcgactgggcgactatcgcctccgccctacaacagttgctcaggtcttctttgggcccttcgccggggacaagcacccaccggagaaaatcaataaatacatcggcctgaaagaatgggttatggcatgagtaggctagacgatgaatactatgaggctgaagggcagaatactggtggatctggctcagttcaagtgaacgatgagtttgcaacactacataatgatatttttcatatgacccgaatgagatcaggacttactgaaagctacaagtccatgggtaccaacagaggcataatatcaactgccaagttattatctcgaagggaaattgattgttctggaaaggggatgttctcttctggtgaccgtgcatttgttctaggtcgtcatgttccgatgaacaatcctgaattattggataggatggattctcgtgcttacgtttcacagttttctgctgatggtactctttttgttgctggttttcaggtatgctatgctcaaccaacaatagtcgaggttttaaacaagttcaagtcagaatttcctgggaagtcacataagaatatacgatgttgatagaggctggagcatacacaaagacattcatgctaggtgtttaagatggacaatcagtgatgtatccttatcacctgatcagcggtatcttgcctactctagtctggcacctattatccatattgtcaatgttgggaatgcggcaagagaatcctatgctaacgtcactgacatccatgatggattggatttttcacagcatgaagatgttcaatattcatttggaatattttctgtaaaattttcctctgatggacgggaacttgttgctggcagcaatgatgactcaatatatgtctatgatcttcatgcaaacaaattgacattacgtttatctgctcatacatctgatgtcaatacagtagcatttgctgatgaaaccggccatctcatatattctggaagtgacgacactttatgcaaggtctgggacaggcggtgtttgtccgcaggacaggctgccggagttttgactggacatttgcatgggataacacatattgatagtcgtggagatggccgaagtttcatatccaatggaaaagatcaagcaatcaaactgtgggatatcaggaaaatgatgtccaatgctgatagttgtgcagatggagccccagcctgggactacagatattcaaggtatccgcatcaacataaacagttaaagcatccgcatgatcagtcaatagcgacgtaccgtggacatacagtcctccggacattgatccgttgctacttttctccttcgtatagcactgggcaaaagtacatatatacagggtcgtatgattccaatgtttgcatctatgatgtggtaagtggatcccaggttgcgaagctgaaatggcatcaaatggcgattcgggactgcagttggcacccatttgagcccacgcttgtgagctcatcctgggacggccgggtagtgaaatggaccagcgcacgtgatgaaggggcttctgatgtcgattgagttgagtcgaccgtgcaggtgcagcgcgagtgatctttactgttcgtggttgtgggctaaaaaaaaacatacccaatcttgcactaaaaaaaaggagagtaagcacagctcgtaataaagaaagaagatcatgtgttgcagtggtaatttgtaaatgtaaatactgaactgaaaccatgtgggcaggaccgagtgcataagcacctttgtgaatatggttgttccataaagccttttccatgtcctttggagggagcgtgtttttgttggcatttggttttcgacgttccgttttttttgggtatgggtatgggcaatgcgctttttttagaagatgtttggtttctagggactaatttttagaaacggggagatctaggggtgcagagtactccaccagtttttctgatccaaccctcgcgccaaaactgcgagcgaggtgtcgcaaggcatgaaaag

SEQ ID NO: 76549 - DNA, 1786 bp, Zea Mays
gactgtgtgtgcaaagaaccgcttgctaccagcaagaaaaccctctacaagcccttttttttttgttatccggtccgcccaggctcttcccattctccggcgcttccctctgtcccttggctcgctctggcgtggttctcccgtcccctggtgcgtgcgcgcttctcgctctctcgtggcggcgactgggcgactatcgcctccgccctacaacagttgctcaggtcttctttgggcccttcgccggggacaagcacccaccgggtatgctatgctcaaccaacaatagtcgaggttttaaacaagttcaagtcagaatttcctgggaagtcacataagaatatacgatgttgatagaggctggagcatacacaaagacattcatgctaggtgtttaagatggacaatcagtgatgtatccttatcacctgatcagcggtatcttgcctactctagtctggcacctattatccatattgtcaatgttgggaatgcggcaagagaatcctatgctaacgtcactgacatccatgatggattggatttttcacagcatgaagatgttcaatattcatttggaatattttctgtaaaattttcctctgatggacgggaacttgttgctggcagcaatgatgactcaatatatgtctatgatcttcatgcaaacaaattgacattacgtttatctgctcatacatctgatgtcaatacagtagcatttgctgatgaaaccggccatctcatatattctggaagtgacgacactttatgcaaggtctgggacaggcggtgtttgtccgcaggacaggctgccggagttttgactggacatttgcatgggataacacatattgatagtcgtggagatggccgaagtttcatatccaatggaaaagatcaagcaatcaaactgtgggatatcaggaaaatgatgtccaatgctgatagttgtgcagatggagccccagcctgggactacagatattcaaggtatccgcatcaacataaacagttaaagcatccgcatgatcagtcaatagcgacgtaccgtggacatacagtcctccggacattgatccgttgctacttttctccttcgtatagcactgggcaaaagtacatatatacagggtcgtatgattccaatgtttgcatctatgatgtggtaagtggatcccaggttgcgaagctgaaatggcatcaaatggcgattcgggactgcagttggcacccatttgagcccacgcttgtgagctcatcctgggacggccgggtagtgaaatggaccagcgcacgtgatgaaggggcttctgatgtcgattgagttgagtcgaccgtgcaggtgcagcgcgagtgatctttactgttcgtggttgtgggctaaaaaaaaacatacccaatcttgcactaaaaaaaaggagagtaagcacagctcgtaataaagaaagaagatcatgtgttgcagtggtaatttgtaaatgtaaatactgaactgaaaccatgtgggcaggaccgagtgcataagcacctttgtgaatatggttgttccataaagccttttccatgtcctttggagggagcgtgtttttgttggcatttggttttcgacgttccgttttttttgggtatgggtatgggcaatgcgctttttttagaagatgtttggtttctagggactaatttttagaaacggggagatctaggggtgcagagtactccaccagtttttctgatccaaccctcgcgccaaaactgcgagcgaggtgtcgcaaggcatgaaaag

SEQ ID NO: 76550 - DNA, 2251 bp, Zea Mays
ccgcgagcatcatcaccaatgcatatcgtagtgattgacggttagatcggcgccaacaaatactaatggcaaatctctcccgttcatcactttgttttcttatgcgtgaggtgtgactgtgtgtgcaaagaaccgcttgctaccagcaagaaaaccctctacaagcccttttttttttgttatccggtccgcccaggctcttcccattctccggcgcttccctctgtcccttggctcgctctggcgtggttctcccgtcccctggtgcgtgcgcgcttctcgctctctcgtggcggcgactgggcgactatcgcctccgccctacaacagttgctcaggtcttctttgggcccttcgccggggacaagcacccaccggagaaaatcaataaatacatcggcctgaaagaatgggttatggcatgagtaggctagacgatgaatactatgaggctgaagggcagaatactggtggatctggctcagttcaagtgaacgatgagtttgcaacactacataatgatatttttcatatgacccgaatgagatcaggacttactgaaagctacaagtccatgggtaccaacagaggcataatatcaactgccaagttattatctcgaagggaaattgattgttctggaaaggggatgttctcttctggtgaccgtgcatttgttctaggtcgtcatgttccgatgaacaatcctgaattattggataggatggattctcgtgcttacgtttcacagttttctgctgatggtactctttttgttgctggttttcagggaagtcacataagaatatacgatgttgatagaggctggagcatacacaaagacattcatgctaggtgtttaagatggacaatcagtgatgtatccttatcacctgatcagcggtatcttgcctactctagtctggcacctattatccatattgtcaatgttgggaatgcggcaagagaatcctatgctaacgtcactgacatccatgatggattggatttttcacagcatgaagatgttcaatattcatttggaatattttctgtaaaattttcctctgatggacgggaacttgttgctggcagcaatgatgactcaatatatgtctatgatcttcatgcaaacaaattgacattacgtttatctgctcatacatctgatgtcaatacagtagcatttgctgatgaaaccggccatctcatatattctggaagtgacgacactttatgcaaggtctgggacaggcggtgtttgtccgcaggacaggctgccggagttttgactggacatttgcatgggataacacatattgatagtcgtggagatggccgaagtttcatatccaatggaaaagatcaagcaatcaaactgtgggatatcaggaaaatgatgtccaatgctgatagttgtgcagatggagccccagcctgggactacagatattcaaggtatccgcatcaacataaacagttaaagcatccgcatgatcagtcaatagcgacgtaccgtggacatacagtcctccggacattgatccgttgctacttttctccttcgtatagcactgggcaaaagtacatatatacagggtcgtatgattccaatgtttgcatctatgatgtggtaagtggatcccaggttgcgaagctgaaatggcatcaaatggcgattcgggactgcagttggcacccatttgagcccacgcttgtgagctcatcctgggacggccgggtagtgaaatggaccagcgcacgtgatgaaggggcttctgatgtcgattgagttgagtcgaccgtgcaggtgcagcgcgagtgatctttactgttcgtggttgtgggctaaaaaaaaacatacccaatcttgcactaaaaaaaaggagagtaagcacagctcgtaataaagaaagaagatcatgtgttgcagtggtaatttgtaaatgtaaatactgaactgaaaccatgtgggcaggaccgagtgcataagcacctttgtgaatatggttgttccataaagccttttccatgtcctttggagggagcgtgtttttgttggcatttggttttcgacgttccgttttttttgggtatgggtatgggcaatgcgctttttttagaagatgtttggtttctagggactaatttttagaaacggggagatctaggggtgcagagtactccaccagtttttctgatccaaccctcgcgccaaaactgcgagcgaggtgtcgcaaggcatgaaaag

SEQ ID NO: 76551 - DNA, 1045 bp, Zea Mays
ctctacaagcccttttttttttgttatccggtccgcccaggctcttcccattctccggcgcttccctctgtcccttggctcgctctggcgtggttctcccgtcccctggtgcgtgcgcgcttctcgctctctcgtggcggcgactgggcgactatcgcctccgccctacaacagttgctcaggtcttctttgggcccttcgccggggacaagcacccaccggagaaaatcaataaatacatcggcctgaaagaatgggttatggcatgagtaggctagacgatgaatactatgaggctgaagggcagaatactggtggatctggctcagttcaagtgaacgatgagtttgcaacactacataatgatatttttcatatgacccgaatgagatcaggacttactgaaagctacaagtccatgggtaccaacagaggcataatatcaactgccaagttattatctcgaagggaaattgattgttctggaaaggggatgttctcttctggtgaccgtgcatttgttctaggtcgtcatgttccgatgaacaatcctgaattattggataggatggattctcgtgcttacgtttcacagttttctgctgatggtactctttttgttgctggttttcaggtatgctatgctcaaccaacaatagtcgagggaagtcacataagaatatacgatgttgatagaggctggagcatacacaaagacattcatgctaggtgtttaagatggacaatcagtgatgtatccttatcacctgatcagcggtatcttgcctactctagtctggcacctattatccatattgtcaatgttgggaatgcggcaagagaatcctatgctaacgtcactgacatccatgatggattggatttttcacagcatgaagatgttcaatattcatttggaatattttctgtaaaattttcctctgatggacgggaacttgttgctggcagcaatgatgactcaatatatgtctatgatcttcatgcaaacaaattgacattacgtttatctgctcatacagtatga

SEQ ID NO: 76552 - DNA, 2591 bp, Zea Mays
taataacaataacacgattcatagagtgtgcgaaactaccagtaatagtacatcgaacacagcaacaaaaaaaggccagtgccagtccacccaccactgtactgtacaacacactgtagaatgttagacgatgaattccccctccggagcccggcccagaggggggcgcgcgattgaaggcgaaataaataaataggcttctctccatcaaccagggggggggggggggggggggcgccgcaggccgccgcagaccatcgagctttgtgatcagcggaacgtgagacttgacccgaccacgacgaatgaaacaaaaggtcaccgtgattcctttcctagctactagagttttgtcatcacaacatggggggaggcagctgcctgcctgtcctttttgagcgcaccacttgccttgccatggacagcagcacaaggaagagagcaagcagatcggtacaacgactgtaaagtcaggcttaccatcttcttgtcttgctataaaaacgagtgaagttttccgtggagacgacgacgacgaccatcaccaccaccaccaacgatcagcggctagctgtgtatgtactagaggttagccctgaggaagtcggctatctcctccatgacctcgtggtagtggttcgtgttgggcagcaggtagaagcccacggtggccttctcgcggtacacgagcttcacatggtgtccgtcctcccggaggccgtcggcgtaggccagctgccggtcgcaggtgaggtccaggcccgacacgatgatcaggctcctggggaagggcagccccgcgaggcgccgtccgttgggcccgaacgggttgcacgccgggtggtcccggtcggcgtcctcgggcaggtacgccttccagtaccagtccctgtcctggagcgtcacgaagtacttgccgtccagccgccgctccgactccgtgcgctcggcgccgccgaacatggcgttcagcagcacgttgccgcgcacgcggatcccggccacggccgcgcggacggccacgtggtgggcgatgttgccgccggagctgtcccccgacaggaacacgcgggcgcccccgctcgagccgctgccgagggaaggctgcgacgtcgcccacttgagcgccgcccacccgtcgtcgtacgcgcacgggtaccggtgctccggggcgcgccggtagttcaccgacaccaccacgcccttgctcagcctcaccagccgccggcacaggttgtcgtagatggccgtgccggacgacgagtgcgcgaagctgccgccgtggaagaagaggatgaccgggaacggcgtcgaaggtgccgtccgcccgccggagcatgttgtacgccagcttgaagttggagatgaggacccatgtgtggatcggcaccgccccctgcacaaccacaccacacaacaacaacaaggaacaaacatcagcagcaacagacagttcctcagcaacactcaaacctcctcctcatcacacacacacacacacgccaccctactcttttgcagtttcgtgagaacggcaatgcgagcggccaccggaccttcggccgccgcctgccactgccagcagaaaagatggaagctttggcaatgatttggtcgcttccgtcttgttgggtagccatttccgtgacacccctcgccactccctcccaaactccaaaaaaaaaacaacgggggcaagcgagaagaggataaatttgggattgagcccaaaggggaaaggagcgagcgattgacccgcgaaatcaccggccggcgctggccccgacccaccaccgccccaccgaaccatgcataaagcggcggcacaaatcgggaggcgcgccgccctggcgcatcccaacagaagaaacgcgcaaggacggcggcgcgcatgcccgcgcgaagaaactagtacgtacaggccccaggggacaggaggaagcagcagcggtagccgcttgcgcgcgcgcaccttgcactcgttgcggttgacctcgtcgctgccggccatggcggtgggcgccgctcggctccggaccggaccggaccgcaccgccggcttcactgctgcaagtgcaagatctctgccccccgggcaacaaaagcctggcttggctcaccacatgggcgccggaggcccgaccacggccacgggcaagtgatcccgctgaacccgagaccggcccgagcgcgacgcgccctcccgcgtccccgatctcctatctggggcaataagccccgcctctccaccaacctctgggctcgacgagccaagcaagcagaggccggggaacgagcagcgcgcgggcgcggtagtacgaggagctggagcagcagaagcgctgtaggctgtggtgtgtgtgtctgtgtgtgcaggcccggcacagcgggggaggcgagggagtgatggaggggaacaggaaggagggaaggggcgaggggtaatagcgaggtgcggagccggacgccggacggacggaggagacgacaaaaccgggcggctcaaaaagtaaaacccgcgggggatgcggggcctacacgcacgcacccaaccccccacttcttctccctacccaaacttgtcaatattt

SEQ ID NO: 76553 - DNA, 1071 bp, Zea Mays
cgacgcttgcacctgaagtcaccactattccagcaatgagacactgctgcgggacaactctgcgctgtccaacaccgttaggaagctgaacagagatgtcgccaagttggaagttttcaaaaagacacttgtgcagtcgctccaggaagatgacagcagtgataatactgctcccagggcaagcgttgcagcaacttcaaacttctctgcgccatcagattctgcatttccaacttccaaatcatcacagatttcagaaactgcgagttcagtttcagaggaaaatagccaagttgaaccagatgcacctaggccaccccgtccacatgtatttttgccgtcatacaacagcacaccaaggagaactcccccagactcacctccaaggcgttatgcatcggtatcaccgccgaggcgacattcaatctccgttacgtcgatgaatatgtttaatgacaggtcctcaggcttttctagtcagcatagctctccatttgaccctccaagtcaaacaggacgaacaagagttgatggaaaggagttctttcgtcatgtcagaaatcggttgtcgtatgagcagtttggtgcattcctggctaatgtgaaggagctgaacgcacacaggcagaccagagaggataccttaagaaaggctgatgagatctttggtcctgaaaacaaggacctgtacaccgtttttgagagcctaataactcgcaacattcgctaatctcctcaagggttgaagcattaccaatgattactagtgattcatgttttaccggtatattttggttacaatgttcaacactttttttgtatttgaagtctgtagtctgttgtggattcttggtatatagtctatagttctttctttttttttcatgctaatgtccatgtagagtcctctgtttctatgtaagctacaacttatattctaatacaaatgttgtctgatatttcttgaacataaataatagactagaaatgtgaaacaagtgtagaacaaaagtttcacgtccagcagagtatgtgaaatccattcaagataaattttattgcttactgaag

SEQ ID NO: 76554 - DNA, 1829 bp, Zea Mays
ttttagtagtttagctaataaatcttaggaacgttgcaaatggaaggagtaatgcaaatggaggttttcagaatgtcttgtccgtcatcaatgatgtacaatatggctctgtaaaggataatggtgaatatgaaaccaaatcggtggctcctttgtctgggttttacactgatacgagggaaacggttaacacaaatggtctagctacgcaaacattctctggacctggctcagctgttaatcttcagcaagtggggaagcgcaattctattgaatctcctaatgctgcaattttggctggcaaggcagagaatgatagcaatggctatatatccacgccacctgaaacaaatgcatctatcagatccttgagcagctattgtctcttggatggatctgttaacggaatgccgtctcctgcaaatagcgcatcatgcaagcctgaaacaaccaataattctgtgctcagcaatgttgcaagcactgacgtaacaaatgggtgtctcaccactgtcgattctggacagcaggaggcgtctgattctcacagctcagtggagtttacccagtatttccaagagggctattgtaaaatatcagaactcgatgactgccgtgagttaactgaagctgttactgatgctgacagcagcagcagccactgcgagagagagaagcctgaggaagatggggataacgatgacttgcttggaggagtttttgccttcagtgaagaaggttctacacttctacccatttattcatataagttataggtctccatctatctactgatactcatcttctgatttccgccccttatcacgttgcaggttgaacttactatagtgccttgagattgagatacaacagaaaaaaagtgctcaaaacatccagtgtgccatagtatgtagacgatggtgaaattctactaggttttcatggaataaagctgtgcggaatcgatcatctgccatggtacatagtacttttcaaggtaaaccttgcacctagttctcaaaatatgaggccaagattcctccaggcaatttactaatctgcggatccacgttgaaacttggaaggagttggtgttgtcgagaagttgctattgcctgccgcaacaccacttccttatagtgttggtttgtacatataccgtgagacccatttgtttcgtgccatacttccgttccggggcatttgggtggttctgaatcctgtaccttggcagccatatttgttgaccgtctctgccagggcctgtgaatgttccatgtttatttgtacatatacattgtgttttgtcggaaaaaaaggaaaaaaaatctagcgacaattgatgtgatataactttataaacattcagtaaagaaaattgcattcacgatgttatgcttatttgcatgtgctggggtcctgcgccagagtgtggcacttggatggagtcgcgaaagttcccaatctggtagacactccatgcttcggtgcttaccagtatccgtcccggtcaccgttttttttcttcttatgagtcaccacttgttctatgatattattattatctggtaatgagtcagctgttgcgttggatagaaggtaattgtacgcgttttatatgttctcttgagtaatattaaagaaacgtacctgtctcttaataaataaattcctagaaactaactctaacaaatcaatttctaaagttgtcttaaattatttttattttacgtttgatcaattttgtaggaaaaaactacaaacatcgtaccaaatgaacatattaataaaatataatgtatttaatctaagggagaattgcataggtg

SEQ ID NO: 76555 - DNA, 5577 bp, Zea Mays
atggtgctgctcgaggagcccgccgcgcaggccaagcgcctcctcgagcagcggcgtgccgacaaggcggagcgggccgccaagtccatctcccgcatcagcctcaacaagcttgccaccaaggcaaggaagggacgcggatgcatttgcggcagcgacgaggggggtgcatcgtgtggggtgggcgagcatcgtgcggggagggtgatggggccaagaacggacattattgcagttagactggagtggacaactgttgacatgatccttgatagcagggttcttagtgcctacctaactggggcaggaatgaacactgaatctgggattcttgattacatgagctattggctcaagctatcgatagattggaagttggacaaccaggttttagaagttggacaaccaggttcagacataagttttggaatgcagcaacaatctgatggtgatgttcccattgacgagaagttctgggagaaagattttgaaattcctagctgccatcaatgtggactgctaaagcctgatgagttgtgggactggtccggcatgacgctggttctcgatgtactgcttcgccgccaccaccttctgcttggtggcgctagacagcgcctcctcccccgccgcggcggccatcctcgcggagccaccggcgccgccgtctacgtggacgccaccgaggacgagctcttccgcctcaccaccaaggaggggaagttcaccgtggagcgcgagaaggtgaagatcgagatgcagcacttctcccccgtggtgcagttcgagcaggaccccgtgcagatcctagacacgctgctcccgctctacctcaatagccagctcctccgtgccctgcaggagtcgctcgctagcgagctcaccgcccggatgagcgccatgagcagcgccaccgacaatgccatcaagctccacaagaacctctcccgcagatcgatcctgctgctgggcgaaggcgctgattgcgggggcgggggcgtcggggcgagtggaggcgaaggctacggctgggggaagacgctgattgcggatggaggcgctgattgctcgttcccagatccagagcgtggggattgccggatgctggccacgtaccagcctgcatcgcgccatggtgcggaggtggaggggggagcggtgcatcgcgcagaagattttggcgagtggatcgcgctgggtccgacggcgagcagagaagagagcggggcgcagagatggcggccagagagcgcgcagatggtgggcgagagagacagcaaagaggagagttccttggaaccacgtggaccttccaaattctccttccatgatggcgggcgagagagcggagagcgggggcgccggcagaaccgggaaggggacaacgagcggcgaggtgggcaagcgaaggaaggagggatatggtggcaatctgagtctgcggatcgcggcggcggaggggatcggcgggagctgggaggcggcactcggatggtattgggtttcgccggcgccggaggcggcgatcgtggatgggcagcggcggggtcgcggggcgtgggttgtaggagcggtggcggtggggaagccagagtcggagcgggtgcttgcgctggtctccgcgctggggaggaggggagggagcggcgggtagggatgaagcgggggaagggggcaaggaatgggttgctgccgagctcgctgcggatcatatcgtcctgcctcaagacggtgacctccaacgctggctccgtcgcgtctaccgtgcgctcggcgggcgcctccgtcgccgcctccatctcctccccttccgaggacgagaaggaccaggttttgtgggctggatttgataaactggagcttcaaccatcatcattcaagcatgtcctgcttgttggttattcaaatgggtttcaagtgctcgatgttgaggatgctgcaaatgtttgcgagttggtctcaaaacgtgatggcccagttacgtttttacaaatgcaacccactccagttagctctgaaggcattgaaggattcagagcatcccatcccatgcttctagttgttgctggtgatgagacaaatggcctgggtgcggttcaaggtggtcgcttaagtgctcttatcagagacacaaacagtgagcctcaagctggaagttgcatttctaccccaacggttgtccgtttctactctttgaagtctcacacctatgtacacgttcttcgattccggtctgctgtatatttagttcgctgcagtccaaggattgttgctgtagcacttgcagcacaaatctactgctttgatgctgttactcttgagaacaagctcagcgtcttgtcatatcctctgcaaggtgcacctggggtaaatattgggtatggcccgatggctgttggccccagatggttagcctatgccacaaatactcctttattgtcaaacacaggccgtctaagtccacagaacctcacaccttcaccaggagtgagcccatctacttctcctagcagtggcagtttagttgctagatatgcaatggagtccagcaagcaattagcttctggtattattgacatgggatataaaacattttcaaagtaccgccaggaacttctaccagatggttctaactcccctttgtcatcaagcccaggcaggagatctggtaaaattccttccagtgtgcatccactggaagctgacaatgcaggaatggtagtcatcaaggatttcacttccaaagctgtggtctcacagtttagggctcacacaagtcctatatctgctctttgttttgatcctagtggaacacttttggtgacaacctctgttcatggccataacataaatgttttcaggatcatgccaacttgcgttgctaatggcacaggcgcaacgcgctatgattggacagcatctcatgttcatctttataaactgtatcgtggcatgacatcagctgtcatacaagacatctcgtttagtcattttagccaatggatatctattgtttcatctcgtggtacctgccatatttttacattgtccccatttggtggtgatgccagcctgcagccacagaattctcacagtgatgggccacctcttgcgccatgtcagtcaaggccatggtggtcaaagccgtcctttctgatggaccaacagcttcatcaagttccctcaactgtgacaaattcggtagtcagtaggataaagaataacaattctggttggctaaatactgtcagcaatgtggctgcttctgcaagtggaaaactatctgtaccatctggcgctgtaactgctgtttttcataattccatctaccagggttctttgccagttccatctaaggctaatgctttagaacatctactggtgtattcgccatctggtcatgttattcaacatgaacttttaccttcttcaggttctgagtcctctggtagcagcccaagagttggttcaggtcataactcgcaactccaagatgatgagatgcatgttactgctgaaccaattcaatggtgggatgtgtgccgtaggacaaactggcccgaaagagatgaaaacattgcaaacattgtactgtataaccaaagaagcagtatgatggctatggatgtttctgactgtgaagatagcgagcattcggattccactgcatcaaatgatggtatctctgggaaagagattatgagagtccgagaaaggtcaagctggtatctatctaatgcagaagtacagataaactcatggcggattcccatctggcagaaatctaagatttgcttctatgtgatggaccatcctgctgcagagtcggtcgaatcagttagcagtggtggagaaattgagatcgagaagttacctcttcatgaggttgagatcaggagaagggaattgctccctgtattcaagcagttcctatattctgagcgacattctagtgataggaacgttgcaaatggaaggagtaatgcaaatggaggttttcagaatgtcttgtccgtcatcaatgatgtacaatatggctctgtaaaggataatggtgaatatgaaaccaaatcggtggctcctttgtctgggttttacactgatacgagggaaacggttaacacaaatggtctagctacgcaaacattctctggacctggctcagctgttaatcttcagcaagtggggaagcgcaattctattgaatctcctaatgctgcaattttggctggcaaggcagagaatgatagcaatggctatatatccacgccacctgaaacaaatgcatctatcagatccttgagcagctattgtctcttggatggatctgttaacggaatgccgtctcctgcaaatagcgcatcatgcaagcctgaaacaaccaataattctgtgctcagcaatgttgcaagcactgacgtaacaaatgggtgtctcaccactgtcgattctggacagcaggaggcgtctgattctcacagctcagtggagtttacccagtatttccaagagggctattgtaaaatatcagaactcgatgactgccgtgagttaactgaagctgttactgatgctgacagcagcagcagccactgcgagagagagaagcctgaggaagatggggataacgatgacttgcttggaggagtttttgccttcagtgaagaaggttgaacttactatagtgccttgagattgagatacaacagaaaaaaagtgctcaaaacatccagtgtgccatagtatgtagacgatggtgaaattctactaggttttcatggaataaagctgtgcggaatcgatcatctgccatggtacatagtacttttcaaggagttggtgttgtcgagaagttgctattgcctgccgcaacaccacttccttatagtgttggtttgtacatataccgtgagacccatttgtttcgtgccatacttccgttccggggcatttgggtggttctgaatcctgtaccttggcagccatatttgttgaccgtctctgccagggcctgtgaatgttccatgtttatttgtacatatacattgtgttttgtcggaaaaaaaggaaaaaaaatctagcgacaattgatgtgatataactttataaacattcagtaaagaaaattgcattcacgatgttatgcttatttgcatgtgctggggtcctgcgccagagtgtggcacttggatggagtcgcgaaagttcccaatctggtagacactccatgcttcggtgcttaccagtatccgtcccggtcaccgttttttttcttcttatgagtcaccacttgttctatgatattattattatctggtaatgagtcagctgttgcgttggatagaaggtaattgtacgcgttttatatgttctcttgagtaatattaaagaaacgtacctgtctcttaataaataaattcctagaaactaactctaacaaatcaatttctaaagttgtcttaaattatttttattttacgtttgatcaattttgtaggaaaaaactacaaacatcgtaccaaatgaacatattaataaaatataatgtatttaatctaagggagaattgcataggtg

SEQ ID NO: 76556 - DNA, 5234 bp, Zea Mays
atggtgctgctcgaggagcccgccgcgcaggccaagcgcctcctcgagcagcggcgtgccgacaaggcggagcgggccgccaagtccatctcccgcatcagcctcaacaagcttgccaccaaggcaaggaagggacgcggatgcatttgcggcagcgacgaggggggtgcatcgtgtggggtgggcgagcatcgtgcggggagggtgatggggccaagaacggacattattgcagttagactggagtggacaactgttgacatgatccttgatagcagggttcttagtgcctacctaactggggcaggaatgaacactgaatctgggattcttgattacatgagctattggctcaagctatcgatagattggaagttggacaaccaggttttagaagttggacaaccaggttcagacataagttttggaatgcagcaacaatctgatggtgatgttcccattgacgagaagttctgggagaaagattttgaaattcctagctgccatcaatgtggactgctaaagcctgatgagttgtgggactggtccggcatgacgctggttctcgatgtactgcttcgccgccaccaccttctgcttggtggcgctagacagcgcctcctcccccgccgcggcggccatcctcgcggagccaccggcgccgccgtctacgtggacgccaccgaggacgagctcttccgcctcaccaccaaggaggggaagttcaccgtggagcgcgagaaggtgaagatcgagatgcagcacttctcccccgtggtgcagttcgagcaggaccccgtgcagatcctagacacgctgctcccgctctacctcaatagccagctcctccgtgccctgcaggagtcgctcgctagcgagctcaccgcccggatgagcgccatgagcagcgccaccgacaatgccatcaagctccacaagaacctctcccgcagatcgatcctgctgctgggcgaaggcgctgattgcgggggcgggggcgtcggggcgagtggaggcgaaggctacggctgggggaagacgctgattgcggatggaggcgctgattgctcgttcccagatccagagcgtggggattgccggatgctggccacgtaccagcctgcatcgcgccatggtgcggaggtggaggggggagcggtgcatcgcgcagaagattttggcgagtggatcgcgctgggtccgacggcgagcagagaagagagcggggcgcagagatggcggccagagagcgcgcagatggtgggcgagagagacagcaaagaggagagttccttggaaccacgtggaccttccaaattctccttccatgatggcgggcgagagagcggagagcgggggcgccggcagaaccgggaaggggacaacgagcggcgaggtgggcaagcgaaggaaggagggatatggtggcaatctgagtctgcggatcgcggcggcggaggggatcggcgggagctgggaggcggcactcggatggtattgggtttcgccggcgccggaggcggcgatcgtggatgggcagcggcggggtcgcggggcgtgggttgtaggagcggtggcggtggggaagccagagtcggagcgggtgcttgcgctggtctccgcgctggggaggaggggagggagcggcgggtagggatgaagcgggggaagggggcaaggaatgggttgctgccgagctcgctgcggatcatatcgtcctgcctcaagacggtgacctccaacgctggctccgtcgcgtctaccgtgcgctcggcgggcgcctccgtcgccgcctccatctcctccccttccgaggacgagaaggaccaggttttgtgggctggatttgataaactggagcttcaaccatcatcattcaagcatgtcctgcttgttggttattcaaatgggtttcaagtgctcgatgttgaggatgctgcaaatgtttgcgagttggtctcaaaacgtgatggcccagttacgtttttacaaatgcaacccactccagttagctctgaaggcattgaaggattcagagcatcccatcccatgcttctagttgttgctggtgatgagacaaatggcctgggtgcggttcaaggtggtcgcttaagtgctcttatcagagacacaaacagtgagcctcaagctggaagttgcatttctaccccaacggttgtccgtttctactctttgaagtctcacacctatgtacacgttcttcgattccggtctgctgtatatttagttcgctgcagtccaaggattgttgctgtagcacttgcagcacaaatctactgctttgatgctgttactcttgagaacaagctcagcgtcttgtcatatcctctgcaaggtgcacctggggtaaatattgggtatggcccgatggctgttggccccagatggttagcctatgccacaaatactcctttattgtcaaacacaggccgtctaagtccacagaacctcacaccttcaccaggagtgagcccatctacttctcctagcagtggcagtttagttgctagatatgcaatggagtccagcaagcaattagcttctggtattattgacatgggatataaaacattttcaaagtaccgccaggaacttctaccagatggttctaactcccctttgtcatcaagcccaggcaggagatctggtaaaattccttccagtgtgcatccactggaagctgacaatgcaggaatggtagtcatcaaggatttcacttccaaagctgtggtctcacagtttagggctcacacaagtcctatatctgctctttgttttgatcctagtggaacacttttggtgacaacctctgttcatggccataacataaatgttttcaggatcatgccaacttgcgttgctaatggcacaggcgcaacgcgctatgattggacagcatctcatgttcatctttataaactgtatcgtggcatgacatcagctgtcatacaagacatctcgtttagtcattttagccaatggatatctattgtttcatctcgtggtacctgccatatttttacattgtccccatttggtggtgatgccagcctgcagccacagaattctcacagtgatgggccacctcttgcgccatgtcagtcaaggccatggtggtcaaagccgtcctttctgatggaccaacagcttcatcaagttccctcaactgtgacaaattcggtagtcagtaggataaagaataacaattctggttggctaaatactgtcagcaatgtggctgcttctgcaagtggaaaactatctgtaccatctggcgctgtaactgctgtttttcataattccatctaccagggttctttgccagttccatctaaggctaatgctttagaacatctactggtgtattcgccatctggtcatgttattcaacatgaacttttaccttcttcaggttctgagtcctctggtagcagcccaagagttggttcaggtcataactcgcaactccaagatgatgagatgcatgttactgctgaaccaattcaatggtgggatgtgtgccgtaggacaaactggcccgaaagagatgaaaacattgcaaacattgtactgtataaccaaagaagcagtatgatggctatggatgtttctgactgtgaagatagcgagcattcggattccactgcatcaaatgatggtatctctgggaaagagattatgagagtccgagaaaggtcaagctggtatctatctaatgcagaagtacagataaactcatggcggattcccatctggcagaaatctaagatttgcttctatgtgatggaccatcctgctgcagagtcggtcgaatcagttagcagtggtggagaaattgagatcgagaagttacctcttcatgaggttgagatcaggagaagggaattgctccctgtattcaagcagttcctatattctgagcgacattctagtgataggaacgttgcaaatggaaggagtaatgcaaatggaggttttcagaatgtcttgtccgtcatcaatgatgtacaatatggctctgtaaaggataatggtgaatatgaaaccaaatcggtggctcctttgtctgggttttacactgatacgagggaaacggttaacacaaatggtctagctacgcaaacattctctggacctggctcagctgttaatcttcagcaagtggggaagcgcaattctattgaatctcctaatgctgcaattttggctggcaaggcagagaatgatagcaatggctatatatccacgccacctgaaacaaatgcatctatcagatccttgagcagctattgtctcttggatggatctgttaacggaatgccgtctcctgcaaatagcgcatcatgcaagcctgaaacaaccaataattctgtgctcagcaatgttgcaagcactgacgtaacaaatgggtgtctcaccactgtcgattctggacagcaggaggcgtctgattctcacagctcagtggagtttacccagtatttccaagagggctattgtaaaatatcagaactcgatgactgccgtgagttaactgaagctgttactgatgctgacagcagcagcagccactgcgagagagagaagcctgaggaagatggggataacgatgacttgcttggaggagtttttgccttcagtgaagaaggttgaacttactatagtgccttgagattgagatacaacagaaaaaaagtgctcaaaacatccagtgtgccatagtatgtagacgatggtgaaattctactaggttttcatggaataaagctgtgcggaatcgatcatctgccatggtacatagtacttttcaagagtgtggcacttggatggagtcgcgaaagttcccaatctggtagacactccatgcttcggtgcttaccagtatccgtcccggtcaccgttttttttcttcttatgagtcaccacttgttctatgatattattattatctggtaatgagtcagctgttgcgttggatagaaggtaattgtacgcgttttatatgttctcttgagtaatattaaagaaacgtacctgtctcttaataaataaattcctagaaactaactctaacaaatcaatttctaaagttgtcttaaattatttttattttacgtttgatcaattttgtaggaaaaaactacaaacatcgtaccaaatgaacatattaataaaatataatgtatttaatctaagggagaattgcataggtg

SEQ ID NO: 76557 - DNA, 4065 bp, Zea Mays
cggagacggagtagaaccgcgcagcgaagcagcagcggcaccaaaagccctcgcgttggtcgcggctgccgcccgccgcccaccgccggtcgccactgccggtcgagtcccatcgagccgagtcgctccgcagcgctctccgatccgggtggctgcggcgccggcatggcgcggttcgaggtgaacggcaagtcggtgcaaggcgtggacctgctgcggcggcgccactgggcgtcgcgtctcgacttctggcccttcctcgcgctctatgcgctttggctgctgctcgccgtcccggcgctcgacttcaccgatgctctcatagtcctggccgcgctctccgctgctcacatcctcgccttcctcttcacggcctggttcgtcgatttccgggccttcatcgggtactccaaggtcaagaatatctgtgccgctaacgtgtgtaaggtgactccggctaagtttttggggtcaaaggagattgtacccctgcacatacagagaaatgtggcctcaacttcggttgcaggtgagacagcggagatttactttgattttcggaagcagaggttcatctactctgcggagaaagataactttttaaaactccggtacccaacaaaggagttgatcagtcattatgccaagggcactggttatggaactgaggccaagattagcactgctgtggataagtggggtagaaatgtatttgagtatccacagcccacatttcagaaattaatgaaagagcaaataatggaaccattttttgttttccagtttgtttacacttttcatgcttttcctgtttgagtctactatggcaaagaataggctgaagacattgactgagctaagacgtgtgaaagttgatagccagattgtgttgacctatagatgtggaaaatgggttaaaattcctgggactgaactactaccaggagatattgtgtcaataggccgctcaactagtggtgaagatagatctgtaccagcagatatgctattgttagctgggtctgcaatagtaaatgaagctattcttacaggagaatctactccacagtggaaggtctcaattgctggacgtagtcctgatgatatgctatctataaagcgggataagaaccatatcctatttggtggcactaaagtattgcaacacactgcagataagtctgtaaatcttcgagcacctgatggtggctgtctagcttttgtattgaggactggatttgagactagccaagggaaattgatgaggactatcttattttcaactgagagggttactgcaaataacaaggaaagtggcctgtttatactctttttgctcttctttgcaattattgcgtctggttatgtgcttgtgaagggactagaggacccaacaaggagtagatataaacttttattgagttgttcattgattattacttctgtgatacccccggaattgccaatggaactttccatagcagtcaacacatctttaattgcattggctcggcgtggtattttctgcacagagccattcagaataccgttcgctgggaaggttgacatatgctgctttgataagacagggactctgacatcagatgatatggagttccaaggtattgttactttggaagatgacactgagttaatatctgatgcaaataagctgcccctccgaactcaagaagtactttccagttgtcatgcattggtatttgtcgacaacaagctggttggtgatcccctcgaaaaggctgctataaagggcatagactggatctacacatctgatgagaaggccatgtctaaaaggcctggtggtcaacctgtacagattgtgcacaggtaccattttgcttctcacttgaagagaatgtctgttattgtccgtattcaggaaaggttttacgctttcattaagggtgcacctgagactatccaagagagattagttgatttacctgctgcatatgtggagacatataagaaatacacacggcaaggttctcgggtcttggctcttgcatacaaattgcttcctgagatgcctgttagcgaagctagaagtttggaaagggatcaagtagagagcgacctaacgtttgctggctttgcggtcttcaactgccctataaggggtgactctggtgctgttttacaagaactcggacaatcttcccatgacttggtcatgatcaccggagaccaagcgttgactgcctgtcatgttgctagccaagtacatatatcttccaaacctgttttgatcttgacacggataaagactggcggttttgagtgggtttcgccagatgaaactgatagagctccatatagtgctgtggaggttgcagtgttatcagaatctcatgacctttgtattaatggggactgttttgaaatgctacaaagtactgaggctgttctccaggttatcccttatgtgaaggttttttcacgtgttgctccagaacaaaaagaacttgtactaactacattcaaaagtgttgggagggtgacactgatgtgtggagatggaaccaatgatgttggtgcactgaagcaggcacatgttggcattgctcttttgaatgctgaaccagttcagaaagtcaactcaaaatccaaagctgaaaataaatctgggaaattgaaaaaacagaagcctggtaatgaagcatcatcacgagtgactccggcaaccaatagttctgctaaagcatcgagcagccgccccttgactgctgctgagagacagcaagaaaagttgcagaaattgttggatgaaatgaatgatgaaagtgatggccgctcagcaccaattgttaagcttggtgatgcttctatggcttcacctttcacagcaaagcatgcctctgttgcccctactcttgacatcatccgtcaggggagaagcaccctagtcactacacttcaaatgttcaagattcttgggctcaattgccttgcaacggcttatgttctcagtgtcatgtacctggatggtgtcaaactgggcgatgttcaggctacaattagtggtgtctttactgcagccttcttcctcttcatctcccatgcccggccactccaaacgctgtctgcagagcggccgcaccctaacatattctgtgcatacgttctgctctccattcttggccagttcgccatgcacatactcttccttatcacagctgtcaatgaagcatccaagcatatgccagaggaatgcatcgaacccgactcagacttccatccaaaccttgtgaatacagtctcgtacatggtgaacatgatgatccaggtggcaacctttgctgtaaactacatgggccacccatttaatcagagcatatcggagaacaagcccttcaagtacgcattgtatggagcggttgctttcttcacagtgatcacatcagatatgttcagggatttgaatgactacatgaagcttgagcctttgccggagggaatgcgtggcaagttgatgttgtgggctattctaatgttttgtggttgctacggatgggagtggctcctccgatgggtgttcccagggaagatgccggcgtgggagaagcgtcagaaacaggcagttgcaaacttggagaaaaagcgcgactagaatccttttttattatttgcactttattctttaccttttgctgctgcccattggttacttggcagtacatactgatcatgttttgtcatagttgcattctaatctgtagcctaggggaattttttggagtgtaggccctaaatgataggaggatacacagggtcggcactttgcatactggtcagcaggattattaaaactttcagttacaatatgaaatcttatatttagatggcaatgatatcggatgatgtacaatgcaaaatacagaagctatcttaggctttcattcttttgctgttatgatcttagtggccctttggaggtacattgtaatgtcgatcattgaaaactcgagtttctgggttgtttcgaagaagatctgtttcagtgtatcattagttgatttggtgaaagctctgcttgataac

SEQ ID NO: 76558 - DNA, 4090 bp, Zea Mays
cggagacggagtagaaccgcgcagcgaagcagcagcggcaccaaaagccctcgcgttggtcgcggctgccgcccgccgcccaccgccggtcgccactgccggtcgagtcccatcgagccgagtcgctccgcagcgctctccgatccgggtggctgcggcgccggcatggcgcggttcgaggtgaacggcaagtcggtgcaaggcgtggacctgctgcggcggcgccactgggcgtcgcgtctcgacttctggcccttcctcgcgctctatgcgctttggctgctgctcgccgtcccggcgctcgacttcaccgatgctctcatagtcctggccgcgctctccgctgctcacatcctcgccttcctcttcacggcctggttcgtcgatttccgggccttcatcgggtactccaaggtcaagaatatctgtgccgctaacgtgtgtaaggtgactccggctaagtttttggggtcaaaggagattgtacccctgcacatacagagaaatgtgagacagcggagatttactttgattttcggaagcagaggttcatctactctgcggagaaagataactttttaaaactccggtacccaacaaaggagttgatcagtcattatgccaagggcactggttatggaactgaggccaagattagcactgctgtggataagtggggtagaaatgtatttgagtatccacagcccacatttcagaaattaatgaaagagcaaataatggaaccattttttgttttccaggttttttgtgttgttctttggtgcctggatgagtattggtactacagtttgtttacacttttcatgcttttcctgtttgagtctactatggcaaagaataggctgaagacattgactgagctaagacgtgtgaaagttgatagccagattgtgttgacctatagatgtggaaaatgggttaaaattcctgggactgaactactaccaggagatattgtgtcaataggccgctcaactagtggtgaagatagatctgtaccagcagatatgctattgttagctgggtctgcaatagtaaatgaagctattcttacaggagaatctactccacagtggaaggtctcaattgctggacgtagtcctgatgatatgctatctataaagcgggataagaaccatatcctatttggtggcactaaagtattgcaacacactgcagataagtctgtaaatcttcgagcacctgatggtggctgtctagcttttgtattgaggactggatttgagactagccaagggaaattgatgaggactatcttattttcaactgagagggttactgcaaataacaaggaaagtggcctgtttatactctttttgctcttctttgcaattattgcgtctggttatgtgcttgtgaagggactagaggacccaacaaggagtagatataaacttttattgagttgttcattgattattacttctgtgatacccccggaattgccaatggaactttccatagcagtcaacacatctttaattgcattggctcggcgtggtattttctgcacagagccattcagaataccgttcgctgggaaggttgacatatgctgctttgataagacagggactctgacatcagatgatatggagttccaaggtattgttactttggaagatgacactgagttaatatctgatgcaaataagctgcccctccgaactcaagaagtactttccagttgtcatgcattggtatttgtcgacaacaagctggttggtgatcccctcgaaaaggctgctataaagggcatagactggatctacacatctgatgagaaggccatgtctaaaaggcctggtggtcaacctgtacagattgtgcacaggtaccattttgcttctcacttgaagagaatgtctgttattgtccgtattcaggaaaggttttacgctttcattaagggtgcacctgagactatccaagagagattagttgatttacctgctgcatatgtggagacatataagaaatacacacggcaaggttctcgggtcttggctcttgcatacaaattgcttcctgagatgcctgttagcgaagctagaagtttggaaagggatcaagtagagagcgacctaacgtttgctggctttgcggtcttcaactgccctataaggggtgactctggtgctgttttacaagaactcggacaatcttcccatgacttggtcatgatcaccggagaccaagcgttgactgcctgtcatgttgctagccaagtacatatatcttccaaacctgttttgatcttgacacggataaagactggcggttttgagtgggtttcgccagatgaaactgatagagctccatatagtgctgtggaggttgcagtgttatcagaatctcatgacctttgtattaatggggactgttttgaaatgctacaaagtactgaggctgttctccaggttatcccttatgtgaaggttttttcacgtgttgctccagaacaaaaagaacttgtactaactacattcaaaagtgttgggagggtgacactgatgtgtggagatggaaccaatgatgttggtgcactgaagcaggcacatgttggcattgctcttttgaatgctgaaccagttcagaaagtcaactcaaaatccaaagctgaaaataaatctgggaaattgaaaaaacagaagcctggtaatgaagcatcatcacgagtgactccggcaaccaatagttctgctaaagcatcgagcagccgccccttgactgctgctgagagacagcaagaaaagttgcagaaattgttggatgaaatgaatgatgaaagtgatggccgctcagcaccaattgttaagcttggtgatgcttctatggcttcacctttcacagcaaagcatgcctctgttgcccctactcttgacatcatccgtcaggggagaagcaccctagtcactacacttcaaatgttcaagattcttgggctcaattgccttgcaacggcttatgttctcagtgtcatgtacctggatggtgtcaaactgggcgatgttcaggctacaattagtggtgtctttactgcagccttcttcctcttcatctcccatgcccggccactccaaacgctgtctgcagagcggccgcaccctaacatattctgtgcatacgttctgctctccattcttggccagttcgccatgcacatactcttccttatcacagctgtcaatgaagcatccaagcatatgccagaggaatgcatcgaacccgactcagacttccatccaaaccttgtgaatacagtctcgtacatggtgaacatgatgatccaggtggcaacctttgctgtaaactacatgggccacccatttaatcagagcatatcggagaacaagcccttcaagtacgcattgtatggagcggttgctttcttcacagtgatcacatcagatatgttcagggatttgaatgactacatgaagcttgagcctttgccggagggaatgcgtggcaagttgatgttgtgggctattctaatgttttgtggttgctacggatgggagtggctcctccgatgggtgttcccagggaagatgccggcgtgggagaagcgtcagaaacaggcagttgcaaacttggagaaaaagcgcgactagaatccttttttattatttgcactttattctttaccttttgctgctgcccattggttacttggcagtacatactgatcatgttttgtcatagttgcattctaatctgtagcctaggggaattttttggagtgtaggccctaaatgataggaggatacacagggtcggcactttgcatactggtcagcaggattattaaaactttcagttacaatatgaaatcttatatttagatggcaatgatatcggatgatgtacaatgcaaaatacagaagctatcttaggctttcattcttttgctgttatgatcttagtggccctttggaggtacattgtaatgtcgatcattgaaaactcgagtttctgggttgtttcgaagaagatctgtttcagtgtatcattagttgatttggtgaaagctctgcttgataac

SEQ ID NO: 76559 - DNA, 4079 bp, Zea Mays
cggagacggagtagaaccgcgcagcgaagcagcagcggcaccaaaagccctcgcgttggtcgcggctgccgcccgccgcccaccgccggtcgccactgccggtcgagtcccatcgagccgagtcgctccgcagcgctctccgatccgggtggctgcggcgccggcatggcgcggttcgaggtgaacggcaagtcggtgcaaggcgtggacctgctgcggcggcgccactgggcgtcgcgtctcgacttctggcccttcctcgcgctctatgcgctttggctgctgctcgccgtcccggcgctcgacttcaccgatgctctcatagtcctggccgcgctctccgctgctcacatcctcgccttcctcttcacggcctggttcgtcgatttccgggccttcatcgggtactccaaggtcaagaatatctgtgccgctaacgtgtgtaaggtgactccggctaagtttttggggtcaaaggagattgtacccctgcacatacagagaaatgtggcctcaacttcggttgcaggtgagacagcggagatttactttgattttcggaagcagaggttcatctactctgcggagaaagataactttttaaaactccggtacccaacaaaggagttgatcagtcattatgccaagggcactggttatggaactgaggccaagattagcacttatccacagcccacatttcagaaattaatgaaagagcaaataatggaaccattttttgttttccaggttttttgtgttgttctttggtgcctggatgagtattggtactacagtttgtttacacttttcatgcttttcctgtttgagtctactatggcaaagaataggctgaagacattgactgagctaagacgtgtgaaagttgatagccagattgtgttgacctatagatgtggaaaatgggttaaaattcctgggactgaactactaccaggagatattgtgtcaataggccgctcaactagtggtgaagatagatctgtaccagcagatatgctattgttagctgggtctgcaatagtaaatgaagctattcttacaggagaatctactccacagtggaaggtctcaattgctggacgtagtcctgatgatatgctatctataaagcgggataagaaccatatcctatttggtggcactaaagtattgcaacacactgcagataagtctgtaaatcttcgagcacctgatggtggctgtctagcttttgtattgaggactggatttgagactagccaagggaaattgatgaggactatcttattttcaactgagagggttactgcaaataacaaggaaagtggcctgtttatactctttttgctcttctttgcaattattgcgtctggttatgtgcttgtgaagggactagaggacccaacaaggagtagatataaacttttattgagttgttcattgattattacttctgtgatacccccggaattgccaatggaactttccatagcagtcaacacatctttaattgcattggctcggcgtggtattttctgcacagagccattcagaataccgttcgctgggaaggttgacatatgctgctttgataagacagggactctgacatcagatgatatggagttccaaggtattgttactttggaagatgacactgagttaatatctgatgcaaataagctgcccctccgaactcaagaagtactttccagttgtcatgcattggtatttgtcgacaacaagctggttggtgatcccctcgaaaaggctgctataaagggcatagactggatctacacatctgatgagaaggccatgtctaaaaggcctggtggtcaacctgtacagattgtgcacaggtaccattttgcttctcacttgaagagaatgtctgttattgtccgtattcaggaaaggttttacgctttcattaagggtgcacctgagactatccaagagagattagttgatttacctgctgcatatgtggagacatataagaaatacacacggcaaggttctcgggtcttggctcttgcatacaaattgcttcctgagatgcctgttagcgaagctagaagtttggaaagggatcaagtagagagcgacctaacgtttgctggctttgcggtcttcaactgccctataaggggtgactctggtgctgttttacaagaactcggacaatcttcccatgacttggtcatgatcaccggagaccaagcgttgactgcctgtcatgttgctagccaagtacatatatcttccaaacctgttttgatcttgacacggataaagactggcggttttgagtgggtttcgccagatgaaactgatagagctccatatagtgctgtggaggttgcagtgttatcagaatctcatgacctttgtattaatggggactgttttgaaatgctacaaagtactgaggctgttctccaggttatcccttatgtgaaggttttttcacgtgttgctccagaacaaaaagaacttgtactaactacattcaaaagtgttgggagggtgacactgatgtgtggagatggaaccaatgatgttggtgcactgaagcaggcacatgttggcattgctcttttgaatgctgaaccagttcagaaagtcaactcaaaatccaaagctgaaaataaatctgggaaattgaaaaaacagaagcctggtaatgaagcatcatcacgagtgactccggcaaccaatagttctgctaaagcatcgagcagccgccccttgactgctgctgagagacagcaagaaaagttgcagaaattgttggatgaaatgaatgatgaaagtgatggccgctcagcaccaattgttaagcttggtgatgcttctatggcttcacctttcacagcaaagcatgcctctgttgcccctactcttgacatcatccgtcaggggagaagcaccctagtcactacacttcaaatgttcaagattcttgggctcaattgccttgcaacggcttatgttctcagtgtcatgtacctggatggtgtcaaactgggcgatgttcaggctacaattagtggtgtctttactgcagccttcttcctcttcatctcccatgcccggccactccaaacgctgtctgcagagcggccgcaccctaacatattctgtgcatacgttctgctctccattcttggccagttcgccatgcacatactcttccttatcacagctgtcaatgaagcatccaagcatatgccagaggaatgcatcgaacccgactcagacttccatccaaaccttgtgaatacagtctcgtacatggtgaacatgatgatccaggtggcaacctttgctgtaaactacatgggccacccatttaatcagagcatatcggagaacaagcccttcaagtacgcattgtatggagcggttgctttcttcacagtgatcacatcagatatgttcagggatttgaatgactacatgaagcttgagcctttgccggagggaatgcgtggcaagttgatgttgtgggctattctaatgttttgtggttgctacggatgggagtggctcctccgatgggtgttcccagggaagatgccggcgtgggagaagcgtcagaaacaggcagttgcaaacttggagaaaaagcgcgactagaatccttttttattatttgcactttattctttaccttttgctgctgcccattggttacttggcagtacatactgatcatgttttgtcatagttgcattctaatctgtagcctaggggaattttttggagtgtaggccctaaatgataggaggatacacagggtcggcactttgcatactggtcagcaggattattaaaactttcagttacaatatgaaatcttatatttagatggcaatgatatcggatgatgtacaatgcaaaatacagaagctatcttaggctttcattcttttgctgttatgatcttagtggccctttggaggtacattgtaatgtcgatcattgaaaactcgagtttctgggttgtttcgaagaagatctgtttcagtgtatcattagttgatttggtgaaagctctgcttgataac

SEQ ID NO: 76560 - DNA, 4104 bp, Zea Mays
cggagacggagtagaaccgcgcagcgaagcagcagcggcaccaaaagccctcgcgttggtcgcggctgccgcccgccgcccaccgccggtcgccactgccggtcgagtcccatcgagccgagtcgcgctctccgatccgggtggctgcggcgccggcatggcgcggttcgaggtgaacggcaagtcggtgcaaggcgtggacctgctgcggcggcgccactgggcgtcgcgtctcgacttctggcccttcctcgcgctctatgcgctttggctgctgctcgccgtcccggcgctcgacttcaccgatgctctcatagtcctggccgcgctctccgctgctcacatcctcgccttcctcttcacggcctggttcgtcgatttccgggccttcatcgggtactccaaggtcaagaatatctgtgccgctaacgtgtgtaaggtgactccggctaagtttttggggtcaaaggagattgtacccctgcacatacagagaaatgtggcctcaacttcggttgcaggtgagacagcggagatttactttgattttcggaagcagaggttcatctactctgcggagaaagataactttttaaaactccggtacccaacaaaggagttgatcagtcattatgccaagggcactggttatggaactgaggccaagattagcactgctgtggataagtggggtagaaatgtatttgagtatccacagcccacatttcagaaattaatgaaagagcaaataatggaaccattttttgttttccaggttttttgtgttgttctttggtgcctggatgagtattggtactacagtttgtttacacttttcatgcttttcctgtttgagtctactatggcaaagaataggctgaagacattgactgagctaagacgtgtgaaagttgatagccagattgtgttgacctatagatgtggaaaatgggttaaaattcctgggactgaactactaccaggagatattgtgtcaataggccgctcaactagtggtgaagatagatctgtaccagcagatatgctattgttagctgggtctgcaatagtaaatgaagctattcttacaggagaatctactccacagtggaaggtctcaattgctggacgtagtcctgatgatatgctatctataaagcgggataagaaccatatcctatttggtggcactaaagtattgcaacacactgcagataagtctgtaaatcttcgagcacctgatggtggctgtctagcttttgtattgaggactggatttgagactagccaagggaaattgatgaggactatcttattttcaactgagagggttactgcaaataacaaggaaagtggcctgtttatactctttttgctcttctttgcaattattgcgtctggttatgtgcttgtgaagggactagaggacccaacaaggagtagatataaacttttattgagttgttcattgattattacttctgtgatacccccggaattgccaatggaactttccatagcagtcaacacatctttaattgcattggctcggcgtggtattttctgcacagagccattcagaataccgttcgctgggaaggttgacatatgctgctttgataagacagggactctgacatcagatgatatggagttccaaggtattgttactttggaagatgacactgagttaatatctgatgcaaataagctgcccctccgaactcaagaagtactttccagttgtcatgcattggtatttgtcgacaacaagctggttggtgatcccctcgaaaaggctgctataaagggcatagactggatctacacatctgatgagaaggccatgtctaaaaggcctggtggtcaacctgtacagattgtgcacaggtaccattttgcttctcacttgaagagaatgtctgttattgtccgtattcaggaaaggttttacgctttcattaagggtgcacctgagactatccaagagagattagttgatttacctgctgcatatgtggagacatataagaaatacacacggcaaggttctcgggtcttggctcttgcatacaaattgcttcctgagatgcctgttagcgaagctagaagtttggaaagggatcaagtagagagcgacctaacgtttgctggctttgcggtcttcaactgccctataaggggtgactctggtgctgttttacaagaactcggacaatcttcccatgacttggtcatgatcaccggagaccaagcgttgactgcctgtcatgttgctagccaagtacatatatcttccaaacctgttttgatcttgacacggataaagactggcggttttgagtgggtttcgccagatgaaactgatagagctccatatagtgctgtggaggttgcagtgttatcagaatctcatgacctttgtattaatggggactgttttgaaatgctacaaagtactgaggctgttctccaggttatcccttatgtgaaggttttttcacgtgttgctccagaacaaaaagaacttgtactaactacattcaaaagtgttgggagggtgacactgatgtgtggagatggaaccaatgatgttggtgcactgaagcaggcacatgttggcattgctcttttgaatgctgaaccagttcagaaagtcaactcaaaatccaaagctgaaaataaatctgggaaattgaaaaaacagaagcctggtaatgaagcatcatcacgagtgactccggcaaccaatagttctgctaaagcatcgagcagccgccccttgactgctgctgagagacagcaagaaaagttgcagaaattgttggatgaaatgaatgatgaaagtgatggccgctcagcaccaattgttaagcttggtgatgcttctatggcttcacctttcacagcaaagcatgcctctgttgcccctactcttgacatcatccgtcaggggagaagcaccctagtcactacacttcaaatgttcaagattcttgggctcaattgccttgcaacggcttatgttctcagtgtcatgtacctggatggtgtcaaactgggcgatgttcaggctacaattagtggtgtctttactgcagccttcttcctcttcatctcccatgcccggccactccaaacgctgtctgcagagcggccgcaccctaacatattctgtgcatacgttctgctctccattcttggccagttcgccatgcacatactcttccttatcacagctgtcaatgaagcatccaagcatatgccagaggaatgcatcgaacccgactcagacttccatccaaaccttgtgaatacagtctcgtacatggtgaacatgatgatccaggtggcaacctttgctgtaaactacatgggccacccatttaatcagagcatatcggagaacaagcccttcaagtacgcattgtatggagcggttgctttcttcacagtgatcacatcagatatgttcagggatttgaatgactacatgaagcttgagcctttgccggagggaatgcgtggcaagttgatgttgtgggctattctaatgttttgtggttgctacggatgggagtggctcctccgatgggtgttcccagggaagatgccggcgtgggagaagcgtcagaaacaggcagttgcaaacttggagaaaaagcgcgactagaatccttttttattatttgcactttattctttaccttttgctgctgcccattggttacttggcagtacatactgatcatgttttgtcatagttgcattctaatctgtagcctaggggaattttttggagtgtaggccctaaatgataggaggatacacagggtcggcactttgcatactggtcagcaggattattaaaactttcagttacaatatgaaatcttatatttagatggcaatgatatcggatgatgtacaatgcaaaatacagaagctatcttaggctttcattcttttgctgttatgatcttagtggccctttggaggtacattgtaatgtcgatcattgaaaactcgagtttctgggttgtttcgaagaagatctgtttcagtgtatcattagttgatttggtgaaagctctgcttgataac

SEQ ID NO: 76561 - DNA, 4157 bp, Zea Mays
ctcgatctgtttctgatagacggtgattttgcaaaatcgacccggaggacggagacggagtagaaccgcgcagcgaagcagcagcggcaccaaaagccctcgcgttggtcgcggctgccgcccgccgcccaccgccggtcgccactgccggtcgagtcccatcgagccgactccgcagcgctctccgatccgggtggctgcggcgccggcatggcgcggttcgaggtgaacggcaagtcggtgcaaggcgtggacctgctgcggcggcgccactgggcgtcgcgtctcgacttctggcccttcctcgcgctctatgcgctttggctgctgctcgccgtcccggcgctcgacttcaccgatgctctcatagtcctggccgcgctctccgctgctcacatcctcgccttcctcttcacggcctggttcgtcgatttccgggccttcatcgggtactccaaggtcaagaatatctgtgccgctaacgtgtgtaaggtgactccggctaagtttttggggtcaaaggagattgtacccctgcacatacagagaaatgtggcctcaacttcggttgcaggtgagacagcggagatttactttgattttcggaagcagaggttcatctactctgcggagaaagataactttttaaaactccggtacccaacaaaggagttgatcagtcattatgccaagggcactggttatggaactgaggccaagattagcactgctgtggataagtggggtagaaatgtatttgagtatccacagcccacatttcagaaattaatgaaagagcaaataatggaaccattttttgttttccaggttttttgtgttgttctttggtgcctggatgagtattggtactacagtttgtttacacttttcatgcttttcctgtttgagtctactatggcaaagaataggctgaagacattgactgagctaagacgtgtgaaagttgatagccagattgtgttgacctatagatgtggaaaatgggttaaaattcctgggactgaactactaccaggagatattgtgtcaataggccgctcaactagtggtgaagatagatctgtaccagcagatatgctattgttagctgggtctgcaatagtaaatgaagctattcttacaggagaatctactccacagtggaaggtctcaattgctggacgtagtcctgatgatatgctatctataaagcgggataagaaccatatcctatttggtggcactaaagtattgcaacacactgcagataagtctgtaaatcttcgagcacctgatggtggctgtctagcttttgtattgaggactggatttgagactagccaagggaaattgatgaggactatcttattttcaactgagagggttactgcaaataacaaggaaagtggcctgtttatactctttttgctcttctttgcaattattgcgtctggttatgtgcttgtgaagggactagaggacccaacaaggagtagatataaacttttattgagttgttcattgattattacttctgtgatacccccggaattgccaatggaactttccatagcagtcaacacatctttaattgcattggctcggcgtggtattttctgcacagagccattcagaataccgttcgctgggaaggttgacatatgctgctttgataagacagggactctgacatcagatgatatggagttccaaggtattgttactttggaagatgacactgagttaatatctgatgcaaataagctgcccctccgaactcaagaagtactttccagttgtcatgcattggtatttgtcgacaacaagctggttggtgatcccctcgaaaaggctgctataaagggcatagactggatctacacatctgatgagaaggccatgtctaaaaggcctggtggtcaacctgtacagattgtgcacaggtaccattttgcttctcacttgaagagaatgtctgttattgtccgtattcaggaaaggttttacgctttcattaagggtgcacctgagactatccaagagagattagttgatttacctgctgcatatgtggagacatataagaaatacacacggcaaggttctcgggtcttggctcttgcatacaaattgcttcctgagatgcctgttagcgaagctagaagtttggaaagggatcaagtagagagcgacctaacgtttgctggctttgcggtcttcaactgccctataaggggtgactctggtgctgttttacaagaactcggacaatcttcccatgacttggtcatgatcaccggagaccaagcgttgactgcctgtcatgttgctagccaagtacatatatcttccaaacctgttttgatcttgacacggataaagactggcggttttgagtgggtttcgccagatgaaactgatagagctccatatagtgctgtggaggttgcagtgttatcagaatctcatgacctttgtattaatggggactgttttgaaatgctacaaagtactgaggctgttctccaggttatcccttatgtgaaggttttttcacgtgttgctccagaacaaaaagaacttgtactaactacattcaaaagtgttgggagggtgacactgatgtgtggagatggaaccaatgatgttggtgcactgaagcaggcacatgttggcattgctcttttgaatgctgaaccagttcagaaagtcaactcaaaatccaaagctgaaaataaatctgggaaattgaaaaaacagaagcctggtaatgaagcatcatcacgagtgactccggcaaccaatagttctgctaaagcatcgagcagccgccccttgactgctgctgagagacagcaagaaaagttgcagaaattgttggatgaaatgaatgatgaaagtgatggccgctcagcaccaattgttaagcttggtgatgcttctatggcttcacctttcacagcaaagcatgcctctgttgcccctactcttgacatcatccgtcaggggagaagcaccctagtcactacacttcaaatgttcaagattcttgggctcaattgccttgcaacggcttatgttctcagtgtcatgtacctggatggtgtcaaactgggcgatgttcaggctacaattagtggtgtctttactgcagccttcttcctcttcatctcccatgcccggccactccaaacgctgtctgcagagcggccgcaccctaacatattctgtgcatacgttctgctctccattcttggccagttcgccatgcacatactcttccttatcacagctgtcaatgaagcatccaagcatatgccagaggaatgcatcgaacccgactcagacttccatccaaaccttgtgaatacagtctcgtacatggtgaacatgatgatccaggtggcaacctttgctgtaaactacatgggccacccatttaatcagagcatatcggagaacaagcccttcaagtacgcattgtatggagcggttgctttcttcacagtgatcacatcagatatgttcagggatttgaatgactacatgaagcttgagcctttgccggagggaatgcgtggcaagttgatgttgtgggctattctaatgttttgtggttgctacggatgggagtggctcctccgatgggtgttcccagggaagatgccggcgtgggagaagcgtcagaaacaggcagttgcaaacttggagaaaaagcgcgactagaatccttttttattatttgcactttattctttaccttttgctgctgcccattggttacttggcagtacatactgatcatgttttgtcatagttgcattctaatctgtagcctaggggaattttttggagtgtaggccctaaatgataggaggatacacagggtcggcactttgcatactggtcagcaggattattaaaactttcagttacaatatgaaatcttatatttagatggcaatgatatcggatgatgtacaatgcaaaatacagaagctatcttaggctttcattcttttgctgttatgatcttagtggccctttggaggtacattgtaatgtcgatcattgaaaactcgagtttctgggttgtttcgaagaagatctgtttcagtgtatcattagttgatttggtgaaagctctgcttgataac

SEQ ID NO: 76562 - DNA, 1117 bp, Zea Mays
gttttacagcctacaggttgtttgagtgattcaaaatgtcgaccccggacactggtgcatcccaagcagcagatccacatcaatctaatgtagctgcttcaggtacacaggatacaatagaaatagataatgatgttcccattggcagtaagagaaagccaaaattgaaatctgaggtttggaaagagtttgacagagtagaaattaatggagtttggaaagcaaaatgcatgtggtgtaagaaatatttaggagggaacacaaaaaatggcactaatcatttgcgtggtcaccttgagatttgtccggatagagctgttagaaaagggttcaaacaatcttcacttaaattgactgcaaatgcacaagatgggacagtcactttggagaaatatacatttgaccaagatgtagctaggaaagagcttgcattgatgatcattgtccatgagtaccctttgtctatggtagatcatgatggatttcgcaagttttgtgctgcacttcaaccattattcaaggtagtgtctagaaacacaattagaaaggatatcattgatatgtatgaagtgcagaagcaatccatgctgaaatattttagaaatttaagttctcgtgttgctgttacaacggatttgtggactgctaaccatcaaagaaaaggttacatggcagtgacaacccatttcttggatgatgattggaagctcaaaagtttcctcattaggtttatatatgtcccagctccacatacagcagatgctattactgatgtcctacatgaggttcttttggattggcatattgaaagaaatttgtccacaatcactcttgacaattgcagcaccaatgatagtctcatgaagaatatgataggcacaagtattgatggcatcatgaagactatgtttgcaatagaaggcaagttaccactatcttgttgtatgttgaaaggtaaactagtgcatatgcgatgtgcttgccatattctaaacttgattgtaaaagatgggatgagtgttatggagaaaggaattgatagtgtgcgcgatagtgttgcattttggtcagccacacctaaaagacatgaaaaatttgagaaaatggcagttcaaat

SEQ ID NO: 76563 - DNA, 705 bp, Zea Mays
gttgcctacaagccgacgataaagagcaaagagaaccagatgatgaggtcctggctcgcaccactgatgatgcaggaagaaaccctaactctagctctcgcaccgctgcgggtggccgggggagagcctaagtcgcaccacaccgctaatcccgatccagacgcatcgcgtcgtgctgtactgatcgaggggctcctgatcgccgcgcgtcctcgtctccccaagacgccgctggagagcccgggtcacaccgtgccaccgctgaggagtcttcgttggggcgcttcgtcggcgacgagcatccaccaaacatggagcggaatcagtggatggtcgatggctttgcaaaggccgattacgttgctgattctgctactaatctcggggaggagtcttatgaggcttgcatcactgcgggccatgccaaaatcattcatggacatgcgtttttgtcaaggtatggtgtctacatgtcgtctacttcgacaaatttttgccagggatgtcctcgatccgaaaatcagatcaaaggatgtggaatttattagaaaaattaatgaattgtatcctttcgaatctataaatgaaaacaaactcaaaatcaaacacatcctagttgaattgccgtagtggactatcaaagtaaaaataggcaggaggttggtgtgctcatttgtcctaggggtggcaccacatgccttcact

SEQ ID NO: 76564 - DNA, 1438 bp, Zea Mays
catataatggtggcttggtgcctttgttaaaacttcttgactcagaaaatggatctctgcaacattgaagaggttagaggagaagataaatggacgagtgttgaaacacttgctttatttgatgcgagtaggagagaaatctgtgcaaaggcgtgttgctctagctcttgcacacctttgtgcccctgaagatcaaagttcagtttttattgataataatggtctcgacttgcttcttgatcttcttatttccatgagttcaaaacatcaacaagatggctcagcagcattatacaaattggccaacaaagctgcagcactttctcccatggatgctgcccctccatctccaacacctcaggtttatcttggtgagcaatacgtgaatagttcaacactttcagacgttactttcttggtagaaggaaagcgattttatgcacacagaattgctttgcttgcttcttctgatgcatttcgtgcaatgtttgatggcgggtacagggaaaaggatgcaagggacattgaaattcctaatatcagatgggacgtctttgaactcatgatgagatttatctatacagggtcagttcaggttaccagtgaaattgcacaggatcttcttagagctggtgatcagtatctcttagaaggcctcaaacgcctatgtgaatatactattgcgaaggatgtgaatctagataacgtatctgacatgtatgacttgtccgaagcctttcatgccgtgtctctgagacatacgtgcatcttgtacattctggaacattttaacaagatctgcaccagagccggttctgcacagctgatccagcgtgttattccagagctccgcaatttcctaaccaaggcactgagttcatcaagaagcccaagtacaaccgacgacaggaacttgcagacttgattttgagtcccaattcattgacactgacaccgtcatctgaccaaagttgctggacatcctgtacagtgaagtttctggcgctgcgcatttgatggcatctgttgtggtacatggtggccggctcctcaaaattaacatcagcagcttaacaaacttttgtaagatttagtggaggatatgggtaaagagaacccgcgtcttagtcatgcctcgaccagcttacactgggataggctgtagttgtgaatggtcttggccgtaattcgtcggtctctgctttgtttctgagttgtgtttgtttcaagttcacagttcagtgtatgcctgcatatgtttaaagtatgaagcttgagcaagttagaaattagcccctgtagtgataaagctgtctgtgtagatccaccgattggagttaccgaaacaactatgtaacatcatagatgacattagatgcatgataattgctggtaaagcttggtcaaaatatgaggtagaaccactgatcatcactta

SEQ ID NO: 76565 - DNA, 1576 bp, Zea Mays
catataatggtggcttggtgcctttgttaaaacttcttgactcagaaaatggatctctgcaacataatgctgcatttgccctttatggagttgcagataatgagaggactatgtatctgacttcattaaagtaggaggtgtccaaaagttacaagatggagaatttattgtccaggcaacaaaggactgtgtggcaaaaacattgaagaggttagaggagaagataaatggacgagtgttgaaacacttgctttatttgatgcgagtaggagagaaatctgtgcaaaggcgtgttgctctagctcttgcacacctttgtgcccctgaagatcaaagttcagtttttattgataataatggtctcgacttgcttcttgatcttcttatttccatgagttcaaaacatcaacaagatggctcagcagcattatacaaattggccaacaaagctgcagcactttctcccatggatgctgcccctccatctccaacacctcaggtttatcttggtgagcaatacgtgaatagttcaacactttcagacgttactttcttggtagaaggaaagcgattttatgcacacagaattgctttgcttgcttcttctgatgcatttcgtgcaatgtttgatggcgggtacagggaaaaggatgcaagggacattgaaattcctaatatcagatgggacgtctttgaactcatgatgagatttatctatacagggtcagttcaggttaccagtgaaattgcacaggatcttcttagagctggtgatcagtatctcttagaaggcctcaaacgcctatgtgaatatactattgcgaaggatgtgaatctagataacgtatctgacatgtatgacttgtccgaagcctttcatgccgtgtctctgagacatacgtgcatcttgtacattctggaacattttaacaagatctgcaccagagccggttctgcacagctgatccagcgtgttattccagagctccgcaatttcctaaccaaggcactgagttcatcaagaagcccaagtacaaccgacgacaggaacttgcagacttgattttgagtcccaattcattgacactgacaccgtcatctgaccaaagttgctggacatcctgtacagtgaagtttctggcgctgcgcatttgatggcatctgttgtggtacatggtggccggctcctcaaaattaacatcagcagcttaacaaacttttgtaagatttagtggaggatatgggtaaagagaacccgcgtcttagtcatgcctcgaccagcttacactgggataggctgtagttgtgaatggtcttggccgtaattcgtcggtctctgctttgtttctgagttgtgtttgtttcaagttcacagttcagtgtatgcctgcatatgtttaaagtatgaagcttgagcaagttagaaattagcccctgtagtgataaagctgtctgtgtagatccaccgattggagttaccgaaacaactatgtaacatcatagatgacattagatgcatgataattgctggtaaagcttggtcaaaatatgaggtagaaccactgatcatcactta

SEQ ID NO: 76566 - DNA, 2812 bp, Zea Mays
gccttttcctcctcaacccgacacgctctccgcgccgtcgtcgaccaatcgaatggaggcggagcagcaaaagcagcagccccagcgcccgcgccgaaaggggctgaagcggaagctggaggacgaggcatccgccgccgtcgccgccgccgccacatccgcagcagcatccgccgccgccgcctcgctcggcagcgcgggcgccgacgatgacaacgaggaggaggacggctcggcgggcacccccgagatctgctgccgccactcccacgcggctcttgcccgcgaggtccgcgcgcaggttgatgccctcgtccgctgcgcctcctcgtggcgccacgccgaccgcgccgccgccaagcgcgccacccatgtcctcgccgagctcgccaaaaacgaggaggttgtcaacgtgattgtggagggcggtgccgtggcggccttggtgtgccacctagaagagcctgctgtggcggcgccaacgcaggaggaacaacaactgcggccgtttgagcatgaggttgagaagggcgctgccttcgctctgggcctcctagctgtaaagcctgaacatcaacaacttgtagttgatgctggtgcattacctcctctagtgaaactcttgaaaaggcagaaaaatactacaaattcgagggtggttaatagcgttatcaagagagcagctgatgcaattaccaatcttgcacatgagaatagcaacattaaaactagcgtcagaatggaaggtggaatcccaccacttgttcaattgctagaatcacaggatcttaaggtgcaaagagcagctgctggggccttgcgtactttagcctttaaaaatgatgaaaataaaactcagattgttcaatgcaatgctttgccaactttgatcttaatgctgcgatctgaagatgctgcaattcactatgaagcagttggtgtcattggaaatttggttcattcatcaccaaagatcaagaaggaggttcttaatgcaggggcactgcaacctgtgattggattattaagctcatgttgtacagaaagccaaagagaggctgctttgttgctagggcaatttgcttcggccgactcggattgcaaggtccatattgtgcaaaggggtgcagtctgtccactaattgaaatgctacagtcggctgatgtccaactccgggagatgtctgcttttgcacttggcaggcttgcccaggacacacataaccaagcaggtattgcatataatggtggcttggtgcctttgttaaaacttcttgactcagaaaatggatctctgcaacataatgctgcatttgccctttatggagttgcagataatgaggactatgtatctgacttcattaaagtaggaggtgtccaaaagttacaagatggagaatttattgtccaggcaacaaaggactgtgtggcaaaaacattgaagaggttagaggagaagataaatggacgagtgttgaaacacttgctttatttgatgcgagtaggagagaaatctgtgcaaaggcgtgttgctctagctcttgcacacctttgtgcccctgaagatcaaagttcagtttttattgataataatggtctcgacttgcttcttgatcttcttatttccatgagttcaaaacatcaacaagatggctcagcagcattatacaaattggccaacaaagctgcagcactttctcccatggatgctgcccctccatctccaacacctcaggtttatcttggtgagcaatacgtgaatagttcaacactttcagacgttactttcttggtagaaggaaagcgattttatgcacacagaattgctttgcttgcttcttctgatgcatttcgtgcaatgtttgatggcgggtacagggaaaaggatgcaagggacattgaaattcctaatatcagatgggacgtctttgaactcatgatgagatttatctatacagggtcagttcaggttaccagtgaaattgcacaggatcttcttagagctggtgatcagtatctcttagaaggcctcaaacgcctatgtgaatatactattgcgaaggatgtgaatctagataacgtatctgacatgtatgacttgtccgaagcctttcatgccgtgtctctgagacatacgtgcatcttgtacattctggaacattttaacaagatctgcaccagagccggttctgcacagctgatccagcgtgttattccagagctccgcaatttcctaaccaaggcactgagttcatcaagaagcccaagtacaaccgacgacaggaacttgcagacttgattttgagtcccaattcattgacactgacaccgtcatctgaccaaagttgctggacatcctgtacagtgaagtttctggcgctgcgcatttgatggcatctgttgtggtacatggtggccggctcctcaaaattaacatcagcagcttaacaaacttttgtaagatttagtggaggatatgggtaaagagaacccgcgtcttagtcatgcctcgaccagcttacactgggataggctgtagttgtgaatggtcttggccgtaattcgtcggtctctgctttgtttctgagttgtgtttgtttcaagttcacagttcagtgtatgcctgcatatgtttaaagtatgaagcttgagcaagttagaaattagcccctgtagtgataaagctgtctgtgtagatccaccgattggagttaccgaaacaactatgtaacatcatagatgacattagatgcatgataattgctggtaaagcttggtcaaaatatgaggtagaaccactgatcatcactta

SEQ ID NO: 76567 - DNA, 2767 bp, Zea Mays
gccttttcctcctcaacccgacacgctctccgcgccgtcgtcgaccaatcgaatggaggcggagcagcaaaagcagcagccccagcgcccgcgccgaaaggggctgaagcggaagctggaggacgaggcatccgccgccgtcgccgccgccgccacatccgcagcagcatccgccgccgccgcctcgctcggcagcgcgggcgccgacgatgacaacgaggaggaggacggctcggcgggcacccccgagatctgctgccgccactcccacgcggctcttgcccgcgaggtccgcgcgcaggttgatgccctcgtccgctgcgcctcctcgtggcgccacgccgaccgcgccgccgccaagcgcgccacccatgtcctcgccgagctcgccaaaaacgaggaggttgtcaacgtgattgtggagggcggtgccgtggcggccttggtgtgccacctagaagagcctgctgtggcggcgccaacgcaggaggaacaacaactgcggccgtttgagcatgagcctgaacatcaacaacttgtagttgatgctggtgcattacctcctctagtgaaactcttgaaaaggcagaaaaatactacaaattcgagggtggttaatagcgttatcaagagagcagctgatgcaattaccaatcttgcacatgagaatagcaacattaaaactagcgtcagaatggaaggtggaatcccaccacttgttcaattgctagaatcacaggatcttaaggtgcaaagagcagctgctggggccttgcgtactttagcctttaaaaatgatgaaaataaaactcagattgttcaatgcaatgctttgccaactttgatcttaatgctgcgatctgaagatgctgcaattcactatgaagcagttggtgtcattggaaatttggttcattcatcaccaaagatcaagaaggaggttcttaatgcaggggcactgcaacctgtgattggattattaagctcatgttgtacagaaagccaaagagaggctgctttgttgctagggcaatttgcttcggccgactcggattgcaaggtccatattgtgcaaaggggtgcagtctgtccactaattgaaatgctacagtcggctgatgtccaactccgggagatgtctgcttttgcacttggcaggcttgcccaggacacacataaccaagcaggtattgcatataatggtggcttggtgcctttgttaaaacttcttgactcagaaaatggatctctgcaacataatgctgcatttgccctttatggagttgcagataatgaggactatgtatctgacttcattaaagtaggaggtgtccaaaagttacaagatggagaatttattgtccaggcaacaaaggactgtgtggcaaaaacattgaagaggttagaggagaagataaatggacgagtgttgaaacacttgctttatttgatgcgagtaggagagaaatctgtgcaaaggcgtgttgctctagctcttgcacacctttgtgcccctgaagatcaaagttcagtttttattgataataatggtctcgacttgcttcttgatcttcttatttccatgagttcaaaacatcaacaagatggctcagcagcattatacaaattggccaacaaagctgcagcactttctcccatggatgctgcccctccatctccaacacctcaggtttatcttggtgagcaatacgtgaatagttcaacactttcagacgttactttcttggtagaaggaaagcgattttatgcacacagaattgctttgcttgcttcttctgatgcatttcgtgcaatgtttgatggcgggtacagggaaaaggatgcaagggacattgaaattcctaatatcagatgggacgtctttgaactcatgatgagatttatctatacagggtcagttcaggttaccagtgaaattgcacaggatcttcttagagctggtgatcagtatctcttagaaggcctcaaacgcctatgtgaatatactattgcgaaggatgtgaatctagataacgtatctgacatgtatgacttgtccgaagcctttcatgccgtgtctctgagacatacgtgcatcttgtacattctggaacattttaacaagatctgcaccagagccggttctgcacagctgatccagcgtgttattccagagctccgcaatttcctaaccaaggcactgagttcatcaagaagcccaagtacaaccgacgacaggaacttgcagacttgattttgagtcccaattcattgacactgacaccgtcatctgaccaaagttgctggacatcctgtacagtgaagtttctggcgctgcgcatttgatggcatctgttgtggtacatggtggccggctcctcaaaattaacatcagcagcttaacaaacttttgtaagatttagtggaggatatgggtaaagagaacccgcgtcttagtcatgcctcgaccagcttacactgggataggctgtagttgtgaatggtcttggccgtaattcgtcggtctctgctttgtttctgagttgtgtttgtttcaagttcacagttcagtgtatgcctgcatatgtttaaagtatgaagcttgagcaagttagaaattagcccctgtagtgataaagctgtctgtgtagatccaccgattggagttaccgaaacaactatgtaacatcatagatgacattagatgcatgataattgctggtaaagcttggtcaaaatatgaggtagaaccactgatcatcactta

SEQ ID NO: 76568 - DNA, 2806 bp, Zea Mays
gccttttcctcctcaacccgacacgctctccgcgccgtcgtcgaccaatcgaatggaggcggagcagcaaaagcagcagccccagcgcccgcgccgaaaggggctgaagcggaagctggaggacgaggcatccgccgccgtcgccgccgccgccacatccgcagcagcatccgccgccgccgcctcgctcggcagcgcgggcgccgacgatgacaacgaggaggaggacggctcggcgggcacccccgagatctgctgccgccactcccacgcggctcttgcccgcgaggtccgcgcgcaggttgatgccctcgtccgctgcgcctcctcgtggcgccacgccgaccgcgccgccgccaagcgcgccacccatgtcctcgccgagctcgccaaaaacgaggaggttgtcaacgtgattgtggagggcggtgccgtggcggccttggtgtgccacctagaagagcctgctgtggcggcgccaacgcaggaggaacaacaactgcggccgtttgagcatgaggttgagaagggcgctgccttcgctctgggcctcctagctcctgaacatcaacaacttgtagttgatgctggtgcattacctcctctagtgaaactcttgaaaaggcagaaaaatactacaaattcgagggtggttaatagcgttatcaagagagcagctgatgcaattaccaatcttgcacatgagaatagcaacattaaaactagcgtcagaatggaaggtggaatcccaccacttgttcaattgctagaatcacaggatcttaaggtgcaaagagcagctgctggggccttgcgtactttagcctttaaaaatgatgaaaataaaactcagattgttcaatgcaatgctttgccaactttgatcttaatgctgcgatctgaagatgctgcaattcactatgaagcagttggtgtcattggaaatttggttcattcatcaccaaagatcaagaaggaggttcttaatgcaggggcactgcaacctgtgattggattattaagctcatgttgtacagaaagccaaagagaggctgctttgttgctagggcaatttgcttcggccgactcggattgcaaggtccatattgtgcaaaggggtgcagtctgtccactaattgaaatgctacagtcggctgatgtccaactccgggagatgtctgcttttgcacttggcaggcttgcccaggacacacataaccaagcaggtattgcatataatggtggcttggtgcctttgttaaaacttcttgactcagaaaatggatctctgcaacataatgctgcatttgccctttatggagttgcagataatgaggactatgtatctgacttcattaaagtaggaggtgtccaaaagttacaagatggagaatttattgtccaggcaacaaaggactgtgtggcaaaaacattgaagaggttagaggagaagataaatggacgagtgttgaaacacttgctttatttgatgcgagtaggagagaaatctgtgcaaaggcgtgttgctctagctcttgcacacctttgtgcccctgaagatcaaagttcagtttttattgataataatggtctcgacttgcttcttgatcttcttatttccatgagttcaaaacatcaacaagatggctcagcagcattatacaaattggccaacaaagctgcagcactttctcccatggatgctgcccctccatctccaacacctcaggtttatcttggtgagcaatacgtgaatagttcaacactttcagacgttactttcttggtagaaggaaagcgattttatgcacacagaattgctttgcttgcttcttctgatgcatttcgtgcaatgtttgatggcgggtacagggaaaaggatgcaagggacattgaaattcctaatatcagatgggacgtctttgaactcatgatgagatttatctatacagggtcagttcaggttaccagtgaaattgcacaggatcttcttagagctggtgatcagtatctcttagaaggcctcaaacgcctatgtgaatatactattgcgaaggatgtgaatctagataacgtatctgacatgtatgacttgtccgaagcctttcatgccgtgtctctgagacatacgtgcatcttgtacattctggaacattttaacaagatctgcaccagagccggttctgcacagctgatccagcgtgttattccagagctccgcaatttcctaaccaaggcactgagttcatcaagaagcccaagtacaaccgacgacaggaacttgcagacttgattttgagtcccaattcattgacactgacaccgtcatctgaccaaagttgctggacatcctgtacagtgaagtttctggcgctgcgcatttgatggcatctgttgtggtacatggtggccggctcctcaaaattaacatcagcagcttaacaaacttttgtaagatttagtggaggatatgggtaaagagaacccgcgtcttagtcatgcctcgaccagcttacactgggataggctgtagttgtgaatggtcttggccgtaattcgtcggtctctgctttgtttctgagttgtgtttgtttcaagttcacagttcagtgtatgcctgcatatgtttaaagtatgaagcttgagcaagttagaaattagcccctgtagtgataaagctgtctgtgtagatccaccgattggagttaccgaaacaactatgtaacatcatagatgacattagatgcatgataattgctggtaaagcttggtcaaaatatgaggtagaaccactgatcatcactta

SEQ ID NO: 76569 - DNA, 2753 bp, Zea Mays
gccttttcctcctcaacccgacacgctctccgcgccgtcgtcgaccaatcgaatggaggcggagcagcaaaagcagcagccccagcgcccgcgccgaaaggggctgaagcggaagctggaggacgaggcatccgccgccgtcgccgccgccgccacatccgcagcagcatccgccgccgccgcctcgctcggcagcgcgggcgccgacgatgacaacgaggaggaggacggctcggcgggcacccccgagatctgctgccgccactcccacgcggctcttgcccgcgaggtccgcgcgcaggttgatgccctcgtccgctgcgcctcctcgtggcgccacgccgaccgcgccgccgccaagcgcgccacccatgtcctcgccgagctcgccaaaaacgaggaggttgtcaacgtgattgtggagggcggtgccgtggcggccttggtgtgccacctagaagagcctgctgtggcggcgccaacgcaggaggaacaacaactgcggccgtttgagcatgagcctgaacatcaacaacttgtagttgatgctggtgcattacctcctctagtgaaactcttgaaaaggcagaaaaatactacaaattcgagggtggttaatagcgttatcaagagagcagctgatgcaattaccaatcttgcacatgagaatagcaacattaaaactagcgtcagaatggaaggtggaatcccaccacttgttcaattgctagaatcacaggatcttaaggtgcaaagagcagctgctggggccttgcgtactttagcctttaaaaatgatgaaaataaaactcagattgttcaatgcaatgctttgccaactttgatcttaatgctgcgatctgaagatgctgcaattcactatgaagcagttggtgtcattggaaatttggttcattcatcaccaaagatcaagaaggaggttcttaatgcaggggcactgcaacctgtgattggattattaagaaagccaaagagaggctgctttgttgctagggcaatttgcttcggccgactcggattgcaaggtccatattgtgcaaaggggtgcagtctgtccactaattgaaatgctacagtcggctgatgtccaactccgggagatgtctgcttttgcacttggcaggcttgcccaggacacacataaccaagcaggtattgcatataatggtggcttggtgcctttgttaaaacttcttgactcagaaaatggatctctgcaacataatgctgcatttgccctttatggagttgcagataatgaggactatgtatctgacttcattaaagtaggaggtgtccaaaagttacaagatggagaatttattgtccaggcaacaaaggactgtgtggcaaaaacattgaagaggttagaggagaagataaatggacgagtgttgaaacacttgctttatttgatgcgagtaggagagaaatctgtgcaaaggcgtgttgctctagctcttgcacacctttgtgcccctgaagatcaaagttcagtttttattgataataatggtctcgacttgcttcttgatcttcttatttccatgagttcaaaacatcaacaagatggctcagcagcattatacaaattggccaacaaagctgcagcactttctcccatggatgctgcccctccatctccaacacctcaggtttatcttggtgagcaatacgtgaatagttcaacactttcagacgttactttcttggtagaaggaaagcgattttatgcacacagaattgctttgcttgcttcttctgatgcatttcgtgcaatgtttgatggcgggtacagggaaaaggatgcaagggacattgaaattcctaatatcagatgggacgtctttgaactcatgatgagatttatctatacagggtcagttcaggttaccagtgaaattgcacaggatcttcttagagctggtgatcagtatctcttagaaggcctcaaacgcctatgtgaatatactattgcgaaggatgtgaatctagataacgtatctgacatgtatgacttgtccgaagcctttcatgccgtgtctctgagacatacgtgcatcttgtacattctggaacattttaacaagatctgcaccagagccggttctgcacagctgatccagcgtgttattccagagctccgcaatttcctaaccaaggcactgagttcatcaagaagcccaagtacaaccgacgacaggaacttgcagacttgattttgagtcccaattcattgacactgacaccgtcatctgaccaaagttgctggacatcctgtacagtgaagtttctggcgctgcgcatttgatggcatctgttgtggtacatggtggccggctcctcaaaattaacatcagcagcttaacaaacttttgtaagatttagtggaggatatgggtaaagagaacccgcgtcttagtcatgcctcgaccagcttacactgggataggctgtagttgtgaatggtcttggccgtaattcgtcggtctctgctttgtttctgagttgtgtttgtttcaagttcacagttcagtgtatgcctgcatatgtttaaagtatgaagcttgagcaagttagaaattagcccctgtagtgataaagctgtctgtgtagatccaccgattggagttaccgaaacaactatgtaacatcatagatgacattagatgcatgataattgctggtaaagcttggtcaaaatatgaggtagaaccactgatcatcactta

SEQ ID NO: 76570 - DNA, 2680 bp, Zea Mays
ctgcttgtgccttttcctcctcaacccgacacgctctccgcgccgtcgtcgaccaatcgaatggaggcggagcagcaaaagcagcagccccagcgcccgcgccgaaaggggctgaagcggaagctggaggacgaggcatccgccgccgtcgccgccgccgccacatccgcagcagcatccgccgccgccgcctcgctcggcagcgcgggcgccgacgatgacaacgaggaggaggacggctcggcgggcacccccgagatctgctgccgccactcccacgcggctcttgcccgcgaggtccgcgcgcaggttgatgccctcgtccgctgcgcctcctcgtggcgccacgccgaccgcgccgccgccaagcgcgccacccatgtcctcgccgagctcgccaaaaacgaggaggttgtcaacgtgattgtggagggcggtgccgtggcggccttggtgtgccacctagaagagcctgctgtggcggcgccaacgcaggaggaacaacaactgcggccgtttgagcatgaggttgagaagggcgctgccttcgctctgggcctcctagctcctgaacatcaacaacttgtagttgatgctggtgcattacctcctctagtgaaactcttgaaaaggcagaaaaatactacaaattcgagggtggttaatagcgttatcaagagagcagctgatgcaattaccaatcttgcacatgagaatagcaacattaaaactagcgtcagaatggaaggtggaatcccaccacttgttcaattgctagaatcacaggatcttaaggtgcaaagagcagctgctggggccttgcgtactttagcctttaaaaatgatgaaaataaaactcagattgttcaatgcaatgctttgccaactttgatcttaatgctgcgatctgaagatgctgcaattcactatgaagcagttggtgtcattggaaatttggttcattcatcaccaaagatcaagaaggaggttcttaatgcaggggcactgcaacctgtgattggattattaagctcatgttgtacagaaagccaaagagaggctgctttgttgctagggcaatttgcttcggccgactcggattgcaaggtccatattgtgcaaaggggtgcagtctgtccactaattgaaatgctacagtcggctgatgtccaactccgggagatgtctgcttttgcacttggcaggcttgcccaggacacacataaccaagcaggtattgaggactatgtatctgacttcattaaagtaggaggtgtccaaaagttacaagatggagaatttattgtccaggcaacaaaggactgtgtggcaaaaacattgaagaggttagaggagaagataaatggacgagtgttgaaacacttgctttatttgatgcgagtaggagagaaatctgtgcaaaggcgtgttgctctagctcttgcacacctttgtgcccctgaagatcaaagttcagtttttattgataataatggtctcgacttgcttcttgatcttcttatttccatgagttcaaaacatcaacaagatggctcagcagcattatacaaattggccaacaaagctgcagcactttctcccatggatgctgcccctccatctccaacacctcaggtttatcttggtgagcaatacgtgaatagttcaacactttcagacgttactttcttggtagaaggaaagcgattttatgcacacagaattgctttgcttgcttcttctgatgcatttcgtgcaatgtttgatggcgggtacagggaaaaggatgcaagggacattgaaattcctaatatcagatgggacgtctttgaactcatgatgagatttatctatacagggtcagttcaggttaccagtgaaattgcacaggatcttcttagagctggtgatcagtatctcttagaaggcctcaaacgcctatgtgaatatactattgcgaaggatgtgaatctagataacgtatctgacatgtatgacttgtccgaagcctttcatgccgtgtctctgagacatacgtgcatcttgtacattctggaacattttaacaagatctgcaccagagccggagctccgcaatttcctaaccaaggcactgagttcatcaagaagcccaagtacaaccgacgacaggaacttgcagacttgattttgagtcccaattcattgacactgacaccgtcatctgaccaaagttgctggacatcctgtacagtgaagtttctggcgctgcgcatttgatggcatctgttgtggtacatggtggccggctcctcaaaattaacatcagcagcttaacaaacttttgtaagatttagtggaggatatgggtaaagagaacccgcgtcttagtcatgcctcgaccagcttacactgggataggctgtagttgtgaatggtcttggccgtaattcgtcggtctctgctttgtttctgagttgtgtttgtttcaagttcacagttcagtgtatgcctgcatatgtttaaagtatgaagcttgagcaagttagaaattagcccctgtagtgataaagctgtctgtgtagatccaccgattggagttaccgaaacaactatgtaacatcatagatgacattagatgcatgataattgctggtaaagcttggtcaaaatatgaggtagaaccactgatcatcactta

SEQ ID NO: 76571 - DNA, 2777 bp, Zea Mays
cggaatcacactgcttgtgccttttcctcctcaacccgacacgctctccgcgccgtcgtcgaccaatcgaatggaggcggagcagcaaaagcagcagccccagcgcccgcgccgaaaggggctgaagcggaagctggaggacgaggcatccgccgccgtcgccgccgccgccacatccgcagcagcatccgccgccgccgcctcgctcggcagcgcgggcgccgacgatgacaacgaggaggaggacggctcggcgggcacccccgagatctgctgccgccactcccacgcggctcttgcccgcgaggtccgcgcgcaggttgatgccctcgtccgctgcgcctcctcgtggcgccacgccgaccgcgccgccgccaagcgcgccacccatgtcctcgccgagctcgccaaaaacgaggaggttgtcaacgtgattgtggagggcggtgccgtggcggccttggtgtgccacctagaagagcctgctgtggcggcgccaacgcaggaggaacaacaactgcggccgtttgagcatgaggttgagaagggcgctgccttcgctctgggcctcctagctgtaaagcctgaacatcaacaacttgtagttgatgctggtgcattacctcctctagtgaaactcttgaaaaggcagaaaaatactacaaattcgagggtggttaatagcgttatcaagagagcagctgatgcaattaccaatcttgcacatgagaatagcaacattaaaactagcgtcagaatggaaggtggaatcccaccacttgttcaattgctagaatcacaggatcttaaggtgcaaagagcagctgctggggccttgcgtactttagcctttaaaaatgatgaaaataaaactcagattgttcaatgcaatgctttgccaactttgatcttaatgctgcgatctgaagatgctgcaattcactatgaagcagttggtgtcattggaaatttggttcattcatcaccaaagatcaagaaggaggttcttaatgcaggggcactgcaacctgtgattggattattaagctcatgttgtacagaaagccaaagagaggctgctttgttgctagggcaatttgcttcggccgactcggattgcaaggtccatattgtgcaaaggggtgcagtctgtccactaattgaaatgctacagtcggctgatgtccaactccgggagatgtctgcttttgcacttggcaggcttgcccaggacacacataaccaagcaggtattgaggactatgtatctgacttcattaaagtaggaggtgtccaaaagttacaagatggagaatttattgtccaggcaacaaaggactgtgtggcaaaaacattgaagaggttagaggagaagataaatggacgagtgttgaaacacttgctttatttgatgcgagtaggagagaaatctgtgcaaaggcgtgttgctctagctcttgcacacctttgtgcccctgaagatcaaagttcagtttttattgataataatggtctcgacttgcttcttgatcttcttatttccatgagttcaaaacatcaacaagatggctcagcagcattatacaaattggccaacaaagctgcagcactttctcccatggatgctgcccctccatctccaacacctcaggtttatcttggtgagcaatacgtgaatagttcaacactttcagacgttactttcttggtagaaggttggtactatttcatgaccctgatttcatcagtataattcttttcaatcgtgtcccagataatcttaatcccttctacaggaaagcgattttatgcacacagaattgctttgcttgcttcttctgatgcatttcgtgcaatgtttgatggcgggtacagggaaaaggatgcaagggacattgaaattcctaatatcagatgggacgtctttgaactcatgatgagatttatctatacagggtcagttcaggttaccagtgaaattgcacaggatcttcttagagctggtgatcagtatctcttagaaggcctcaaacgcctatgtgaatatactattgcgaaggatgtgaatctagataacgtatctgacatgtatgacttgtccgaagcctttcatgccgtgtctctgagacatacgtgcatcttgtacattctggaacattttaacaagatctgcaccagagccggagctccgcaatttcctaaccaaggcactgagttcatcaagaagcccaagtacaaccgacgacaggaacttgcagacttgattttgagtcccaattcattgacactgacaccgtcatctgaccaaagttgctggacatcctgtacagtgaagtttctggcgctgcgcatttgatggcatctgttgtggtacatggtggccggctcctcaaaattaacatcagcagcttaacaaacttttgtaagatttagtggaggatatgggtaaagagaacccgcgtcttagtcatgcctcgaccagcttacactgggataggctgtagttgtgaatggtcttggccgtaattcgtcggtctctgctttgtttctgagttgtgtttgtttcaagttcacagttcagtgtatgcctgcatatgtttaaagtatgaagcttgagcaagttagaaattagcccctgtagtgataaagctgtctgtgtagatccaccgattggagttaccgaaacaactatgtaacatcatagatgacattagatgcatgataattgctggtaaagcttggtcaaaatatgaggtagaaccactgatcatcactta

SEQ ID NO: 76572 - DNA, 1345 bp, Zea Mays
gtgatgggcaacctccagggcctgaacggtgccaccgtaggcttctcggcggccggcggcccggaggaggcgactgaagaggaggacatgcggggctgcaagggatgcgctcgccggtggccgaagtcggggctaagctggggttgtgcacggtcgagaagatggaggcgaggtgagtcactccatcacactgcgcatgtcaccaaggcacggcctcccatctcggtaaccaccatcccctcctattcaatgtgaactcgcctcaatctgatcgcttgcgctgatcagtgaattaaaatcttggagataggctggacgaggtagctatatgtctatatctcacatgaattactctttgttaggctttggttttggatgtccagaataatgtaagtgtaaaataatctgggccatagaccgagtcaattgtgatgtggagactgacgaagttgtctgcattcacggattgaggccaagtcattctttgtttgtgaactgcaaggagaaacatgtcaatgttgctcgatgtcaatggcggctggtgcatgcatgtatctttcctacaggtctacaattgcatgcactgcaaactaggcgtctgtagagcattaggtatgcatgtagaaggaaagtcctaatgcgatggtggtaatgtgatgcatggtcaaggagagtaaggtttagttgttcgtttcagagaataaaagtaccagtagaggttcatccctcctgggcaggcaacgagctaactagataggcacctaacttaggttagtaagttttaattattaccttaacacaacatgatagcgcacatgatgatattgtaaagtattttggcaacaatggtctatttaaactccacagatttattggaacttgagctagcacctgtatgagtcaaggtaagaccaatttaattaattggacaagccgacaagctagcactctcctggagcataatctaaattgtgtacgcccttgttcaaacaattaatatagctgactgttttttaatattatcatttaacagagcctagacttttcaacgaaggttatggatttggcaagcaggggaactcctggagattgtgcctcttggaaaaggcttctttcttgccaactatcctatttcaattttggattgaccattatcgtttgtgttcctttgtcctccatcttttacctcttgtagttacacaagaacaacttgattgtgctaaagaggcaatcgaatctacagttctgatgaacttggaatcaagggctaaagtaacctgtctctgtttggtcattatgctctaggatccttcaacttgacatcacaacaatcgttgaggaggta

SEQ ID NO: 76573 - DNA, 459 bp, Zea Mays
cagaacaatagctctatttgctatggaaccacctagacggcgtctatctccagcgagagcgataccgtcgaggcgcctatccgcgccggacacaacgtctgcagtgatgggcaacctccagggcctgaacggtgccaccgtaggcttctcggcggccggcggcccggaggaggcgactgaagaggaggacatgcggggctgcaagggatgcgctcgccggtggccgaagtcggggctaagctggggttgtgcacggtcgagaagatggaggcgaggtgagtcactccatcacactgcgcatgtcaccaaggcacggcctcccatctcgagcctagacttttcaacgaaggttatggatttggcaagcaggggaactcctggagattgtgcctcttggaaaaggcttctttcttgccaactatcctatttcaattttggattgaccattatcgtttgtgt

SEQ ID NO: 76574 - DNA, 1570 bp, Zea Mays
aaatcggcagtggaccaatcgccgctcaccaaggccacctcatcacccagccacgttacatgaccaatcgcctgcgccgtagcgcgcacacctacgtgtcgagccgtcttcatccctccgaccggaaatcaacggtgcgtttgcttctctcctccggaaggttctcggcttctcgcaggcgcggcgaccggcttcaaccccaactcttcttcttcttcctcgcaaacttcgaacgggacgagaaggaagcggacgcgagaggagactaaccgacctcggatccatcgacgcgtgaagatgtcttcgcccgccgagtactacaaatcacttccacctataagcaaggcatatgggacattgtgtttctttaccaccgtgctagttcagctccagattttgcacccattatttctttacttagattaccccttggtgttcaagaagtttgagagcaaggtatggtgtcatgttggaaaagggtgcatttgataagcggactgcagatttcttatggatgatgatatttggtgccatctcactattggtgttgtctattattcccctattcaattcttttttcttaggaatacctatggtcagcatgctcctttatgtctggagccgagagaatccaaatgctcagataaatatatacggcctcgtccaattgaggtccttttatcttccatgggctatgctcttattggatgtgatatttgggtcatcattaatgcctggacttctgggtatcatggttggacatctctactacttctttgcagtgttgcaccctcttgccaccgggaagagctacctcaagactcctaaatgggtacataagattgttgctcgattcaggataggcatgcaagcgaactcacccgtccgtccaccagccaatggcaacagcgggtctggtgtgtttagaggaagaagctataggctcaatcaatagattcacccacctcgtaatgtgatccatggtcggagtggcaatgtagaagcaaagaccagaacgcatagtagggtcaatcaaaattaagggttacccgtcagagattttcttaaaaaacctggacggacggaatggagaacccttccatttgctcatttagttgctaacaatgttcatcgtccatgtttacacatgaatataattctgtaatgacaatttgtgtacacttatgctggacttattgtcgcctctttttagctaggataagaacaaaagatgatgagtttgctcatgctggtgcttttggtccttactgggtggatttgtgcatgctgaacagcagaaggctagatctcgggttattgtcatctggcccaaaaaatgacatcaacaggtttccgtcacacaagatcggagtttgctgataatattgtagagacaatttagactttgcttgatggttgtcatacgtcaatgacgtcgaaagaaaatctgagaacaatacggctgtaaatttcacctttgtgtaattgtatcatagatatcgtcgagaaatcccaaatgcagtaatggctcgttgagcagaacttcaacactttttgcgctaggttctgg

SEQ ID NO: 76575 - DNA, 1515 bp, Zea Mays
aaatcggcagtggaccaatcgccgctcaccaaggccacctcatcacccagccacgttacatgaccaatcgcctgcgccgtagcgcgcacacctacgtgtcgagccgtcttcatccctccgaccggaaatcaacggtgcgtttgcttctctcctccggaaggttctcggcttctcgcaggcgcggcgaccggcttcaaccccaactcttcttcttcttcctcgcaaacttcgaacgggacgagaaggaagcggacgcgagaggagactaaccgacctcggatccatcgacgcgtgaagatgtcttcgcccgccgagtactacaaatcacttccacctataagcaaggcatatgggacattgtgtttctttaccaccgtgctagttcagctccagattttgcacccattatttctttacttagattaccccttggtgttcaagaagtttgagatatggaggctattgacaagtttctttttcctggcaccattttccatgaaatttggtattcgccttctgatgatagcaaggtatggtgtcatgttggaaaagggtgcatttgataagcggactgcagatttcttatggatgatgatatttggtgccatctcactattgtccttttatcttccatgggctatgctcttattggatgtgatatttgggtcatcattaatgcctggacttctgggtatcatggttggacatctctactacttctttgcagtgttgcaccctcttgccaccgggaagagctacctcaagactcctaaatgggtacataagattgttgctcgattcaggataggcatgcaagcgaactcacccgtccgtccaccagccaatggcaacagcgggtctggtgtgtttagaggaagaagctataggctcaatcaatagattcacccacctcgtaatgtgatccatggtcggagtggcaatgtagaagcaaagaccagaacgcatagtagggtcaatcaaaattaagggttacccgtcagagattttcttaaaaaacctggacggacggaatggagaacccttccatttgctcatttagttgctaacaatgttcatcgtccatgtttacacatgaatataattctgtaatgacaatttgtgtacacttatgctggacttattgtcgcctctttttagctaggataagaacaaaagatgatgagtttgctcatgctggtgcttttggtccttactgggtggatttgtgcatgctgaacagcagaaggctagatctcgggttattgtcatctggcccaaaaaatgacatcaacaggtttccgtcacacaagatcggagtttgctgataatattgtagagacaatttagactttgcttgatggttgtcatacgtcaatgacgtcgaaagaaaatctgagaacaatacggctgtaaatttcacctttgtgtaattgtatcatagatatcgtcgagaaatcccaaatgcagtaatggctcgttgagcagaacttcaacactttttgcgctaggttctgg

SEQ ID NO: 76576 - DNA, 1930 bp, Zea Mays
aaatcggcagtggaccaatcgccgctcaccaaggccacctcatcacccagccacgttacatgaccaatcgcctgcgccgtagcgcgcacacctacgtgtcgagccgtcttcatccctccgaccggaaatcaacggaagcggacgcgagaggagactaaccgacctcggatccatcgacgcgtgaagatgtcttcgcccgccgagtactacaaatcacttccacctataagcaaggcatatgggacattgtgtttctttaccaccgtgctagttcagctccagattttgcacccattatttctttacttagattaccccttggtgttcaagaagtttgagatatggaggctattgacaagtttctttttcctggcaccattttccatgaaatttggtattcgccttctgatgatgtaggttaaagttttgctgactactgattataaaatagtgacagttatgaactatctataattgtaaattagctttggttgtttggatttgctttatcgtgttttggcatgcagagcaaggtatggtgtcatgttggaaaagggtgcatttgataagcggactgcagatttcttatggatgatgatatttggtgccatctcactattggtgttgtctattattcccctattcaattcttttttcttaggaatacctatggtcagcatgctcctttatgtctggagccgagagaatccaaatgctcagataaatatatacggcctcgtccaattgagggtatgtaattcactaccatcaattgcaatgccagtttttgtgcttctcaatcggtgaataggtaggcgaagcataagaatagggatggtgctccaatgggtatccgtggttttcctctatttttaactcaaaaaactaattaggcaattccttccgtcattcttggatatatagttcatcaagttgaagtaaaggagatccatggatctctccacacccatcctaggtgaagcagacctgtgaactttatgattagttgttgatgtactctcttcttttgcagtccttttatcttccatgggctatgctcttattggatgtgatatttgggtcatcattaatgcctggacttctgggtatcatggttggacatctctactacttctttgcagtgttgcaccctcttgccaccgggaagagctacctcaagactcctaaatgggtacataagattgttgctcgattcaggataggcatgcaagcgaactcacccgtccgtccaccagccaatggcaacagcgggtctggtgtgtttagaggaagaagctataggctcaatcaatagattcacccacctcgtaatgtgatccatggtcggagtggcaatgtagaagcaaagaccagaacgcatagtagggtcaatcaaaattaagggttacccgtcagagattttcttaaaaaacctggacggacggaatggagaacccttccatttgctcatttagttgctaacaatgttcatcgtccatgtttacacatgaatataattctgtaatgacaatttgtgtacacttatgctggacttattgtcgcctctttttagctaggataagaacaaaagatgatgagtttgctcatgctggtgcttttggtccttactgggtggatttgtgcatgctgaacagcagaaggctagatctcgggttattgtcatctggcccaaaaaatgacatcaacaggtttccgtcacacaagatcggagtttgctgataatattgtagagacaatttagactttgcttgatggttgtcatacgtcaatgacgtcgaaagaaaatctgagaacaatacggctgtaaatttcacctttgtgtaattgtatcatagatatcgtcgagaaatcccaaatgcagtaatggctcgttgagcagaacttcaacactttttgcgctaggttctgg

SEQ ID NO: 76577 - DNA, 1510 bp, Zea Mays
aaatcggcagtggaccaatcgccgctcaccaaggccacctcatcacccagccacgttacatgaccaatcgcctgcgccgtagcgcgcacacctacgtgtcgagccgtcttcatccctccgaccggaaatcaacggtgcgtttgcttctctcctccggaaggttctcggcttctcgcaggcgcggcgaccggcttcaaccccaactcttcttcttcttcctcgcaaacttcgaacgggacgagaaggaagcggacgcgagaggagactaaccgacctcggatccatcgacgcgtgaagatgtcttcgcccgccgagtactacaaatcacttccacctataagcaaggcatatgggacattgtgtttctttaccaccgtgctagttcagctccagattttgcacccattatttctttacttagattaccccttggtgttcaagaagtttgagatatggaggctattgacaagtttctttttcctggcaccattttccatgaaatttggtattcgccttctgatgatgaatacctatggtcagcatgctcctttatgtctggagccgagagaatccaaatgctcagataaatatatacggcctcgtccaattgaggtccttttatcttccatgggctatgctcttattggatgtgatatttgggtcatcattaatgcctggacttctgggtatcatggttggacatctctactacttctttgcagtgttgcaccctcttgccaccgggaagagctacctcaagactcctaaatgggtacataagattgttgctcgattcaggataggcatgcaagcgaactcacccgtccgtccaccagccaatggcaacagcgggtctggtgtgtttagaggaagaagctataggctcaatcaatagattcacccacctcgtaatgtgatccatggtcggagtggcaatgtagaagcaaagaccagaacgcatagtagggtcaatcaaaattaagggttacccgtcagagattttcttaaaaaacctggacggacggaatggagaacccttccatttgctcatttagttgctaacaatgttcatcgtccatgtttacacatgaatataattctgtaatgacaatttgtgtacacttatgctggacttattgtcgcctctttttagctaggataagaacaaaagatgatgagtttgctcatgctggtgcttttggtccttactgggtggatttgtgcatgctgaacagcagaaggctagatctcgggttattgtcatctggcccaaaaaatgacatcaacaggtttccgtcacacaagatcggagtttgctgataatattgtagagacaatttagactttgcttgatggttgtcatacgtcaatgacgtcgaaagaaaatctgagaacaatacggctgtaaatttcacctttgtgtaattgtatcatagatatcgtcgagaaatcccaaatgcagtaatggctcgttgagcagaacttcaacactttttgcgctaggttctgg

SEQ ID NO: 76578 - DNA, 2365 bp, Zea Mays
aaatcggcagtggaccaatcgccgctcaccaaggccacctcatcacccagccacgttacatgaccaatcgcctgcgccgtagcgcgcacacctacgtgtcgagccgtcttcatccctccgaccggaaatcaacggaagcggacgcgagaggagactaaccgacctcggatccatcgacgcgtgaagatgtcttcgcccgccgagtactacaaatcacttccacctataagcaaggcatatgggacattgtgtttctttaccaccgtgctagttcagctccagattttgcacccattatttctttacttagattaccccttggtgttcaagaagtttgaggttagcttctatttctgttttcccttacgccacgtttggattattggaattgaattccattctaataatagtaatttaggcatatatcaattaagctaattcagttttatgcaaaatatatcggtatattattattagcaagatgtcggagatatttatgtgctatatttttactgtagatgagtgaatcgaggagcgtcctgtaagttacaaagtagatacaaattctactaatacataaaatcatttctcatcctccactccatgaatttgagatagacttatatctgaactttggaaagtagtggaatgtcaaattccaagctaaataggttattttataagcaaattccaattcctataaaatgtagggatccaaacgccccgttatcctaattgcatcacatcgatacagtttaacattattattgcttagttttgactgcacaacattgtaagcctctattgggaaggatgttgtaacatgccacattatctttcctgataattaaggggaatttgtgttgctaaagtttgttttgggaagtcttgcattccacccttctatatttgatgtttttgaatggatcagagtacttatgttttgatttaatatattcggcagtcagtcatgtaattatgccttggatcttgtacattacattttttgcactctgcgccacacattccaatgtttttaaaacgatggaccttgcagatatggaggctattgacaagtttctttttcctggcaccattttccatgaaatttggtattcgccttctgatgatgtaggttaaagttttgctgactactgattataaaatagtgacagttatgaactatctataattgtaaattagctttggttgtttggatttgctttatcgtgttttggcatgcagagcaaggtatggtgtcatgttggaaaagggtgcatttgataagcggactgcagatttcttatggatgatgatatttggtgccatctcactattggtgttgtctattattcccctattcaattcttttttcttaggaatacctatggtcagcatgctcctttatgtctggagccgagagaatccaaatgctcagataaatatatacggcctcgtccaattgaggtccttttatcttccatgggctatgctcttattggatgtgatatttgggtcatcattaatgcctggacttctgggtatcatggttggacatctctactacttctttgcagtgttgcaccctcttgccaccgggaagagctacctcaagactcctaaatgggtacataagattgttgctcgattcaggataggcatgcaagcgaactcacccgtccgtccaccagccaatggcaacagcgggtctggtgtgtttagaggaagaagctataggctcaatcaatagattcacccacctcgtaatgtgatccatggtcggagtggcaatgtagaagcaaagaccagaacgcatagtagggtcaatcaaaattaagggttacccgtcagagattttcttaaaaaacctggacggacggaatggagaacccttccatttgctcatttagttgctaacaatgttcatcgtccatgtttacacatgaatataattctgtaatgacaatttgtgtacacttatgctggacttattgtcgcctctttttagctaggataagaacaaaagatgatgagtttgctcatgctggtgcttttggtccttactgggtggatttgtgcatgctgaacagcagaaggctagatctcgggttattgtcatctggcccaaaaaatgacatcaacaggtttccgtcacacaagatcggagtttgctgataatattgtagagacaatttagactttgcttgatggttgtcatacgtcaatgacgtcgaaagaaaatctgagaacaatacggctgtaaatttcacctttgtgtaattgtatcatagatatcgtcgagaaatcccaaatgcagtaatggctcgttgagcagaacttcaacactttttgcgctaggttctgg

SEQ ID NO: 76579 - DNA, 1441 bp, Zea Mays
aaatcggcagtggaccaatcgccgctcaccaaggccacctcatcacccagccacgttacatgaccaatcgcctgcgccgtagcgcgcacacctacgtgtcgagccgtcttcatccctccgaccggaaatcaacggtgcgtttgcttctctcctccggaaggttctcggcttctcgcaggcgcggcgaccggcttcaaccccaactcttcttcttcttcctcgcaaacttcgaacgggacgagaaggaagcggacgcgagaggagactaaccgacctcggatccatcgacgcgtgaagatgtcttcgcccgccgagtactacaaatcacttccacctataagcaaggcatatgggacattgtgtttctttaccaccgtgctagttcagctccagattttgcacccattatttctttacttagattaccccttggtgttcaagaagtttgagagcaaggtatggtgtcatgttggaaaagggtgcatttgataagcggactgcagatttcttatggatgatgatatttggtgccatctcactattgtccttttatcttccatgggctatgctcttattggatgtgatatttgggtcatcattaatgcctggacttctgggtatcatggttggacatctctactacttctttgcagtgttgcaccctcttgccaccgggaagagctacctcaagactcctaaatgggtacataagattgttgctcgattcaggataggcatgcaagcgaactcacccgtccgtccaccagccaatggcaacagcgggtctggtgtgtttagaggaagaagctataggctcaatcaatagattcacccacctcgtaatgtgatccatggtcggagtggcaatgtagaagcaaagaccagaacgcatagtagggtcaatcaaaattaagggttacccgtcagagattttcttaaaaaacctggacggacggaatggagaacccttccatttgctcatttagttgctaacaatgttcatcgtccatgtttacacatgaatataattctgtaatgacaatttgtgtacacttatgctggacttattgtcgcctctttttagctaggataagaacaaaagatgatgagtttgctcatgctggtgcttttggtccttactgggtggatttgtgcatgctgaacagcagaaggctagatctcgggttattgtcatctggcccaaaaaatgacatcaacaggtttccgtcacacaagatcggagtttgctgataatattgtagagacaatttagactttgcttgatggttgtcatacgtcaatgacgtcgaaagaaaatctgagaacaatacggctgtaaatttcacctttgtgtaattgtatcatagatatcgtcgagaaatcccaaatgcagtaatggctcgttgagcagaacttcaacactttttgcgctaggttctgg

SEQ ID NO: 76580 - DNA, 1604 bp, Zea Mays
aaatcggcagtggaccaatcgccgctcaccaaggccacctcatcacccagccacgttacatgaccaatcgcctgcgccgtagcgcgcacacctacgtgtcgagccgtcttcatccctccgaccggaaatcaacggtgcgtttgcttctctcctccggaaggttctcggcttctcgcaggcgcggcgaccggcttcaaccccaactcttcttcttcttcctcgcaaacttcgaacgggacgagaaggaagcggacgcgagaggagactaaccgacctcggatccatcgacgcgtgaagatgtcttcgcccgccgagtactacaaatcacttccacctataagcaaggcatatgggacattgtgtttctttaccaccgtgctagttcagctccagattttgcacccattatttctttacttagattaccccttggtgttcaagaagtttgagatatggaggctattgacaagtttctttttcctggcaccattttccatgaaatttggtattcgccttctgatgatagcaaggtatggtgtcatgttggaaaagggtgcatttgataagcggactgcagatttcttatggatgatgatatttggtgccatctcactattggaatacctatggtcagcatgctcctttatgtctggagccgagagaatccaaatgctcagataaatatatacggcctcgtccaattgaggtccttttatcttccatgggctatgctcttattggatgtgatatttgggtcatcattaatgcctggacttctgggtatcatggttggacatctctactacttctttgcagtgttgcaccctcttgccaccgggaagagctacctcaagactcctaaatgggtacataagattgttgctcgattcaggataggcatgcaagcgaactcacccgtccgtccaccagccaatggcaacagcgggtctggtgtgtttagaggaagaagctataggctcaatcaatagattcacccacctcgtaatgtgatccatggtcggagtggcaatgtagaagcaaagaccagaacgcatagtagggtcaatcaaaattaagggttacccgtcagagattttcttaaaaaacctggacggacggaatggagaacccttccatttgctcatttagttgctaacaatgttcatcgtccatgtttacacatgaatataattctgtaatgacaatttgtgtacacttatgctggacttattgtcgcctctttttagctaggataagaacaaaagatgatgagtttgctcatgctggtgcttttggtccttactgggtggatttgtgcatgctgaacagcagaaggctagatctcgggttattgtcatctggcccaaaaaatgacatcaacaggtttccgtcacacaagatcggagtttgctgataatattgtagagacaatttagactttgcttgatggttgtcatacgtcaatgacgtcgaaagaaaatctgagaacaatacggctgtaaatttcacctttgtgtaattgtatcatagatatcgtcgagaaatcccaaatgcagtaatggctcgttgagcagaacttcaacactttttgcgctaggttctgg

SEQ ID NO: 76581 - DNA, 1005 bp, Zea Mays
gtcaatcgttggttcccatgctctctcgtgcgtccatgtgtcttatctggaggcttctaggtgacacttctttcctcctcgcatcctctctctccatcctatgtctcctgcaactcacgctccctccctccctccccaagcatccctgcccacctacggctccggcgacagcggccgccgctttggactccgaatctggccgccatcgctgcaacggtccaggctttctggaatcacatttcttgagaactatctgttggagagctaaactaggctcttgttcatattatggatcagcaagctaagattgatgctgattttcttgaaccaactgtactcttagatgagacacattaccaggaggggtacataaatggctataatgatggtttggcatctggaaaggaagaggggaggcaggttggtttaaagatgggtttccaggtcggtgaagaactgggtttctttcagggctgtctggatgtgtggacgtctgcaattctcattgatcagaatgccttcacagctcgggtcaggaagaatatcgagcaactggctgcactggtgggcagctatccgctgtccgatccggagaatgaacaaattcaagacgtgatggagaagataaggctgaaattcagggtcaacactgcaagcttaggggcgaagttagagtatgaagggcaccccaaatcatctaaacaagatgctgaggatctgtgagcggtgattgaaattacattttagtttctccgcccttgctgtttaaagctcttcaactcattggcatcatgaggaactgccatgagacatcaatggtctgagtccgaccataaccacatatatagttttaacaatgtctcaagttttgtgttattacctgctgtctgccatatgtaatagtttcctttcagaaggcaaaaacacttccttcccattttctttgaagtacttgtatacactagatcatagcacatgatagagatatgatcaaaagtataataa

SEQ ID NO: 76582 - DNA, 1147 bp, Zea Mays
attttttgcggtcccttcccaatgccaccgaaaacaattgttttacctacttcgtgccgcacctctttcccgctcgaccacgcgcgcgctgtgtttaggcttggagctatcgccgccacccatctctaacgccccaatccctgcgctgcggcagcctagctcctccgcgaccttagcgcagagctccatccatgattggcgtcgtgcacctcctcgacagcgatccgagaggtgaaattaagttttgtgatttttattatttattttcggcggccgtttttcattaaccaccgcaatcagtgattaagaggaagttcaatagggacacataaacaaattaaatatagggattaaataataaaggacagctccaacaggagcctcacttcaataagttttatctaaaccttttagggcccaacctcaagagttgcatatttgagacccaaaaactttgggtcgtataatataatgttcgtgccatcgggaaatttcaccgtctatttcatcgcggccatctccacgatctgccgcacccgcccaacctctcacgatctgccgcacaagccaatggaagtgccttcttcaacgccttgtatgctcgtggtccatcggcagcgcccgcgctgtttccatcacgtcgttgccacgttcgtgtctaggcgtcgtggaaaaacgtcaccgctcttcatcgtccccacctctggttcgtctcctagctctcctccactggatctgcttcgttcttgatggaacgaaggccattgtcccccaagttcacgtccaatagcaagccgtcggttttatttgccatcgcgctagatgcaatgggaggtgtgacaacagccgcacgttcgacatcacatgatgttgcagcgccgtatcttcgtcgtgcatcgaccgtcgcaagtgaacaacgctctacatctcagccttcttcgcaagcgtcgtcgcctatcatggaatcttacatgaaggttacagatctgttttagtgagtgtgctgaattcatgggttcctgtttctaaactcaagtgtgaaggattcatgtgttattgtttatgaattcatatgttctgaattattgagtttggctgtacagctaatactagaaatgactataatattgatcttgtcattccggag

SEQ ID NO: 76583 - DNA, 1011 bp, Zea Mays
gtaagttgacatccttagcaagcaagttgaggaagaaatcaataattgtagtagtacagtggatccaatcacttctccctcgaatgtcactctcccatgtaatttggttagtacaacacaactaaagaagaaggaggtggagacaaaaagctcaaagcggaaaaaagttaggttgaaaagatgcataagggctaaaaagggacataagaaaaggggaaaatgttcagtgaaggaacaaaaagctacaacggtgccattcggtgagagtgttccagcagtccaaaatatgtcccctagtacaacaactgtgcaattcgaagatggtgctgtagcagtccctagtactttttgctagaaggaaggggtgcctgaacatgtatggccatccataaattttctcggttgttgatggtagagagcttcgtggctgtgctctcttgagtaaggtctgacggctctgcagctagtttgggcgtcaggggcatccaccgtattcgtgaggaagtcgagatctcacaacggaccgtcgctcgagcactccatggaggcagtctgcagatgaacgaagaacagtcatgcctgctttcggggggaaaaaaaaagaacagacatgccgacggtactgcgagacatggctgtcgctcttggacgggtcccgcagcatccgacatggtgatgccagaccgctatggcagcagttggcgacggggaagggaccttgggcggaagacgacggttaaggcgaaggagcgagtcgcctgcttgccatggcgatggaagcggcggccggcagaggatctcatcccgtagaagcgaaggaccgatgggaattagatgggccacctgtcccggcccatgagcgagtcatcgttggatttaaacgcatggtgcatggttaggatgagacgactgcatagacacgttagcttagacaaagtgtaacacaataaatatatatcatcatcagtttataaatatatagaataaaaaaaagtctaaatatttggtttg

SEQ ID NO: 76584 - DNA, 1450 bp, Zea Mays
cgcccgtgtagtaagttgacatccttagcaagcaagttgaggaagaaatcaataattgtagtagtacagtggatccaatcacttctccctcgaatgtcactctcccatgtaatttggttagtacaacacaactaaagaagaaggaggtggagacaaaaagctcaaagcggaaaaaagttaggttgaaaagatgcataagggctaaaaagggacataagaaaaggggaaaatgttcagtggaacaaaaagctacaacggtgccattcggtgagagtgttccagcagtccaaaatatgtcccctagtacaacaactgtgcaattcgaagatggtgctgtagcagtccctagtactttttgctagaaggaaggggtgcctgaacatgtatggccatccataaattttctcggttgttgatgggaccaatcacctatgatcttactgctgaattttagtttaaaatcagcacagtttgtttttttgtacaacctcggatgtttgtctttgcagatggagaacaatataagcttttgtgttgcctttccactcgcagatggggaatagtatgagcttttgggtagcctctaaattatggatagcttttggttttttgtggctgaagtgtaaagccacttgagtgtttggttttctcaactgccatcactgagatgagatcatcaatatcagttgtataaattggagcatggtcattctggaatcaatactatctgaaacttgttcgctaatttcattcatatttcacaaactggtacaaacatcacaatagcaccagaatatcagtctagaattgatccacaatcatcatactcgatattgatccacaatctcaatctagaattgtttcctatctaatcagaatacatgtctctgtcgccctcctatgaagcaggtagagagcttcgtggctgtgctctcttgaggaagtcgagatctcacaacggaccgtcgctcgagcactccatggaggcagtctgcagatgaacgaagaacagtcatgcctgctttcggggggaaaaaaaaagaacagacatgccgacggtactgcgagacatggctgtcgctcttggacgggtcccgcagcatccgacatggtgatgccagaccgctatggcagcagttggcgacggggaagggaccttgggcggaagacgacggttaaggcgaaggagcgagtcgcctgcttgccatggcgatggaagcggcggccggcagaggatctcatcccgtagaagcgaaggaccgatgggaattagatgggccacctgtcccggcccatgagcgagtcatcgttggatttaaacgcatggtgcatggttaggatgagacgactgcatagacacgttagcttagacaaagtgtaacacaataaatatatatcatcatcagtttataaatatatagaataaaaaaaagtctaaatatttggtttg

SEQ ID NO: 76585 - DNA, 1279 bp, Zea Mays
gctagccgcccctgcagaaggcgccgcagacagctgcagatccggcgacggccaacgccccgaccaaggaacaaaaagctacaacggtgccattcggtgagagtgttccagcagtccaaaatatgtcccctagtacaacaactgtgcaattcgaagatggtgctgtagcagtccctagtactttttgctagaaggaaggggtgcctgaacatgtatggccatccataaattttctcggttgttgatgggaccaatcacctatgatcttactgctgaattttagtttaaaatcagcacagtttgtttttttgtacaacctcggatgtttgtctttgcagatggagaacaatataagcttttgtgttgcctttccactcgcagatggggaatagtatgagcttttgggtagcctctaaattatggatagcttttggttttttgtggctgaagtgtaaagccacttgagtgtttggttttctcaactgccatcactgagatgagatcatcaatatcagttgtataaattggagcatggtcattctggaatcaatactatctgaaacttgttcgctaatttcattcatatttcacaaactggtacaaacatcacaatagcaccagaatatcagtctagaattgatccacaatcatcatactcgatattgatccacaatctcaatctagaattgtttcctatctaatcagaatacatgtctctgtcgccctcctatgaagcaggtagagagcttcgtggctgtgctctcttgaggaagtcgagatctcacaacggaccgtcgctcgagcactccatggaggcagtctgcagatgaacgaagaacagtcatgcctgctttcggggggaaaaaaaaagaacagacatgccgacggtactgcgagacatggctgtcgctcttggacgggtcccgcagcatccgacatggtgatgccagaccgctatggcagcagttggcgacggggaagggaccttgggcggaagacgacggttaaggcgaaggagcgagtcgcctgcttgccatggcgatggaagcggcggccggcagaggatctcatcccgtagaagcgaaggaccgatgggaattagatgggccacctgtcccggcccatgagcgagtcatcgttggatttaaacgcatggtgcatggttaggatgagacgactgcatagacacgttagcttagacaaagtgtaacacaataaatatatatcatcatcagtttataaatatatagaataaaaaaaagtctaaatatttggtttg

SEQ ID NO: 76586 - DNA, 1055 bp, Zea Mays
tgttattacacagtatacatgtagtattactcctactaaatctgatttttttgccagaaatcatggagaaaataaaaatggatacaggagctcaagctatgttcatcatcagtcttgtgctctggtgtactacaagctttgccttggatgatgctgctgctacaaggattccaattgtgggcacattacctctgtcaatgaaagaaaatccgcaattatgccaactttgtgaggagtttgcatcagaggccctcttctatttaaatgaaaatgagacccagactgaaatcattgatacactacaccaagcttgttcaaagtttggctcttttaagctggagtgcacgaggttggtggattattatgtccctcttttcttcacaaaaattgcttcattaagccctgaagaattttgtgcatcagcaagtttttgtgggggggtaacattcattcgtcttccaagacatgaagatacttgcaccctttgccatgaggttgtcgatgaggttgttactaatcttgaagatccaggcatggagcttaagataattgagatacttctgaaaggatgcaataatgcagaggattatgtacaaaagtgcaagaggttgataatccaaaatgcacctatcataatggagaatattaagaagttcctcgagaagagagatttttgcaattctatccatgtctgtggaagtaaatccgttcgcgctggatcacaagtcctcagaagcctttcttcagcctgaagccctgaacttgcacggattgttatgatcatgcaacagatattagtgtaaaaacaagtccaggcgccgctatgtgagtcccgtgtgacatcgactgtacagatttggctgtgtacatgttaaaggaaaacacaactgaggcacaaacctcttctgtttacgggtcatgagcagggtgtgtatttgaactgtatatcattataccttggattggatgtcatgttgctctatatttatacgtaaccgagttttgtaactttggagaagtaatgtatatgatgccaaagcttgatcttccatgaa

SEQ ID NO: 76587 - DNA, 1339 bp, Zea Mays
tagaaatagaaattatggtaacaccctaatacattccctcgctcgcggccttgtacagcatactgtccttgcggcgctgctggctccgccgggtgttgggtcaacgttctcccgtccccccgagcgcagtctcgcgtggttctcccgtcccccgaggcccgagcgtagtctctctcttttgccgtggttctccagtcctccctcatccgctctctttctttctctcgtggcgagtggtaacgacgtcaggtgctcaggtcttgttcaggcccttcgccggcgacgagcacacagcaaatggatacaggagctcaagctatgttcatcatcagtcttgtgctctggtgtactacaagctttgccttggatgatgctgctgctacaaggattccaattgtgggcacattacctctgtcaatgaaagaaaatccgcaattatgccaactttgtgaggagtttgcatcagaggccctcttctatttaaatgaaaatgagacccagactgaaatcattgatacactacaccaagcttgttcaaagtttggctcttttaagctggagtgcacgaggttggtggattattatgtccctcttttcttcacaaaaattgcttcattaagccctgaagaattttgtgcatcagcaagtttttgtgggggggtaacattcattcgtcttccaagacatgaagatacttgcaccctttgccatgaggttgtcgatgaggttgttactaatcttgaagatccaggcatggagattttggccaattttttccccaaaaaacaaagccttatgccatgatgctgtttactgttgacagcttaagataattgagatacttctgaaaggatgcaataatgcagaggattatgtacaaaagtgcaagaggttgataatccaaaatgcacctatcataatggagaatattaagaagttcctcgagaagagagatttttgcaattctatccatgtctgtggaagtaaatccgttcgcgctggatcacaagtcctcagaagcctttcttcagcctgaagccctgaacttgcacggattgttatgatcatgcaacagatattagtgtaaaaacaagtccaggcgccgctatgtgagtcccgtgtgacatcgactgtacagatttggctgtgtacatgttaaaggaaaacacaactgaggcacaaacctcttctgtttacgggtcatgagcagggtgtgtatttgaactgtatatcattataccttggattggatgtcatgttgctctatatttatacgtaaccgagttttgtaactttggagaagtaatgtatatgatgccaaagcttgatcttccatgaa

SEQ ID NO: 76588 - DNA, 1260 bp, Zea Mays
gcattatcccgtgtcaggacacacagtattatttcaattgttgcatactgtccttgcggcgctgctggctccgccgggtgttgggtcaacgttctcccgtccccccgagcgcagtctcgcgtggttctcccgtcccccgaggcccgagcgtagtctctctcttttgccgtggttctccagtcctccctcatccgctctctttctttctctcgtggcgagtggtaacgacgtcaggtgctcaggtcttgttcaggcccttcgccggcgacgagcacacagcaaatggatacaggagctcaagctatgttcatcatcagtcttgtgctctggtgtactacaagctttgccttggatgatgctgctgctacaaggattccaattgtgggcacattacctctgtcaatgaaagaaaatccgcaattatgccaactttgtgaggagtttgcatcagaggccctcttctatttaaatgaaaatgagacccagactgaaatcattgatacactacaccaagcttgttcaaagtttggctcttttaagctggagtgcacgaggttggtggattattatgtccctcttttcttcacaaaaattgcttcattaagccctgaagaattttgtgcatcagcaagtttttgtgggggggtaacattcattcgtcttccaagacatgaagatacttgcaccctttgccatgaggttgtcgatgaggttgttactaatcttgaagatccaggcatggagcttaagataattgagatacttctgaaaggatgcaataatgcagaggattatgtacaaaagtgcaagaggttgataatccaaaatgcacctatcataatggagaatattaagaagttcctcgagaagagagatttttgcaattctatccatgtctgtggaagtaaatccgttcgcgctggatcacaagtcctcagaagcctttcttcagcctgaagccctgaacttgcacggattgttatgatcatgcaacagatattagtgtaaaaacaagtccaggcgccgctatgtgagtcccgtgtgacatcgactgtacagatttggctgtgtacatgttaaaggaaaacacaactgaggcacaaacctcttctgtttacgggtcatgagcagggtgtgtatttgaactgtatatcattataccttggattggatgtcatgttgctctatatttatacgtaaccgagttttgtaactttggagaagtaatgtatatgatgccaaagcttgatcttccatgaa

SEQ ID NO: 76589 - DNA, 1164 bp, Zea Mays
gaagaccgcacccgcttcaaaaacgcgtgcgggtgcggcggcggcttctgccgacgcatcctgcaggtttgggaggcaagttggagaaacgggcaaaacccaccaaagccaaggacactgcaatttacacaaacaccccttgctcgccgcctatttgtattttccgcgcttctctccttcgctcttttcttttttctccaaaccatcgtcggctgcggcactcctgaagggaggaagccccaagcccttgccgccgcagctgccgcagccagcaacgaaccgtacataggcagggacgaagcgatggagggagccaatggagtcggtgggtcggagtccgagcggaagccgctgtcagaggtggtcggcgactgcgtccagcgctggttccaggacgcgtacaaggaggcgcgcaaaggagacatcgccaaccaggtgcttgtagcgcagatgttcttctcgggttatgggacccccaagaacgagtacaagggaaaacaatggatggatagagcatcaaggttcaggtcttccgctttgaaggttggcatgaaacgtccaggatacaatgcaagtgactcagactctgatgacgatgcaaatgatgacgccaaccaataacactcaattacaaattgagttattagttaggagattcacagggtactcccacgacgccagaaattaggagtcaaggagtgcccaggcggtgcagcatggacattcactcacagcatgacaatgacacgaagctgattttttttttttgttctgttaaaaaagtgtccagactgtcgaacagaggagtacctgatcctaacgcaacgcaacgcaacgcagcgcacgtaattctgcagccggagccttttgtttggattggatgggaaacgatgtgaaaattaatcaaaaaaggggatagggtgtcgccgtcgcccgagtctgaaaccgacgagaggatgcatatgcatgtatgaagaagtctgtacgcatgcttacttatcccggcatgttcgtgtttgccgaccagctctagcgatcgacagaggccacttgtttgacagtaaaaaaaaagaagtcgtgttctaagcgtcacatcacattgtaatgtcttttcgtggacggaagtttttttttaaattatattgactcaactttcattccagc

SEQ ID NO: 76590 - DNA, 1254 bp, Zea Mays
catcctgcaggtttgggaggcaagttggagaaacgggcaaaacccaccaaagccaaggacactgcaatttacacaaacaccccttgctcgccgcctatttgtattttccgcgcttctctccttcgctcttttcttttttctccaaaccatcgtcggctgcggcactcctgaagggaggaagccccaagcccttgccgccgcagctgccgcagccagcaacgaaccgtacataggcagggacgaagcgatggagggagccaatggagtcggtgggtcggagtccgagcggaagccgctgtcagaggtggtcggcgactgcgtccagcgctggttccaggacgcgtacaaggaggcgcgcaaaggagacatcgccaaccaggtgcttgtagcgcagatgttcttctcgggttatgggacccccaagaacgagtacaagggaaaacaatggatggatagagcatcaaggttcaggtcttccgctttgaaggttggcatgaaacgtccaggatacaatgcaagtgactcagactctgatgacgatgcaaatgatgacgccaaccaataacactcaattacaaattgagttattagttaggagattcacagggagggacccaattacatacccacactatattcaagacatgcgcatcaagttgacgagtataaggtttccagcgccttctaagtcactcttggagccatgaggtattcgttagcacgtccgcggtcttcgatcgggtcctcgttgtgtggccttcgaaatccttgatggacaagacaaccataaactcaatcaactatattgacggatctaactcccatgggggtgaagtcttcacggtagacctcatgaccttcggtgaaccctgcattcataggaatgaagcctaacaatcgatcagacagtgttgatcggaccagtgatcaaggtcttgctgaaccttatctccaacaatgtccctctaggacgaggctcaacttgatgtctgatcatagaattgtggcattttgatctagagtagggatcgatatattatgtttcaccaaaacaagagtcatcatgcatgaatcttacggaagaccaaaaactttgttcccgtcacatgccgatcttttacgtcagcacccatggatttatcggtaacactaaaggagttgattggaacttatcaataatgttgacttgtacagattttagaaagaaaaaaaaaactatcccaactaccgtaccggtggctaagaagttatttt

SEQ ID NO: 76591 - DNA, 1105 bp, Zea Mays
tttaacaaacttcctctggagataaggtggcttcagatcttggattggcttgttaggagcctatccctgcatggaaaataagtgtcaaaatggacatactttgtgttcgacatgcaaggccagggtgcacaaccggtgccctacatgcagacaagagcttggtgatatcaggtgcttagcattggaaaaagtagcagagtcacttgagcttccatgtaagtactgctctttaggttgcccagagatcttcccgtactacagcaagataaagcatgaagcacagtgcagcttcaggccatataactgcccctatgctggctctgaatgtgctgtggctggtgatattccattccttgttgcacatttgagggatgatcacaaagttgatatgcacagtggctgcacgttcaaccatagatacgtcaaatccaacccgcgagaggttgaaaatgccacctggatgctaacagtattccattgttttgggcagtacttctgcctgcacttcgaggcattccagctcggaatggctccagtctatatggctttcctccgattcatgggtgatgagaatgaagcaaggaactatacatatagcctagaggttggtggtaatgggaggaaaatggtatgggaaggtactcctagaagcatccgtgacagccaccgcaaggtccgtgacagccatgatggcctcatcatccagaggaatatggcgctgttcttctctggtggtgacaggaaggagctgaagctgagggtgactgggcggatctggaaagagcagacgaaccccgatggagcctgcattcctaacctttgcagctgagcaagggagacgattgaaaagaagaagaaaaaaaagaaagaaaatattgtgttatttggctggcttttttaaaaaattgtcatgctatgttttcattatagcctgctgttaaaatattgtaccagtatgtagggtgtaaaatgctcttgtaaagtaattgtgtatatcgaattcatttacaagttgtaccaccaatccctgtgttatgttgatgtgttgtttgagttccgttgtggatgtattgggctcaagaagtgcctaatgttcatgtttatt

SEQ ID NO: 76592 - DNA, 1362 bp, Zea Mays
agagtttgagggttccatgtagctgttttgaagttgatgcttgatttaacaaacttcctctggagataaggtggcttcagatcttggattggcttgttaggagcctatccctgcatggaaaataagtgtcaaaatggacatactttgtgttcgacatgcaaggccagggtgcacaaccggtgccctacatgcagacaagagcttggtgatatcaggtgcttagcattggaaaaagtagcagagtcacttgagcttccatgtaagtactgctctttaggttgcccagagatcttcccgtactacagcaagataaagcatgaagcacagtgcagcttcaggccatataactgcccctatgctggctctgaatgtgctgtggctggtgatattccattccttgttgcacatttgagggatgatcacaaagttgatatgcacagtggctgcacgttcaaccatagatacgtcaaatccaacccgcgagaggttgaaaatgccacctggatgctaacagtaagattaaactagctctgaattattctttatctgctgctccatctattttcatatgtgtggtgtatgaactaattactggtcctaaacatcatatatttaaaagtggagggattatctatttcctattgctgatcttgtgatccatgtttacaagtaaaatatgtgtattgtcaagtaatttgactggttgaatgttgcttttcggttcaggtattccattgttttgggcagtacttctgcctgcacttcgaggcattccagctcggaatggctccagtctatatggctttcctccgattcatgggtgatgagaatgaagcaaggaactatacatatagcctagaggttggtggtaatgggaggaaaatggtatgggaaggtactcctagaagcatccgtgacagccaccgcaaggtccgtgacagccatgatggcctcatcatccagaggaatatggcgctgttcttctctggtggtgacaggaaggagctgaagctgagggtgactgggcggatctggaaagagcagacgaaccccgatggagcctgcattcctaacctttgcagctgagcaagggagacgattgaaaagaagaagaaaaaaaagaaagaaaatattgtgttatttggctggcttttttaaaaaattgtcatgctatgttttcattatagcctgctgttaaaatattgtaccagtatgtagggtgtaaaatgctcttgtaaagtaattgtgtatatcgaattcatttacaagttgtaccaccaatccctgtgttatgttgatgtgttgtttgagttccgttgtggatgtattgggctcaagaagtgcctaatgttcatgtttatt

SEQ ID NO: 76593 - DNA, 953 bp, Zea Mays
aaaacttattatttttctgaattgggtgccacattatgatgtactttgcacagtttttagagtttgagggttccatgtagctgttttgaagttgatgcttgatttaacaaacttcctctggagataaggtggcttcagatcttggattggcttgttaggagcctatccctgcatggaaaataagtgtcaaaatggacatactttgtgttcgacatgcaaggccagggtgcacaaccggtgccctacatgcagacaagagcttggtgatatcaggtgcttagcattggaaaaagtagcagagtcacttgagcttccatgtattccattgttttgggcagtacttctgcctgcacttcgaggcattccagctcggaatggctccagtctatatggctttcctccgattcatgggtgatgagaatgaagcaaggaactatacatatagcctagaggttggtggtaatgggaggaaaatggtatgggaaggtactcctagaagcatccgtgacagccaccgcaaggtccgtgacagccatgatggcctcatcatccagaggaatatggcgctgttcttctctggtggtgacaggaaggagctgaagctgagggtgactgggcggatctggaaagagcagacgaaccccgatggagcctgcattcctaacctttgcagctgagcaagggagacgattgaaaagaagaagaaaaaaaagaaagaaaatattgtgttatttggctggcttttttaaaaaattgtcatgctatgttttcattatagcctgctgttaaaatattgtaccagtatgtagggtgtaaaatgctcttgtaaagtaattgtgtatatcgaattcatttacaagttgtaccaccaatccctgtgttatgttgatgtgttgtttgagttccgttgtggatgtattgggctcaagaagtgcctaatgttcatgtttatt

SEQ ID NO: 76594 - DNA, 1650 bp, Zea Mays
tcccgttcctattcccgggaggagacggtgtcgtctgtctctcgccgttctcgttcgtgccaatccaggcgaaacaaacggcgtgacgagagcggcagagcgtcagcgtccccccgcggccaccgtaccgcatcgtcgtcgtccccagccaacccaacccagcgcaccccaaacgaatccagccccacctcagccgcggcgcggacctcggaatctcagcgccggtgtgctcacggcaccgcagggcgcggcgtggccatggacatggacagggacagcgtggagtgcctctccctcccagacgctgccatggacgtggacaacgtcgacggccacccgcaccacggccatctcggtctcccgctccaccccgcccacctcccatcctctggtgccgggcgcgcgttccccaagtgtcaaaatggacatactttgtgttcgacatgcaaggccagggtgcacaaccggtgccctacatgcagacaagagcttggtgatatcaggtgcttagcattggaaaaagtagcagagtcacttgagcttccatgtaagtactgctctttaggttgcccagagatcttcccgtactacagcaagataaagcatgaagcacagtgcagcttcaggccatataactgcccctatgctggctctgaatgtgctgtggctggtgatattccattccttgttgcacatttgagggatgatcacaaagttgatatgcacagtggctgcacgttcaaccatagatacgtcaaatccaacccgcgagaggttgaaaatgccacctggatgctaacagtaagattaaactagctctgaattattctttatctgctgctccatctattttcatatgtgtggtgtatgaactaattactggtcctaaacatcatatatttaaaagtggagggattatctatttcctattgctgatcttgtgatccatgtttacaagtaaaatatgtgtattgtcaagtaatttgactggttgaatgttgcttttcggttcaggtattccattgttttgggcagtacttctgcctgcacttcgaggcattccagctcggaatggctccagtctatatggctttcctccgattcatgggtgatgagaatgaagcaaggaactatacatatagcctagaggttggtggtaatgggaggaaaatggtatgggaaggtactcctagaagcatccgtgacagccaccgcaaggtccgtgacagccatgatggcctcatcatccagaggaatatggcgctgttcttctctggtggtgacaggaaggagctgaagctgagggtgactgggcggatctggaaagagcagacgaaccccgatggagcctgcattcctaacctttgcagctgagcaagggagacgattgaaaagaagaagaaaaaaaagaaagaaaatattgtgttatttggctggcttttttaaaaaattgtcatgctatgttttcattatagcctgctgttaaaatattgtaccagtatgtagggtgtaaaatgctcttgtaaagtaattgtgtatatcgaattcatttacaagttgtaccaccaatccctgtgttatgttgatgtgttgtttgagttccgttgtggatgtattgggctcaagaagtgcctaatgttcatgtttatt

SEQ ID NO: 76595 - DNA, 647 bp, Zea Mays
cacaatctacctatcgttggcgtcctgtggtttactcatgtcgcggtggtggcgcatcgcgcggtccacgggtcatcctatcctcggcatgtgggtttcggcgatctcgtcggatcatcacacaagcggcaaaaaaaaaaatctggtgacttgagggcgtgtgggaggcaggctgatcgcgttcaaggaagattgcttccagggcccaaacggaagagccggtgcagtacccttacacaaccacgcaactcagatggtgtataccgcgtgtagtaagaaagtgaggaattctgctttcgatcaagaataaatgcaaatgttagctaatgcaagcatcaaaatttatttatgttttgggggtgaagaatgcaaacatcgagtttaacaatgaagattcataaaatataaggttggggacatatacccatgggttttttattggcataaggataaacttcgccaagaaaacagaagaggcagctaccattgaaggtaaatagcaaagtaagctgtactccagaagtgacagctcacaaatgtagttgactaagaactcaagatgcagagatgagccctgcagaaagaaaaaaaaatcaaccagcacatggaattggtaggaactgcaaaacagtgaaacatgtaccttg

SEQ ID NO: 76596 - DNA, 2999 bp, Zea Mays
gccgtcgccttcttcttccccaaccctattacaaaccctggttcagacgacagtgccaatctccaactcatacccctattccagaccctgattcttccacaagggggcagttgtcggtgatggaggcgttcggcgggttcttcgtggacgagaaggcagcgcgggtggagaacatcttcctcgagttcctgaagcgattcaaggagtctgatggcgcgggggagccgttctacgaggcggagatggaggtgatgcggtcgcgggagtccactaccatgtacgtagactttgcgcacgtcatgcgcttcaacgacgtcctccagaaggccatctctgaggagtacctcaggtttgaaccgtacttgaggaatgcatgcaagaggtttgcgttggagcaccgggctggcgagaaccgtgccccgctcatctcagatgatagccccaacaaagatatcaacattgctttctataacatcccgatgctgaaaaaactgagagagcttgggacagccgaaattggtaagctcacatcagtaatgggtgttgtgacacggacaagtgaagtgcggcctgaactattgcaaggaaccttcaaatgtctcgactgtgggaatgttgtgaagaatgtggagcagcagttcaagtacactgagccgataatatgcgttaatgcaacatgccagaacagaacaaaatgggcccttcttcgtcaggaaagcaaattcacagattggcagcgggtcagaatgcaggagacatcaaaagagatacccgctgggtcacttcctcgttcccttgatgtcattctgcggcatgagattgttgagaaggccagagctggggacacttcctgatgttatggcactaacttcacctggcgaacgagcagagtgtcgcagggaagctcctcagcgaaaaaacggaggtgttcaagaaggtgtaaagggcttgaagtcccttggagttagggatctgtcttatcgccttgcctttgtagcaaattcagtgcaggtcgcagatggtaggagagaagtggacatcagggaacgggacacagatggtgatgacagtgagagacagaaattcacagaagaagaggaagatgaagttgttaggatgaggaacactcctgatttctttaataagatagttgatagcatatgtcctaccgtatttggtcatcaagaaattaagagggccgtgcttcttatgcttttgggtggtgttcataagataacacatgaagggatcaaccttagaggtgacatcaatgtctgtattgttggtgacccaagctgtgcaaagtctcagttcctaaaatatactgctggtattgttccaagatctgtttacacgtcagggaagtcatcatcagctgctggtctgacagcaactgttgctaaagaaccagagactggtgaattctgtattgaggctggtgccctgatgctagctgataatggtgtttgttgtatcgatgaatttgataaaatggacattaaggatcaggtcgctatacatgaagcaatggaacagcaaacaattagcattaccaaagcaggaatacaggcaactttgaatgcacgaacatcaattttagctgcagcaaatccgaccggaggccgttatgacaagtcaaaaccacttaagtacaatgttgcattgcccccagctattctttcaagatttgatctggtctacatcatgatcgatgaacctgatgaaaacactgactaccacattgctcatcacattgtaagagtccatcagaaacgtgaagaagcacttgcccctgcatttagcaccgcacaactgaagcgttatatttcttttgcaaaatctttgaaacctcagcttagttcagaagcaaagaaagttctggtggagtcgtatgttacgcttcgtaggggggacagtactcctggaactagggttgcttataggatgacagttcggcaattggaagcattgattcggctgtcagaagctattgctcgaagccatttagaaagagttgttctcccagctcatgtccgcctggcagttaaattgctcaagacatccatcatcagtgttgagtcaagtgaagttgatctctctgacttccaagatgctgaagatggaacaaatgtaccttctgagagtgacgccggacagccagctgaagaagatgctgctcctcagcagcagggtgcagaaaatgaccaagcagcggataatggtaagaagaaattggtaataactgaagaacacttccagagagttactcaagctttggttatgagactaaggcagcatgaagagtcagtcaagaaagatggagatggtttagctggcatgaagcaaggggatcttatcatctggtatgttgagcagcagaatgccaaaggggcatatagttctactgcagaggtgaaggaagaagtgaagtgtatcaaggccattatagagagacttatacagcgggaaggccatcttatagtcattgacgaaggtactgcagccgcagccgaagatggcagtggcgcaaggagaacatcagagagtagaatactggcagttaacccgaactatgttattgattagcaacggcatcttaacatgctgttaacccaagccagttgatgtggttagctaactgaagctatgattctggtgatgtgtccgttgtgctctagagttgttgtaccatctccgtcactggtgtgctcgttccaagggagcacatgatctccaaaactacatactacgtttagtgatgcaggataattagcatctgtagtcttactaattttgacccgtgtttccctagtgaattttcgtagcaacagctttgatttatcagtcactgagtgctgcaattttctatttgctttctcaagttcaccctttgttgatccatctagatgggatcagagaatagctgtgctaatttatgttacaatgtcgcagaacccatttatttatttgattgctttgtgaggaagtcagtttattaa

SEQ ID NO: 76597 - DNA, 2905 bp, Zea Mays
gccgtcgccttcttcttccccaaccctattacaaaccctggttcagacgacagtgccaatctccaactcatacccctattccagaccctgattcttccacaagggggcagttgtcggtgatggaggtgatgcggtcgcgggagtccactaccatgtacgtagactttgcgcacgtcatgcgcttcaacgacgtcctccagaaggccatctctgaggagtacctcaggtttgaaccgtacttgaggaatgcatgcaagaggtttgcgttggagcaccgggctggcgagaaccgtgccccgctcatctcagatgatagccccaacaaagatatcaacattgctttctataacatcccgatgctgaaaaaactgagagagcttgggacagccgaaattggtaagctcacatcagtaatgggtgttgtgacacggacaagtgaagtgcggcctgaactattgcaaggaaccttcaaatgtctcgactgtgggaatgttgtgaagaatgtggagcagcagttcaagtacactgagccgataatatgcgttaatgcaacatgccagaacagaacaaaatgggcccttcttcgtcaggaaagcaaattcacagattggcagcgggtcagaatgcaggagacatcaaaagagatacccgctgggtcacttcctcgttcccttgatgtcattctgcggcatgagattgttgagaaggccagagctggggacacggttatatttactggaactgttgttgcagttcctgatgttatggcactaacttcacctggcgaacgagcagagtgtcgcagggaagctcctcagcgaaaaaacggaggtgttcaagaaggtgtaaagggcttgaagtcccttggagttagggatctgtcttatcgccttgcctttgtagcaaattcagtgcaggtcgcagatggtaggagagaagtggacatcagggaacgggacacagatggtgatgacagtgagagacagaaattcacagaagaagaggaagatgaagttgttaggatgaggaacactcctgatttctttaataagatagttgatagcatatgtcctaccgtatttggtcatcaagaaattaagagggccgtgcttcttatgcttttgggtggtgttcataagataacacatgaagggatcaaccttagaggtgacatcaatgtctgtattgttggtgacccaagctgtgcaaagtctcagttcctaaaatatactgctggtattgttccaagatctgtttacacgtcagggaagtcatcatcagctgctggtctgacagcaactgttgctaaagaaccagagactggtgaattctgtattgaggctggtgccctgatgctagctgataatggtgtttgttgtatcgatgaatttgataaaatggacattaaggatcaggtcgctatacatgaagcaatggaacagcaaacaattagcattaccaaagcaggaatacaggcaactttgaatgcacgaacatcaattttagctgcagcaaatccgaccggaggccgttatgacaagtcaaaaccacttaagtacaatgttgcattgcccccagctattctttcaagatttgatctggtctacatcatgatcgatgaacctgatgaaaacactgactaccacattgctcatcacattgtaagagtccatcagaaacgtgaagaagcacttgcccctgcatttagcaccgcacaactgaagcgttatatttcttttgcaaaatctttgaaacctcagcttagttcagaagcaaagaaagttctggtggagtcgtatgttacgcttcgtaggggggacagtactcctggaactagggttgcttataggatgacagttcggcaattggaagcattgattcggctgtcagaagctattgctcgaagccatttagaaagagttgttctcccagctcatgtccgcctggcagttaaattgctcaagacatccatcatcagtgttgagtcaagtgaagttgatctctctgacttccaagatgctgaagatggaacaaatgtaccttctgagagtgacgccggacagccagctgaagaagatgctgctcctcagcagcagggtgcagaaaatgaccaagcagcggataatggtaagaagaaattggtaataactgaagaacacttccagagagttactcaagctttggttatgagactaaggcagcatgaagagtcagtcaagaaagatggagatggtttagctggcatgaagcaaggggatcttatcatctggtatgttgagcagcagaatgccaaaggggcatatagttctactgcagaggtgaaggaagaagtgaagtgtatcaaggccattatagagagacttatacagcgggaaggccatcttatagtcattgacgaaggtactgcagccgcagccgaagatggcagtggcgcaaggagaacatcagagagtagaatactggcagttaacccgaactatgttattgattagcaacggcatcttaacatgctgttaacccaagccagttgatgtggttagctaactgaagctatgattctggtgatgtgtccgttgtgctctagagttgttgtaccatctccgtcactggtgtgctcgttccaagggagcacatgatctccaaaactacatactacgtttagtgatgcaggataattagcatctgtagtcttactaattttgacccgtgtttccctagtgaattttcgtagcaacagctttgatttatcagtcactgagtgctgcaattttctatttgctttctcaagttcaccctttgttgatccatctagatgggatcagagaatagctgtgctaatttatgttacaatgtcgcagaacccatttatttatttgattgctttgtgaggaagtcagtttattaa

SEQ ID NO: 76598 - DNA, 3018 bp, Zea Mays
gccgtcgccttcttcttccccaaccctattacaaaccctggttcagacgacagtgccaatctccaactcatacccctattccagaccctgattcttccacaagggggcagttgtcggtgatggaggcgttcggcgggttcttcgtggacgagaaggcagcgcgggtggagaacatcttcctcgagttcctgaagcgattcaaggagtctgatggcgcgggggagccgttctacgaggcggagatggaggtgatgcggtcgcgggagtccactaccatgtacgtagactttgcgcacgtcatgcgcttcaacgacgtcctccagaaggccatctctgaggagtacctcaggtttgaaccgtacttgaggaatgcatgcaagaggtttgcgttggagcaccgggctggcgagaaccgtgccccgctcatctcagatgatagccccaacaaagatatcaacattgctttctataacatcccgatgctgaaaaaactgagagagcttgggacagccgaaattggtaagctcacatcagtaatgggtgttgtgacacggacaagtgaagtgcggcctgaactattgcaaggaaccttcaaatgtctcgactgtgggaatgttgtgaagaatgtggagcagcagttcaagtacactgagccgataatatgcgttaatgcaacatgccagaacagaacaaaatgggcccttcttcgtcaggaaagcaaattcacagattggcagcgggtcagaatgcaggagacatcaaaagagatacccgctgggtcacttcctcgttcccttgatgtcattctgcggcatgagattgttgagaaggccagagctggggacacggttatatttactggaactgttgttgcagttcctgatgttatggcactaacttcacctggcgaacgagcagagtgtcgcagggaagctcctcagcgaaaaaacggaggtgttcaagaaggtgtaaagggcttgaagtcccttggagttagggatctgtcttatcgccttgcctttgtagcaaattcagtgcaggtcgcagatggtaggagagaagtggacatcagggaacgggacacagatggtgatgacagtgagagacagaaattcacagaagaagaggaagatgaagttgttaggatgaggaacactcctgatttctttaataagatagttgatagcatatgtcctaccgtatttggtcatcaagaaattaagagggccgtgcttcttatgcttttgggtggtgttcataagataacacatgaagggatcaaccttagaggtgacatcaatgtctgtattgttggtgacccaagctgtgcaaagtctcagttcctaaaatatactgctggtattgttccaagatctgtttacacgtcagggaagtcatcatcagctgctggtctgacagcaactgttgctaaagaaccagagactggtgaattctgtattgaggctggtgccctgatgctagctgataatggtgtttgttgtatcgatgaatttgataaaatggacattaaggatcaggtcgctatacatgaagcaatggaacagcaaacaattagcattaccaaagcaggaatacaggcaactttgaatgcacgaacatcaattttagctgcagcaaatccgaccggaggccgttatgacaagtcaaaaccacttaagtacaatgttgcattgcccccagctattctttcaagatttgatctggtctacatcatgatcgatgaacctgatgaaaacactgactaccacattgctcatcacattgtaagagtccatcagaaacgtgaagaagcacttgcccctgcatttagcaccgcacaactgaagcgttatatttcttttgcaaaatctttgaaacctcagaagcaaagaaagttctggtggagtcgtatgttacgcttcgtaggggggacagtactcctggaactagggttgcttataggatgacagttcggcaattggaagcattgattcggctgtcagaagctattgctcgaagccatttagaaagagttgttctcccagctcatgtccgcctggcagttaaattgctcaagacatccatcatcagtgttgagtcaagtgaagttgatctctctgacttccaagatgctgaagatggaacaaatgtaccttctgagagtgacgccggacagccagctgaagaagatgctgctcctcagcagcagggtgcagaaaatgaccaagcagcggataatggtaagaagaaattggtaataactgaagaacacttccagagagttactcaagctttggttatgagactaaggcagcatgaagagtcagtcaagaaagatggagatggtttagctggcatgaagcaaggggatcttatcatctggtatgttgagcagcagaatgccaaaggggcatatagttctactgcagaggtgaaggaagaagtgaagtgtatcaaggccattatagagagacttatacagcgggaaggccatcttatagtcattgacgaaggtactgcagccgcagccgaagatggcagtggcgcaaggagaacatcagagagtagaatactggcagttaacccgaactatgttattgattagcaacggcatcttaacatgctgttaacccaagccagttgatgtggttagctaactgaagctatgattctggtgatgtgtccgttgtgctctagagttgttgtaccatctccgtcactggtgtgctcgttccaagggagcacatgatctccaaaactacatactacgtttagtgatgcaggataattagcatctgtagtcttactaattttgacccgtgtttccctagtgaattttcgtagcaacagctttgatttatcagtcactgagtgctgcaattttctatttgctttctcaagttcaccctttgttgatccatctagatgggatcagagaatagctgtgctaatttatgttacaatgtcgcagaacccatttatttatttgattgctttgtgaggaagtcagtttattaa

SEQ ID NO: 76599 - DNA, 919 bp, Zea Mays
caaattctctactttcgaaaatgcgctctttcaatttatctttcagaatccttgctttgtttttcactttttcttgcttgctcaagctcttctcatcttcttctctgctctccctgctttgtttttgttgtattttgtacaaaacattttgatccgtcattatcttgctcaaattctgtaactttcatcccaaagttcgccagaattcgtttcttttttattttgttaccagtagagcatctcctgatctacctcttcgtcgtgtttggtaaagactattgagctcaggtgtgttgcgttgtgcagagcacaggtggtgggatggccaccagtctgcaactaccgcaagaacacgatgactaccacccagctggagggcagcaaggaggatggtgatgccaagcagggtcaggggttcctgtacgtcaaggtcagcatggatggcgcgccgtacctcaggaagatcgacctcaagacttacaagaactacaaggacctgtcgaccgcgcttgagaagatgttcagtggcttcagtactggcaaggacggctcatctgagtaccgcaaggatggtgaatatgttctgacttacgaggacaaggatggagattggatgcttgtcggcgacgtaccatgggagatgttcgccggctcctgccgcaggctcaggatcatgaaaggctcagatgcgattggactcgctccaagggcagccgataagtccaagaaccgcaactagaacggtggcttcctatccttacacagtccggtacgagggaggagatgcagtgacttgtagggatctgtacgaaaaccgaaaaagtctactaacagctatgacttgtgagaagaattccttgcctcgtttcagcgtgtgaaacagaacagacgaagctgatattctgccgggaggcaatta

SEQ ID NO: 76600 - DNA, 1116 bp, Zea Mays
agggaagcttcacctgatcacccttcaaacaaatcactcttcgctccggctccgactcgcactctttccccttcccttcccttcccactcccaggctcccactctcaccccttccgcctacccacgcaaacggcacacgaactaacagccacctctcacgtcccccaccctctggttcatgtcctgctgctccccatgtcgcctccactcgagctcgactacataggcctctcgccgccggcggcagccgccgccgctgaaaacgacgaactgaagggtactgagctccgcctcgggctgccagggtccgggtcgccggaccgccgtgtcgtggctgccaccgcgaccaccctggacctgctcccggccaagggcgccaagcgcgggttttctgacgaggcgcccccgccatcgcctgttgccactgccggaaagggaaagaaggtggcagaagaggagtacgacgagaagaaggtggcagcgaccccgcagccggccgccaaagcacaggtggtgggatggccaccagtctgcaactaccgcaagaacacgatgactaccacccagctggagggcagcaaggaggatggtgatgccaagcagggtcaggggttcctgtacgtcaaggtcagcatggatggcgcgccgtacctcaggaagatcgacctcaagacttacaagaactacaaggacctgtcgaccgcgcttgagaagatgttcagtggcttcagtactggcaaggacggctcatctgagtaccgcaaggatggtgaatatgttctgacttacgaggacaaggatggagattggatgcttgtcggcgacgtaccatgggagatgttcgccggctcctgccgcaggctcaggatcatgaaaggctcagatgcgattggactcgctccaagggcagccgataagtccaagaaccgcaactagaacggtggcttcctatccttacacagtccggtacgagggaggagatgcagtgacttgtagggatctgtacgaaaaccgaaaaagtctactaacagctatgacttgtgagaagaattccttgcctcgtttcagcgtgtgaaacagaacagacgaagctgatattctgccgggaggcaatta

SEQ ID NO: 76601 - DNA, 1096 bp, Zea Mays
caaattctctactttcgaaaatgcgctctttcaatttatctttcagaatccttgctttgtttttcactttttcttgcttgctcaagctcttctcatcttcttctctgctctccctgctttgtttttgttgtattttgtacaaaacattttgatccgtcattatcttgctcaaattctgtaactttcatcccaaagttcgccagaattcgtttcttttttattttgttaccagtagagcatctcctgatctacctcttcgtcgtgtttggtaaagactattgagctcaggtgtgttgcgttgtgcagagcacaggtggtgggatggccaccagtctgcaactaccgcaagaacacgatgactaccacccagctggagggcagcaaggaggatggtgatgccaagcagggtcaggggttcctgtacgtcaaggtcagcatggatggcgcgccgtacctcaggaagatcgacctcaagacttacaagaactacaaggacctgtcgaccgcgcttgagaagatgttcagtggcttcagtactggcaaggacggctcatctgagtaccgcaaggatggtgaatatgttctgacttacgaggacaaggatggagattggatgcttgtcggcgacgtaccatgggagatgttcgccggctcctgccgcaggctcaggatcatgaaaggctcagatgcgattggactcgctccaagggcagccgataagtccaagaaccgcaactagaacggtggcttcctatccttacacagtccggtacgagggaggagatgcagtgacttgtagggatctgtacgaaaaccgaaaaagtctactaacagctatgacttgtgagaagaattctggcttatggtctgcactagaatggcttggtacatcgtctatggacaaaacacgctattcgattaattgttgttaattaagccttggggggggtacgagtgctattcatgtaaatggtttggtgcatcgtgtgctgctgctgcctgctgctgttactacgattgagctcccctataatactatgatttgaagagagatggcgatgtcatatgatcccttggaatcgggctttactgccta

SEQ ID NO: 76602 - DNA, 1034 bp, Zea Mays
caaattctctactttcgaaaatgcgctctttcaatttatctttcagaatccttgctttgtttttcactttttcttgcttgctcaagctcttctcatcttcttctctgctctccctgctttgtttttgttgtattttgtacaaaacattttgatccgtcattatcttgctcaaattctgtaactttcatcccaaagttcgccagaattcgtttcttttttattttgttaccagtagagcatctcctgatctacctcttcgtcgtgtttggtaaagactattgagctcaggtgtgttgcgttgtgcagagcacaggtggtgggatggccaccagtctgcaactaccgcaagaacacgatgactaccacccagctggagggcagcaaggaggatggtgatgccaagcagggtcaggggttcctgtacgtcaaggtcagcatggatggcgcgccgtacctcaggaagatcgacctcaagacttacaagaactacaaggacctgtcgaccgcgcttgagaagatgttcagtggcttcagtactggcaaggacggctcatctgagtaccgcaaggatggtgaatatgttctgacttacgaggacaaggatggagattggatgcttgtcggcgacgtaccatgggactccaagggcagccgataagtccaagaaccgcaactagaacggtggcttcctatccttacacagtccggtacgagggaggagatgcagtgacttgtagggatctgtacgaaaaccgaaaaagtctactaacagctatgacttgtgagaagaattctggcttatggtctgcactagaatggcttggtacatcgtctatggacaaaacacgctattcgattaattgttgttaattaagccttggggggggtacgagtgctattcatgtaaatggtttggtgcatcgtgtgctgctgctgcctgctgctgttactacgattgagctcccctataatactatgatttgaagagagatggcgatgtcatatgatcccttggaatcgggctttactgccta

SEQ ID NO: 76603 - DNA, 1515 bp, Zea Mays
caaattctctactttcgaaaatgcgctctttcaatttatctttcagaatccttgctttgtttttcactttttcttgcttgctcaagctcttctcatcttcttctctgctctccctgctttgtttttgttgtattttgtacaaaacattttgatccgtcattatcttgctcaaattctgtaactttcatcccaaagttcgccagaattcgtttcttttttattttgttaccagtagagcatctcctgatctacctcttcgtcgtgtttggtaaagactattgagctcaggtgtgttgcgttgtgcagagcacaggtggtgggatggccaccagtctgcaactaccgcaagaacacgatgactaccacccagctggagggcagcaaggaggatggtgatgccaagcagggtcaggggttcctgtacgtcaaggtcagcatggatggcgcgccgtacctcaggaagatcgacctcaagacttacaagaactacaaggacctgtcgaccgcgcttgagaagatgttcagtggcttcagtactggcaaggacggctcatctgagtaccgcaaggatggtgaatatgttctgacttacgaggacaaggatggagattggatgcttgtcggcgacgtaccatgggagtgagttacacccatctgtcttaattaaaacaatggaattggaactaaattaatcaccgattagggcatgtacagtgggtgtcttgagttatgtcttcgagtgtgtttaggggggtgaatgtaaaaaaactcaagatatgtatcttgacgaagacacagtgtcttagctctatgttcgagacatgagactagctgattggtcactttaatttattgaatgctctgattggtacaattaatatggtaagacacatgttttagacacgtccactgtattatgttgtgttttaggtgtgtcttatacttggagtaccgtgcaacagtgtctaggttgtacatgcccttaggtttcgtggctcattttttttctcaactaaatacatgtttagctgccacatcgtctttcgctccaattgtaggatgttcgccggctcctgccgcaggctcaggatcatgaaaggctcagatgcgattggactcgctccaagggcagccgataagtccaagaaccgcaactagaacggtggcttcctatccttacacagtccggtacgagggaggagatgcagtgacttgtagggatctgtacgaaaaccgaaaaagtctactaacagctatgacttgtgagaagaattctggcttatggtctgcactagaatggcttggtacatcgtctatggacaaaacacgctattcgattaattgttgttaattaagccttggggggggtacgagtgctattcatgtaaatggtttggtgcatcgtgtgctgctgctgcctgctgctgttactacgattgagctcccctataatactatgatttgaagagagatggcgatgtcatatgatcccttggaatcgggctttactgccta

SEQ ID NO: 76604 - DNA, 1126 bp, Zea Mays
caaattctctactttcgaaaatgcgctctttcaatttatctttcagaatccttgctttgtttttcactttttcttgcttgctcaagctcttctcatcttcttctctgctctccctgctttgtttttgttgtattttgtacaaaacattttgatccgtcattatcttgctcaaattctgtaactttcatcccaaagttcgccagaattcgtttcttttttattttgttaccagtagagcatctcctgatctacctcttcgtcgtgtttggtaaagactattgagctcaggtgtgttgcgttgtgcagagcacaggtggtgggatggccaccagtctgcaactaccgcaagaacacgatgactaccacccagctggagggcagcaaggaggatggtgatgccaagcagggtcaggggttcctgtacgtcaaggtcagcatggatggcgcgccgtacctcaggaagatcgacctcaagacttacaagaactacaaggacctgtcgaccgcgcttgagaagatgttcagtggcttcagtactggcaaggacggctcatctgagtaccgcaaggatggtgaatatgttctgacttacgaggacaaggatggagattggatgcttgtcggcgacgtaccatgggactgccacatcgtctttcgctccaattgtaggatgttcgccggctcctgccgcaggctcaggatcatgaaaggctcagatgcgattggactcgctccaagggcagccgataagtccaagaaccgcaactagaacggtggcttcctatccttacacagtccggtacgagggaggagatgcagtgacttgtagggatctgtacgaaaaccgaaaaagtctactaacagctatgacttgtgagaagaattctggcttatggtctgcactagaatggcttggtacatcgtctatggacaaaacacgctattcgattaattgttgttaattaagccttggggggggtacgagtgctattcatgtaaatggtttggtgcatcgtgtgctgctgctgcctgctgctgttactacgattgagctcccctataatactatgatttgaagagagatggcgatgtcatatgatcccttggaatcgggctttactgccta

SEQ ID NO: 76605 - DNA, 1900 bp, Zea Mays
agggaagcttcacctgatcacccttcaaacaaatcactcttcgctccggctccgactcgcactctttccccttcccttcccttcccactcccaggctcccactctcaccccttccgcctacccacgcaaacggcacacgaactaacagccacctctcacgtcccccaccctctggttcatgtcctgctgctccccatgtcgcctccactcgagctcgactacataggcctctcgccgccggcggcagccgccgccgctgaaaacgacgaactgaagggtactgagctccgcctcgggctgccagggtccgggtcgccggaccgccgtgtcgtggctgccaccgcgaccaccctggacctgctcccggccaagggcgccaagcgcgggttttctgacgaggcgcccccgccatcgcctgttgccactgccggaaagggaaagaaggtggcagaagaggagtacgacgagaagaaggtggcagcgaccccgcagccggccgccaaagcacaggtggtgggatggccaccagtctgcaactaccgcaagaacacgatgactaccacccagctggagggcagcaaggaggatggtgatgccaagcagggtcaggggttcctgtacgtcaaggtcagcatggatggcgcgccgtacctcaggaagatcgacctcaagacttacaagaactacaaggacctgtcgaccgcgcttgagaagatgttcagtggcttcagtactggcaaggacggctcatctgagtaccgcaaggatggtgaatatgttctgacttacgaggacaaggatggagattggatgcttgtcggcgacgtaccatgggagtgagttacacccatctgtcttaattaaaacaatggaattggaactaaattaatcaccgattagggcatgtacagtgggtgtcttgagttatgtcttcgagtgtgtttaggggggtgaatgtaaaaaaactcaagatatgtatcttgacgaagacacagtgtcttagctctatgttcgagacatgagactagctgattggtcactttaatttattgaatgctctgattggtacaattaatatggtaagacacatgttttagacacgtccactgtattatgttgtgttttaggtgtgtcttatacttggagtaccgtgcaacagtgtctaggttgtacatgcccttaggtttcgtggctcattttttttctcaactaaatacatgtttagctgccacatcgtctttcgctccaattgtaggatgttcgccggctcctgccgcaggctcaggatcatgaaaggctcagatgcgattggactcggtatgtttgtgctcctgttatgtctagtgtatcgtcgcgctaatcatgttgtcttggttgtttggtggaaacggtgggatcgaagtacgttctattgtcggttgtacatgatacaatttttgttaaggagttcctgtcccatggtcctggtccctgcatggctgcatcactggtggtagttctcttggctccaagggcagccgataagtccaagaaccgcaactagaacggtggcttcctatccttacacagtccggtacgagggaggagatgcagtgacttgtagggatctgtacgaaaaccgaaaaagtctactaacagctatgacttgtgagaagaattctggcttatggtctgcactagaatggcttggtacatcgtctatggacaaaacacgctattcgattaattgttgttaattaagccttggggggggtacgagtgctattcatgtaaatggtttggtgcatcgtgtgctgctgctgcctgctgctgttactacgattgagctcccctataatactatgatttgaagagagatggcgatgtcatatgatcccttggaatcgggctttactgccta

SEQ ID NO: 76606 - DNA, 3600 bp, Zea Mays
cgctctggaacccgccccagcataacttccaagtcccaaataaactcctcggtgactcgccccaacaccaaacagtaaacgacgcttccctccgccgccgtcagatcggagctcgactccgtgccccgcttctccgccgcgatggcggcgccaccgcgccgctccctccttgtccttctctccgggctcctagtcttcgcctcccttgttgccctcaccacagccatctacgaggaccaggtcggcctcgcggactggcatcagaagtacattggcaaagtaaagcaagcagtttaccacagccagaagagtggaaggagacgagttgtggtcttgacagaggaaaatgtgatctcgtctcttgatctacgttctggagatatattctggcgacatgtcattgacaagaatgaccccttggatcagcttggtctatcacttggaaaatatgttctaactctttcttcggggggaactatattaagggcatggaatcttccagatggactgatgatctgggaaactaaccttcgaacttccacagcatcgaactcacagttgcatgttatgtcaaacaataaagcggccagggacaacttagttttagtttcagctgggcgatggatttatgctgtatcaagcattgatggggcaatttcatgggaaaaggagttttctcttgatgacttggaaatcaagcggattctccaatcacctgaaaatgatgttgtgtatgctttaggacttgctggttcctcgaagctagctttgtatcacttgagtgctaaaactggagagatactaaaagatatccaagagtcattccctggtggattatgtggtaaaacagtacttggttctgataatgtgtttgtagcattagataaggccagatcaagtctgttacttattgaattcaagggtgagagaattagctacaacaaggtgctggtttcagatcttgttcaagacttatcaggatcatttgagcttcaatctttgtccagtgacatcatatctttgcaaacgtcatcttctatttccctcctaaagctcaaaggtaccgatggattggaagtacttcagagatttgaccagccagctgcagtgagtgattccttgccaatcacagaaaaagaaaaagcttttgctgtcgtgcaacatttgggttccgaaattgagtttatcgtaaaatttacaagtgacctaagcagtgagattattagagaaaaggttaatatagaccaaaataagggcaacgttgagagggtcttcttgaatagttatattcgaactgacaagtctcatggttttcgagctttggttgtaatggaggatcattcactcttgttaattcaacaaggtgaggttgtttggagcagagacgatgggctggcttcaattgttgatgtaacaacatcagaattgcctgttgagaaggatggtgtatcagttgccggtgtggaacacaatctctttgagtggcttaagggacacatgctgaaactcaaaggaactctaatgcttgctaatgctgatgaagttgctgcaatccaagcattgagactaaagagctctgagaaaaataagatgacaagagaccataatggatttcgcaaactccttgttgtattgacaaaggctggcaaagtgatgactctgcacactggagatggacgcgttatctggtcaaaattgctgccatctcttcgtgcctccagatttggtggagtgccttctgcattaaggatataccaatggcaggtcccgcatcacagtgtgatgcgggaaaacccatctgtacttgttgttggtagaactggagcagaatcttcagctcctggcgtattctctattcttgattcatattctggagaagaacttaactctatgaaacttgaccattctgttttccaaattatccccttaacactgaaggattcatcagagcagcgactttatctgattcttgattccaattccaatgctcatttatacccgaaatctgcagacaccctcaatatatttcttcatgaaatgtcaaacctgtatttctactctgtagatattcaagcaaatgttattaaagggtattcattacagaaatcatgtgatctcaattttggtgatgactactgcttcagtacgaaggagttatggtccatcatctttccttctgattctgaaaggattgttatctctgaaacgcgaaatatgaatgaggttgttcatacccaagctaagacaattggtgatcatgatgtgatgtacaagtacttgtcaaagaatttagtttttgttgctactttgtctcctaaagctgctggtgatattggatctgtgctacctgaagaagcttcacttgttgcatatcttattgatgcagtcactggacgcatacttcatcgtgtaactcatcatggtgcacaaggccctgtacatgcagtcttgagcgagaactgggttgtttatcattattttaatctgcgagctcacagatttgaaatggcggtgattgagatatatgatcaatctagggcggacaataaagatgtcatgaagctcatacttgggaagcataatctttcagcaccaattacatcatacgcccgccctgaggtggcagtaaaatcccagtcatactttttcacccattcagtaaaagcaatggcagttacacaaacggctaaggggatcacttccaagcagcttctgattggtactattggtgaccaggttttggcacttgataagcgctatcttgatccacgccgttcagtgaacccgacacaacaagaaaaagaagagggcattataccattaacagattctttgcctataatacctcagtcctttgtgacgcactctcaccaagtggaggccctgcgagggatcgtttctattcctgcgaagctggagtccacgactcttgttttcacatacggcgtcgatctgttctacacccagcttgccccgtcaaggacctacgattccctcaccgacgaattcagctacgcgctgcttctaatcacgatcgcagtcctggttgctgccatcatcgtcacatggatttggtccgagaagaaggagttgggggacaagtggaggtgagcgaggtctcaaagttgttacgcggaagaaaatttcgggccccagtcagctagctcctttgttttggtcccccccttttttcattttagtgctagagttcacttcacctttgactataggcattttatttatgtaaccattcgacaagaagaaagcctatctgctgtgaaccgacacactgccgaagcagccacctgtgcagctgaaaatttctggagatggcatcaaaggatattagcagagcgcagatggcgagagaatggtttgcttataatgtgtaagctgtgtaccccgactgcaaccgaactctttagcagattatagcaattgctgttgatatagcgtttctgcttctcttataactttaatggcaggaactgtattttgccttcctctcctgccattaccattctgttgtcagcctgtgataggctgggctacaagatgctctttgctgtggtttgcgcaacactcagttctattgctatt

SEQ ID NO: 76607 - DNA, 707 bp, Zea Mays
atgaagctggcgagcagcagcagcacgaggccgccgacggccacgcccacgacgagcgacgtagacggcccggagctgccgccaccgccccccggcgagtgcgacttgggaggcgagtgggaggacggcgtggatcgcccacccccagacgacggcggggacctgccccctccaccggacgatggcggcgacggggtgtccgatggaggcgacggggtggcgggcgtgcccggggaggaaggggaggagggcgagggcgcagagggagtcaccggggtggaggccggcgcgggggccgggacggaggggggtgacggcggcggcgcggctggggacggcggggacggcgtgggcggggtgggcgtgggaggcgtgggcgccgccggtggcggcgcggacggggtcgcgggcggcggatttgtcgcgttggccggcggagccgatggcgtggtcggcgccggcgcggccgtcggcgacgacgacatcacggccccccttagctcccggctccggctccggctccggctcccgctttggagctacggccggctggcctgttgcttagcgcgtaagaatgggcaagtggagcacggaggagacgatgaggcgagatgcttcgcagtgctagcgcccgcctagtagcaatcccctcaatcaatcaacgggaggaaggggagagaggagtaggagtaggagtaggagtccac

SEQ ID NO: 76608 - DNA, 809 bp, Zea Mays
atacaatgatgttactcacaggaaggttacaaaagtctgaaaaacaacgaaggataagactcaacgaaggataagactttcctggttaagcacgtttaagtggcaggtagagacatactttctcaaggtagtacatgactacaagtccataacatttattaacaagaatacaacctagtcaccactcaccagaagtatgcttaactaaaaaggtagaaaaaataactactccctttgtcccaaattaaagatcgttttggggtgttaaatggattcataatttcatacaacacttaatgtatgtgttttatatatgtgtctagatccatgatcatccatttgaattaagatataaaaattgagagctaaaacaaatactacgttgggaccgagggagtacaattttgtaattagtattagtatcatagagcatgcaaaatgaagtatacaagtgcttatagtaagtagtacctaaatttcatattgataaatcacggccaatgatcaatgctaaagatgagaagttaggaagcattatgaaaacatcaaacggcaaaagatgttcaaaataattacccagtcaaccaagctgtcatccatatatgtttgggttgtgtcaactggtcgccgcccagtaataagctcaagaagcatgactccgaaggaaaatacatcggatttttctgttagcttgccagaagatgcatactcaggtgccaaatacctaaaaagccagcaagatgtgtattagcaagcataattattactagcatggaaagttgaatgttggaataactctcctaatagct

SEQ ID NO: 76609 - DNA, 1039 bp, Zea Mays
gttcatagatgccagtcctcccctccccaaaacccagcacaagcaagggaagggagggcacctctaggctccagccatggcgcagcagctgctgctcctcctccccgccccttccagaactttcttgaaggccctcccctctccctttctctcctacctcccccggcgccaccttgtccccgttaccgccgttcccgtagcacccggcatccggcggggcctgctccggtacgcgacgaagcgttcaagcttggtcgaagaactggagattgccaaggagaagcagccgcatagcaggcgcgccaatggcatcttctggatcttgctgctcaatttcggcatctacatggccgaccacttgttccagattcggcaaataaaatcactatacctgtatcatgcattcccttcatggttccagtttgtgacatcaacattttgccatgccaactggaatcatctttcaagcaatttattctttgtgtatatctttggaaagcttgtcgaggaggaagagggtaactttgctctctggatgtcttacattttgactggtgctggggcaaacttgatttcatggctagctcttccaacatcctctgtgtcacttggagcatctggtgctgtttttggccttttcaccattagtgttctagttaagatgtcatgggactggagaaagattcttgaagtgcttatccttggacaatttgttgttgacaaggtcttggaagcagcacgtgcaacaacaatcacgggccagtcatttcaagtgaacaacgtcgctcatgtgtcaggaccaagtcgattttaggttggacgacgcccaaaatttgttcgcacacgaatcttgtgccttcatcgatgagtgtgatactcaagatatggtggagtagtagagatgaaaatggatggaaaaaaatgggtttcgtttggtattgtatcccgttttaaccaatctgtttttgtatttgtcgaaaaatgtgaactggatggtatattgcaggaacaggaatgagaacaattaaatgttttttca

SEQ ID NO: 76610 - DNA, 1338 bp, Zea Mays
gcatgacacggttggaacaaataccttcctgtgaaagtgggcctcgcgttcatagatgccagtcctcccctccccaaaacccagcacaagcaagggaagggagggcacctctaggctccagccatggcgcagcagctgctgctcctcctccccgccccttccagaactttcttgaaggccctcccctctccctttctctcctacctcccccggcgccaccttgtccccgttaccgccgttcccgtagcacccggcatccggcggggcctgctccggcttggtcgaagaactggagattgccaaggagaagcagccgcatagcaggcgcgccaatggcatcttctggatcttgctgctcaatttcggcatctacatggccgaccacttgttccagattcggcaaataaaatcactatacctgtatcatgcattcccttcatggttccagtttgtgacatcaacattttgccatgccaactggaatcatctttcaagcaatttattctttgtgtatatctttggaaagcttgtcgaggaggaagagggtaactttgctctctggatgtcttacattttgactggtgctggggcaaacttgatttcatggctagctcttccaacatcctctgtgtcacttggagcatctggtgctgtttttggccttttcaccattagtgttctagttaagatgtcatgggactggagaaagattcttgaagtgcttatccttggacaatttgttgttgacaaggtcttggaagcagcacgtgcaacaacaatcacgggccagtcatttcaagtgaacaacgtcgctcatgtgtcaggtgctttgattggtgccgcgttggtgtttctggttagcagaatccctttttcatccaatgatgataatccaaaggcaacaaaaagagtaaatagaaaataaagatttgtcaacaacattatcaacctaacgtattactatcaatttttcattcattatcattccttcatatgatagctaccttttgaaaattcagttgtaacatttctgatttaaatgaaagatacatctgaaagttcagtgccggagtataaagttcgtttgtagaccaatgaccaagtcgattttaggttggacgacgcccaaaatttgttcgcacacgaatcttgtgccttcatcgatgagtgtgatactcaagatatggtggagtagtagagatgaaaatggatggaaaaaaatgggtttcgtttggtattgtatcccgttttaaccaatctgtttttgtatttgtcgaaaaatgtgaactggatggtatattgcaggaacaggaatgagaacaattaaatgttttttca

SEQ ID NO: 76611 - DNA, 1437 bp, Zea Mays
gcgaagaaagaagtatgaataaaacaaaatttgaagacgcctaacagcccgactgcttcgtttccacgcgcacgaaaccctagactagataaaaagttcccatttccctcaattccccaacttccctcgccgcaatctctcgccgcctccagtccagagccaccgtgagatctgcccgattccgccgcccggacccggggactccctcccctcctcgatccgttcgggcggccggccggcctagcttcaagtgcggggatggtgttctacttcaaggcgcggcccgaggccggcgactataccatcttcatgggtcttgacaagtacgagaacgaggacctcatcaaatacggcttccccgaggacatctggttccatgtagataagatgtcctctgcacatgtgtatgtgagattgaataaaggtcaatcaatggatgacatgagtgagggtttgctggaagactgtgcgcagcttgtcaaagctaattccattcaaggtaataaagtcaataacattgatgtagtttatactccatggtacaatttgaagaagaccccttcaatggatgtaggccaagttggttttcacaaccctaaattgctgcagaaggacgagcttgagttgcagtgcaccaccatgctgctccctgtgcacaaccatagctcctgtgcgctgccaggagtacaagccctggctatcgttctcctacttgtacaacctatgcaatcgcggttcgcactattaaagtggaaaagaggatcaatgagattgtgaaccgcttgaataagacaaaggtggaacggaaacctgatttaaaggctgaaagagaggctattagtgctgctgaaaaggcagaaagaaaggcacagcttagagacaagaaacgtagggaagagatggagaggcttgagaaagagaagcaggctgatatcaggagctacaagggtctaatggtccaagagaagatgacttccaacaagcaaatcgcttctggcagcaagaccctgcaggaacttgaagaagactttatgtgagaggcggacattataaatgccatgctgaagatttccttgaactgcttctgtcgaagacagaaggggtaccacaggcttgtgagatactggatgactcatgggcaggccatggtctgttattatctcctcttgctgttgtggtctatgtaaaccttgtttacttgctgaaaaaacaacggtgcatgctctaactgtggttgatgtaatggtctgttgcccatcaagttgaaatggtaatggaattatggtttcctggatttttttcaaacaataaagacatggcagcagataacttacatattccattctttgcatggagaacggctcaggaacttctttgtttgtgtaagagtgttatagaaatgaaccacacttagcttacatttggagattctttaat

SEQ ID NO: 76612 - DNA, 641 bp, Zea Mays
gcgaagaaagaagtatgaataaaacaaaatttgaagacgcctaacagcccgactgcttcgtttccacgcgcacgaaaccctagactagataaaaagttcccatttccctcaattccccaacttccctcgccgcaatctctcgccgcctccagtccagagccaccgtgagatctgcccgattccgccgcccggacccggggactccctcccctcctcgatccgttcgggcggccggccggcctagcttcaagtgcggggatggtgttctacttcaaggcgcggcccgaggccggcgactataccatcttcatgggtcttgacaagtacgagaacgaggacctcatcaaatacggcttccccgaggacatctggttccatgtagataagatgtcctctgcacatgtgtatgtgagattgaataaaggtcaatcaatggatgacatgagtgagggtttgctggaagactgtgcgcagcttgtcaaagctaattccattcaaggtaataaagtcaataacattgatgtagtttatactccatggtacaatttgaagaagaccccttcaatggatgtaggccaagttggttttcacaaccctaaattgggcatggcacgcatagtgacaatgtgcatcggtcggca

SEQ ID NO: 76613 - DNA, 2162 bp, Zea Mays
gttaacctctacgtgctaggcatacgtgacccaagagaacgtgctgctgggcacgctgacggtgcgcgagacggtgacctactcggccctcctccggctgccgtcgagcacgcgcaaggcggaggtgcggcgcatagtggacgagacgctggacgagatgggcctccgggagtgcgccgaccgccacatcgggacgtggcacctccgcggcatcagcggcggcgagaagaagcgactgagcatcgcgctggagatcctcacccgcccgcgcctcctcttcctggacgagcccaccagcggcctcgacagcgccgccgccttctccgtcgtccagacgctgcggcagctcgccgtcgacggcggccgcaccgtcgtctcctccgtgcaccagcccagcagcgaggtgttcgcgctcttcgacgacctctgcctcctctccagcggggagtgcgtctacttcggtgacgccaagctagcgacacaggttttgttgttttagctgtgccatgccaactgactgatgatcatcgatattcagcttcgaatgcgtttttttgagtctgatcacgcgtgcgtgcagttcttcgcggaaacggggttcccctgtcccagccggaggaacccgtccgaccatttcctccggtgtgtcaactcggacttcgatgatgtcgccgccaccatgaaaggctccatgaagctgcgagcagaggcagagctcgatcccctgttgaagtactctacctcagagatcagggaacggctagtggacaagtacaggatctcagattacgccatgatggttaggagcacgatacacgagataaccaagattgagggtgtgatggaggatgtgatccgtggcagccaggcgagctggttgaagcagctccgcacgctgacaagccggtccttcaccaacatgtcccgcgatctgaactactactggctgcgcatcatcatctacatcgtgatggccatctgcctgggaaccatctactacgacgtgggcaccagctacacggccatccaggcgcgcgcctcgtgcggcggcttcgtgtcgggcttcatgaccttcatgtccatcggcggcttcccgtccttcatcgaggagatgaaggtgttcaccctcgagcgccagaacggacactacggcgtcgccgcctacatcatctccaacttcctctcctccatgccgttcctgctcgccgtgtcctgggccagcgcgtccatcacgtactggatggtcaagttccggccgggcttcagctacttcgccttcttcgccctcaacctctacggcggcgtctccgtcatcgagagcctcatgatgatcatctccgccctcgtgccaaacttcctcatgggcctcatccttggcgccggtgtcatagggatcatgatgttgacctctgggttcttccgactgcttccggagctcccaaagatcttctggcggtatccagtgtcctacattgtctatgggtcatgggggttgaagggcgggtacaagaacgacttgatcgggctggagttcgagccgatgatgccagggcagccgaagctgaccggcgagtacatcatcaccgagatgatggggctgagcctgaaccactccaagtggctggacctcgccatgatcttcgtcctcctcttcgcctaccgcctcaccttcttcgtcgtgctcaaggtgaaggaggccgctgcgccatacatccgcgtcgcctacacacgattcaccgtcaagcgtctcgagcggcgcgcctccttcaggaagacgctggccatggcgtccatgtccaagcggcacaacccgccgcaccccatggccatccaggaaggactcagctcgcctatgccgtactgagctgagccgaggcgaaggagagagcggagggagacggaagtggtggtcgatatcacagttacttgtggatgtgcttacagatttgtccgttccattgtttagtttgtcagagagcgttgtcaaagataccccacgcgatagtcggtcttcagagcattcgtttcactgtaataactctgaacaccatacacatacaagatagtgctgctgtgcgtacttgtttttttttgtaaacatgaaaccaggcaatgatccttatattaagaaagtcacgcagtcaaaacttacttattattaa

SEQ ID NO: 76614 - DNA, 2691 bp, Zea Mays
acccaaccacggattgaaacagctgcagccgagcctccctccctccctcctctcacactagctcgttcatcacagagacggacagatagaaagaggaggagatgcatgaagcccaatctacgctcccacagtagggatccctcctccattaatagggggggatgcgtgtcgcggctagccaagcgacgacgcgagctgcctcgctcctctggccagccactccaggtccagggcgaggcgccagagctgcatcgcgctggctagctagctaactagcctgggcgcctagcgctagaagaaacagagctgagtggcggggtacaagcgagcgcggtggacaaaaggctagccagagagacgatggacggcggcagcggaggaggggaggcgtggcgcggcgcggtgtcgccggcagcgcggtacgcggagtccggcggcgccagcctcacgtgggagaacctcacggcggtgctgccgggcggcggcggccgggccaccaagaagctggtgcaggggctgtacggctacgccgtgcccggccgcgtcgtcgccatcatggggccttccggctccggcaagtccacactcctcgactccctctccgggaggctggcaaggaacgtggtcctcaccgggaaggtgctgctcaacggcaagaagaggcggctggattacggcatcgtggcatacgtgacccaagagaacgtgctgctgggcacgctgacggtgcgcgagacggtgacctactcggccctcctccggctgccgtcgagcacgcgcaaggcggaggtgcggcgcatagtggacgagacgctggacgagatgggcctccgggagtgcgccgaccgccacatcgggacgtggcacctccgcggcatcagcggcggcgagaagaagcgactgagcatcgcgctggagatcctcacccgcccgcgcctcctcttcctggacgagcccaccagcggcctcgacagcgccgccgccttctccgtcgtccagacgctgcggcagctcgccgtcgacggcggccgcaccgtcgtctcctccgtgcaccagcccagcagcgaggtgttcgcgctcttcgacgacctctgcctcctctccagcggggagtgcgtctacttcggtgacgccaagctagcgacacagttcttcgcggaaacggggttcccctgtcccagccggaggaacccgtccgaccatttcctccggtgtgtcaactcggacttcgatgatgtcgccgccaccatgaaaggctccatgaagctgcgagcaagatcagggaacggctagtggacaagtacaggatctcagattacgccatgatggttaggagcacgatacacgagataaccaagattgagggtgtgatggaggatgtgatccgtggcagccaggcgagctggttgaagcagctccgcacgctgacaagccggtccttcaccaacatgtcccgcgatctgaactactactggctgcgcatcatcatctacatcgtgatggccatctgcctgggaaccatctactacgacgtgggcaccagctacacggccatccaggcgcgcgcctcgtgcggcggcttcgtgtcgggcttcatgaccttcatgtccatcggcggcttcccgtccttcatcgaggagatgaaggtgttcaccctcgagcgccagaacggacactacggcgtcgccgcctacatcatctccaacttcctctcctccatgccgttcctgctcgccgtgtcctgggccagcgcgtccatcacgtactggatggtcaagttccggccgggcttcagctacttcgccttcttcgccctcaacctctacggcggcgtctccgtcatcgagagcctcatgatgatcatctccgccctcgtgccaaacttcctcatgggcctcatccttggcgccggtgtcatagggatcatgatgttgacctctgggttcttccgactgcttccggagctcccaaagatcttctggcggtatccagtgtcctacattgtctatgggtcatgggggttgaagggcgggtacaagaacgacttgatcgggctggagttcgagccgatgatgccagggcagccgaagctgaccggcgagtacatcatcaccgagatgatggggctgagcctgaaccactccaagtggctggacctcgccatgatcttcgtcctcctcttcgcctaccgcctcaccttcttcgtcgtgctcaaggtgaaggaggccgctgcgccatacatccgcgtcgcctacacacgattcaccgtcaagcgtctcgagcggcgcgcctccttcaggaagacgctggccatggcgtccatgtccaagcggcacaacccgccgcaccccatggccatccaggaaggactcagctcgcctatgccgtactgagctgagccgaggcgaaggagagagcggagggagacggaagtggtggtcgatatcacagttacttgtggatgtgcttacagatttgtccgttccattgtttagtttgtcagagagcgttgtcaaagataccccacgcgatagtcggtcttcagagcattcgtttcactgtaataactctgaacaccatacacatacaagatagtgctgctgtgcgtacttgtttttttttgtaaacatgaaaccaggcaatgatccttatattaagaaagtcacgcagtcaaaacttacttattattaa

SEQ ID NO: 76615 - DNA, 1560 bp, Zea Mays
gacacgaggagaacttcatttctattacttttataacaaaaatatattattgttcgtcgaaactaaagttttgcagtcagaagcatgaagcaaactgtcagacgacctcgtagaccgaccccctgattcagagagccagcacacaggaaagcccaccaacagaacaattaaccagaggtccagagctactacccaaaagccctgttttcataatgatataaatccatatttgtcccagcgaaggcacacagccgccgccatttcttcatcctcccatctcctgatctccatctccatcttcttcgcagcgccggcgatccatcttccgctgcctcccttcctcgcgctcgggctctcagtgacggcatcagcggtttcccctcccgcctctcgccagtcgcatcacgcccccgcctccggtccaccgcacaccggccggtgaccctacatggccgtttcttttgcaaatgtcaacgccgaggcagggctgaaaaagcttgatgagtaccttctcactcgcagctacatcactggctaccaagcttccaaggatgacctggctgtctactcttcatttttggctgatccctcatccaagtatatcaatgtagcaaggtggtttaatcacattgatgcactcctgaggctgagtggagttaccgcagagggcctaggtgttaaggttgagccatcagcggttccttcagcttcaattcttgatgttgctgatggacaggccccagctgctgacgaggatgacgatgatgatgttgacctttttggcgaggagactgaagaggagaagaaggctgctgaagaacgtgctgcggctgccaaggcttctggcaagaagaaagaatctgggaaatcgtcagttttacttgatgtgaagccatgggacgatgagactgacatggccaagctcgaggaagctgttaggagtgtccagatggaaggactgctttggggcgcatccaagcttgtcccagttggatatggcatcaagaagctgcaaatcatgatgaccattgtcgatgaccttgtctctgttgacactctcatcgaggaccatctctgcgctgagccagtgagcgaatacgtccagagctgcgacattgtcgccttcaacaagatctaaatttccttgtgatggtggcaatggtggttggtgggcactgtaccagcctaatttataattttccatgagcatcttcaagagtttttctaaattatcatttggagtcatttacataaaaagcactttctatatctttttaatctcaacaacttttctatatcttgtttgcaccctggagagctatttacgttttctatctttagctagcgagaaacctggatggctggaatagaagataactatatttagacaatactttaaataagctgttggaagatagtaattcttgtgtgatcggatgcataatgccttggtctggctggttggaggtgtatcactctggagcatgttcggttctgtttatttcagctttttttagcttatgcctatcaaaatctgccacagaatgtcaaacgttgagc

SEQ ID NO: 76616 - DNA, 1545 bp, Zea Mays
gacacgaggagaacttcatttctattacttttataacaaaaatatattattgttcgtcgaaactaaagttttgcagtcagaagcatgaagcaaactgtcagacgacctcgtagaccgaccccctgattcagagagccagcacacaggaaagcccaccaacagaacaattaaccagaggtccagagctactacccaaaagccctgttttcataatgatataaatccatatttgtcccagcgaaggcacacagccgccgccatttcttcatcctcccatctcctgatctccatctccatcttcttcgcagcgccggcgatccatcttccgctgcctcccttcctcgcgctcgggctctcagtgacggcatcagcggtttcccctcccgcctctcgccagtcgcatcacgcccccgcctccggtccaccgcacaccggccggtgaccctacatggccgtttcttttgcaaatgtcaacgccgaggcagggctgaaaaagcttgatgagtaccttctcactcgcagctacatcactggctaccaagcttccaaggatgacctggctgtctactcttcatttttggctgatccctcatccaagtatatcaatgtagcaaggtggtttaatcacattgatgcactcctgaggctgagtggagttaccgcagagggcctaggtgttaaggttgagccatcagcggttccttcagcttcaattcttgatgccccagctgctgacgaggatgacgatgatgatgttgacctttttggcgaggagactgaagaggagaagaaggctgctgaagaacgtgctgcggctgccaaggcttctggcaagaagaaagaatctgggaaatcgtcagttttacttgatgtgaagccatgggacgatgagactgacatggccaagctcgaggaagctgttaggagtgtccagatggaaggactgctttggggcgcatccaagcttgtcccagttggatatggcatcaagaagctgcaaatcatgatgaccattgtcgatgaccttgtctctgttgacactctcatcgaggaccatctctgcgctgagccagtgagcgaatacgtccagagctgcgacattgtcgccttcaacaagatctaaatttccttgtgatggtggcaatggtggttggtgggcactgtaccagcctaatttataattttccatgagcatcttcaagagtttttctaaattatcatttggagtcatttacataaaaagcactttctatatctttttaatctcaacaacttttctatatcttgtttgcaccctggagagctatttacgttttctatctttagctagcgagaaacctggatggctggaatagaagataactatatttagacaatactttaaataagctgttggaagatagtaattcttgtgtgatcggatgcataatgccttggtctggctggttggaggtgtatcactctggagcatgttcggttctgtttatttcagctttttttagcttatgcctatcaaaatctgccacagaatgtcaaacgttgagc

SEQ ID NO: 76617 - DNA, 1573 bp, Zea Mays
gacacgaggagaacttcatttctattacttttataacaaaaatatattattgttcgtcgaaactaaagttttgcagtcagaagcatgaagcaaactgtcagacgacctcgtagaccgaccccctgattcagagagccagcacacaggaaagcccaccaacagaacaattaaccagaggtccagagctactacccaaaagccctgttttcataatgatataaatccatatttgtcccagcgaaggcacacagccgccgccatttcttcatcctcccatctcctgatctccatctccatcttcttcgcagcgccggcgatccatcttccgctgcctcccttcctcgcgctcgggctctcagtgacggcatcagcggtttcccctcccgcctctcgccagtcgcatcacgcccccgcctccggtccaccgcacaccggccggtgaccctacattacttgctaatctttcttgagggcagatggccgtttcttttgcaaatgtcaacgccgaggcagggctgaaaaagcttgatgagtaccttctcactcgcagctacatcactggctaccaagcttccaaggatgacctggctgtctactcttcatttttggctgatccctcatccaagtatatcaatgtagcaaggtggtttaatcacattgatgcactcctgaggctgagtggagttaccgcagagggcctaggtgttaaggttgagccatcagcggttccttcagcttcaattcttgatgccccagctgctgacgaggatgacgatgatgatgttgacctttttggcgaggagactgaagaggagaagaaggctgctgaagaacgtgctgcggctgccaaggcttctggcaagaagaaagaatctgggaaatcgtcagttttacttgatgtgaagccatgggacgatgagactgacatggccaagctcgaggaagctgttaggagtgtccagatggaaggactgctttggggcgcatccaagcttgtcccagttggatatggcatcaagaagctgcaaatcatgatgaccattgtcgatgaccttgtctctgttgacactctcatcgaggaccatctctgcgctgagccagtgagcgaatacgtccagagctgcgacattgtcgccttcaacaagatctaaatttccttgtgatggtggcaatggtggttggtgggcactgtaccagcctaatttataattttccatgagcatcttcaagagtttttctaaattatcatttggagtcatttacataaaaagcactttctatatctttttaatctcaacaacttttctatatcttgtttgcaccctggagagctatttacgttttctatctttagctagcgagaaacctggatggctggaatagaagataactatatttagacaatactttaaataagctgttggaagatagtaattcttgtgtgatcggatgcataatgccttggtctggctggttggaggtgtatcactctggagcatgttcggttctgtttatttcagctttttttagcttatgcctatcaaaatctgccacagaatgtcaaacgttgagc

SEQ ID NO: 76618 - DNA, 1315 bp, Zea Mays
gacacgaggagaacttcatttctattacttttataacaaaaatatattattgttcgtcgaaactaaagttttgcagtcagaagcatgaagcaaactgtcagacgacctcgtagaccgaccccctgattcagagagccagcacacaggaaagcccaccaacagaacaattaaccagaggtccagagctactacccaaaagccctatggccgtttcttttgcaaatgtcaacgccgaggcagggctgaaaaagcttgatgagtaccttctcactcgcagctacatcactggctaccaagcttccaaggatgacctggctgtctactcttcatttttggctgatccctcatccaagtatatcaatgtagcaaggtggtttaatcacattgatgcactcctgaggctgagtggagttaccgcagagggcctaggtgttaaggttgagccatcagcggttccttcagcttcaattcttgatgttgctgatggacaggccccagctgctgacgaggatgacgatgatgatgttgacctttttggcgaggagactgaagaggagaagaaggctgctgaagaacgtgctgcggctgccaaggcttctggcaagaagaaagaatctgggaaatcgtcagttttacttgatgtgaagccatgggacgatgagactgacatggccaagctcgaggaagctgttaggagtgtccagatggaaggactgctttggggcgcatccaagcttgtcccagttggatatggcatcaagaagctgcaaatcatgatgaccattgtcgatgaccttgtctctgttgacactctcatcgaggaccatctctgcgctgagccagtgagcgaatacgtccagagctgcgacattgtcgccttcaacaagatctaaatttccttgtgatggtggcaatggtggttggtgggcactgtaccagcctaatttataattttccatgagcatcttcaagagtttttctaaattatcatttggagtcatttacataaaaagcactttctatatctttttaatctcaacaacttttctatatcttgtttgcaccctggagagctatttacgttttctatctttagctagcgagaaacctggatggctggaatagaagataactatatttagacaatactttaaataagctgttggaagatagtaattcttgtgtgatcggatgcataatgccttggtctggctggttggaggtgtatcactctggagcatgttcggttctgtttatttcagctttttttagcttatgcctatcaaaatctgccacagaatgtcaaacgttgagc

SEQ ID NO: 76619 - DNA, 872 bp, Zea Mays
gacggcaaaggcaaaggcaacggagccagccaggtccagcctcaattccagactggccgatcctgccgcaaactgcaaacagccccccgcaacggctgtgcatgtgcgtggacccaccgccggcgcaacacgccatagcagtcccagcgagggggggtggagtgaatgcacatgcggtacaagcagagctgatcgggattcctcgtctctggtctgtctgtgctccaccacctgctgctggtgccatggccatgggtagtctcgccttcgccacggcgctcgtcttcgtcttcgtcttcgccatcgccgtgccggccgtcgccgccgccgcgcaggcccccgccccggcgcccaccagcgacgggacgtcgattgaccagggcatcgcgtacctgctgatgatcatggcgctggtgctcacctacctcatccaccctctggacgcctccgccccgtacaagctcttctgagcgagcagattttctcctccattttttggtaggcttttgtagtggatcactagagtaactgggggtggtggtgtgggtgtgtgggtgagattcggtacctattcattgccatgaattacattcggtttcgcgtgtgtatattattactcctatatgtcttctggttcatgcttcgatgtccattggttgtcgctttgtgttgcatcggggagacctcgaggagtagttcttgttcagtagtgcctagcgcgcatctgagatctgacctgacctgaccttccacacgcgaagccttgtggtgtggtgtttgttgttggggctttcgcaggatctgaattagtcaaaccgttaaggccctatttcccgatagcaatcgagatcatcggttcatgttagaatgcg

SEQ ID NO: 76620 - DNA, 1085 bp, Zea Mays
gattttttgcgagacccgtcggctcggcctcggcgtgcaagaaaccagaccaacaacaaaaaccgactagcccaggcaagcagaaacccactgtctccgcttccgctcccgactcctttgtctcgtcctcatccatccaaccaggcgagccaacaagcaagcaaaagtaaacggggcgaggagctggagagacgccggcgacgcgggcggagcacgtcgtcgccaacgccggaggggaggcagagtacgtgcgccgcatgcaccgccacgcgccgaccgagcaccagtgcacctccaccctcgtcaagcacatcaaggcgcccgtccacctcaactactcatccatcataactgtccaccccgagagcattgacgggaggccgggcaccctggtgatcgagtcgttcgtggtcgatgtgcctgatggcaacacgaaggacgagacatgctacttcgtggaggccgtgatcaagtgcaacctcaattctctcgcagaggtatcggagcagctagcagtggagtcacctacgtcgctgatcgatcagtgaagtcacctgcgtcgcccatcgatcagtgaccaccggtacaaaaaaagacgtcaatcagcaacaaataagaagaagcttcgaaggctggctggagagttcaacctttttgagaccggtggtttggccatcgtcttctgcgtgtaatgtctcttggaatatggaagtattagtcgttgtgtaggattaaacatctgtagtagcttgtatgctagggatggttgtttagccttagaaactgcacctagatacctcatggcatgtatgcatactgctagtatgtgtagagatcagggaaagcatggagcgggttttgcctcttaggtgcatggagatctgtctttttttccccctccattttgcggtggcgactctattggttggggttcttggataaatatactttcccgcgaacgcatagggccggattttggaattggttcaattctcgtaattattgtattctctagtgttattgggatttggggtttggaattgccggactgcgataagtgatgaaaatgtagacattaaagctct

SEQ ID NO: 76621 - DNA, 1410 bp, Zea Mays
attaaagtttccatagcaaagctggagaccatagtaaagagagtaagttttgtaaagtgaggtggacttggttccacataaatttgggaataaaactggcaaaaaggtggactgtcaggtgttaggattcagacttagaataatatttaagtctgaatttgtgtgtttttattcaatttgggcccttgtggtaattaatccaagaagaattggggtaggaatgctatagcaaagtgaaagaccatgttataaggaacaaatccctttaaacaagttaggcttgaatccacataaagtagaaaataacagctgtccaaaactggactgtcagagtgactgtgactgaattttattcagttagctgaaatagcagttcagtgtgggttagtgctttggaaaggagataagtttatctagggaagagatgaagttgcttaaaaagttttaagcttttggaggagatataagttggattaattctctggtttacctaagtgaattcaaattggtcacttttattaagtacaaggttgtgtagaagtatgtgtatacttgtcatgtacttatttaggagtatttatatttccccacctctccttgtgagagtttgcatttcatatcataacataagcatacatgtatttgtaattcacttgtagaacacctagaagaagtggtgtttgaaggagtctactccagtgcctgctcatcaagtggatggagctatctaactaaagattgggtagaaggatctagagcctcttctctgcaacaaagctttaaatattatggcaagatacaatagagtgggaacagcctatggaatcaaaagggtcaagctgggtgcatgttgagaacaccattcacgagttttgagctggtgataccagccatccacaagcagaggagatctatatcaacttggagacactcataagacaaagcataaatcatgggccatctaccagacaccattatagcgctccatgacatttcggatgagctcaaggagctgtgtctgcatcagcacagcgagaagattgctgctgcattcggtttgatcagttgtacatcagcaacaaacgtgtatgcactgattataattcagcatccaagtatgtctctaaggccactggtagggagataattttgagagaggattagcaacaatctccacagggcgatgggggaatgctcatgcggagaatactagtaattaagaagcaaggtggctgtggctcacgtagtcatgcttagctcaagacatgttcatagtttctgtagcaccttcacaaaatcgtagtttatacaaagcattagctgttgtgatagtttatactgcggttacagaatttgtggtgatatgcaccctcctatcacaataaatataaactgtttcgagtgtttgac

SEQ ID NO: 76622 - DNA, 1377 bp, Zea Mays
cctgttgttgcttggagctgggaaaaataaaaaggtgaagctgtgaactcagtcaaacagcagcagttcagtgtactccaaaaatatctgaaggagatctttttatccctgctggctgcactagcgtgtagaaatgaagataaggttgtagtgaatagttgaaggtcctagaggtctcactcccactaaaatatccaatttggactgcttgggggggcagtgggcagtagaaatcttatctattttgtctactacatacagatttggacaaagtgatatttatgtgtgggagctgagccaacgaggtgtagtgcttgtatgccacgtttttgaacctttggtgtgctggcactctaggaatcctccttcatcaagcgtggatgagctccactgcacctgcccctatattcagtaccttgggctgccgtattgagtgaagatttcttccttgccctcaaattctagccaaagttcactgcttgagtgtgcagtccttatgtactgctggtataaccccctccctagcccaggtttgcccccttctccccatggactggatgcgctcagtgacccctccccctgcctacttattcagtgtgttccacggctgagttcagaaaagcttttctcccttgttctcgagctgtagtcccagtccactacaaaggtgttggagtcctggtattcttgctgtttcccacaagtattcttggccgtgtactacttgttccatgctcggcaaagctttaaatattatggcaagatacaatagagtgggaacagcctatggaatcaaaagggtcaagctgggtgcatgttgagaacaccattcacgagttttgagctggtgataccagccatccacaagcagaggagatctatatcaacttggagacactcataagacaaagcataaatcatgggccatctaccagacaccattatagcgctccatgacatttcggatgagctcaaggagctgtgtctgcatcagcacagcgagaagattgctgctgcattcggtttgatcagttgtacatcagcaacaaacgtgtatgcactgattataattcagcatccaagtatgtctctaaggccactggtagggagataattttgagagaggattagcaacaatctccacagggcgatgggggaatgctcatgcggagaatactagtaattaagaagcaaggtggctgtggctcacgtagtcatgcttagctcaagacatgttcatagtttctgtagcaccttcacaaaatcgtagtttatacaaagcattagctgttgtgatagtttatactgcggttacagaatttgtggtgatatgcaccctcctatcacaataaatataaactgtttcgagtgtttgac

SEQ ID NO: 76623 - DNA, 2985 bp, Zea Mays
tagaagaagtggtgtttgaaggagtctactccagtgcctgctcatcaagtggatggagctatctaactaaagattgggtagaaggatctagagcctcttctctgcaacaaaggtgatgaggagtactctagatgttcctgaggctggagagcgtttctagttctggaggaggactagctaggtttatgtataagctttggagggtttctaccttcctgcttttgtaataagttatgcactttgagtatatcagtacttgtaataaatattattctttcgaaacatgtaaaacttgagttttgaaaaggtaaagaatgtttgtaaagtcttccgctctttatctccgaagtgtgtgtatcgaatgtgattactgtaatatgcatgtatggtgggagatccttgggatggtgagttcaagttgttgaactcgtgatagccttgttaagttacctggtacacgtgcatagccatctgaggccatcaaggcaaggattggtgcaagtgggcccgataacttgggagggctgccacacaaacccttagggactatggctacaagttgagaaaagtccctctcctatgtgataacgagagtgcaatccgcatcgcggataatcccgttgaacatagtcgcactaagcatatagacatccggtatcactttttgagagatcaccaacaaaagggagatatcgaaattgcttatgttagcacccacaaccaattagccgatatctttaccaagcccctagatgaaaagacttttagcaagcttaggaatgagctaaacatctgggattctcggaactttgattgaaacattgcacacattggtcatttatatacctttgatcatgtctctttcatttggtacaaatgcaaatttcttattcttcttgtgccaaggctaagactaatgtgcttccatgagtatctcaatgattagtcttagattgaaagggaaatggagtattcggcaaaggcaaggcttccactacaactctatctatgtcatttatcctttgtcctactcatcaactttcactcatatctttttacaaagggggagaaaagattaggcctctcaagtttcttcgttttagcgcttcatgccaaagggggagaaattaataggcccaaagcaaaaggactgcaccatcaacctgttttctaaaaactttttcaaaaagggagagaaattattcaaattacaaaaaccctcttgacagctaatgggagaacttcttcagggggagcttttatttagccaaaagaaaatcatttaaaacagggggagaatttttaaaatcttgaaaatgctttctgaaatcatattcttataccattggctatttgcaaaagaatttgaaaagacttttccaaaagatttgaaaaaaccagctaagtggtgcaaatgtggtccaaaatgttaaactagaagaaagcaatcatttatactcaaaagtactttcaatcggtttaaattcaaagtaacttatgcacatctgtcaaaattgcaaactagttacattcttacactttatatttgctttggtttgtattggcatcaatcaccaaaaagggggagattgaaagggaaatgggcttaatcatttcctataatcgattttggtgtttgacgtccaacacaaaccacgtggactaactagttttcctagttgatcatttctcaggtgcataagttcatccacaactattctaagtcgactgtccggaataccgtagattattccggacaggagaagctttttggaaaaacatctatgtgcggaccgtccgggcacttgtggcggaccgtccgcggcaccagggtgagcctcggacagggacactgcaaaaacacaagttaacactacggaccgtccaaaggagaagcgagcaacgtccgagaccacgcgcggaccatccggcctcaggcacggactgtccggtcgttgaaaaacaagaaaaacccgaaggtgacgggttcggtaaaatgcatttttagcgtcctcgcggactgtccgtggtgcacggccggaccgttcgcgactactttatctgacatctgacgacgcattaaatgcactatagccgttgatatagccgttactgctgaccgttgcgatttcagccgttgatgtgcaggggcggaccgtccgcggtgggcagaaaaggagcaatgactaggaagtggttggaggctataaatacaaccccaatcacctccgttcacgagatccaagcactccactcagtgcaggggcggaccgtccgcagtgggcagaaaaggagcaacgactaggaagtggttggaggctataaatacaacctcaatcacctccgttcacgagatccaagcactccactcatacacattcaatacaagagctagcaatccattccaagacacattcaaagcttccaatctctccaagttccacaattgagacaagtgatcattagtgattagtgacttgagagagtgtgattcgtgtttcatttgttgcccttgttgcttggttttcttaatcgtgctttcttcatctctctctaaactctccaagtgttttgtaaagtttacaagagacacctaattgtgtggtgatacttgcaggatattagtgacccgtgagattgagaaaaagcactcgaccggtctaagtgaccgattgagagagggaaatggttgaaatagattcggcctatgtggcctcctcaatggggagtgagttctttggaaccgaacctcgggaaacaaatcgacgtgtccacttgtattaatcttcaccattccatttgtttctcccctctcctctctcttctaaaagttctcgtgctcacatcgttttgagtttgctcccaaagttatccgcattgattgagcaactcattgcaagagaaactatcttccgcactccaaattatttctaacactaatctcgggtatagtgtgtgttcaaagtttataatttttaggtttcg

SEQ ID NO: 76624 - DNA, 1854 bp, Zea Mays
ggcagtccacatggccgcaccgcctagacacgggtcgcgcgcaataacccaccgatcgagctgagcacgcacgacctggcgctcgctttaaactctcgctctcaatcgtcgtcgcctcgggctctcggcagacagctgcggcggcgtgcctggcagtgaagcggtagcaggtagagccagccagtctagcttagccaccacactagtgtgatggcgaccaccggcggcggcaaggcggcactggtgctggggcggcttctgcttctgctgtgcgtgctcggccatggagctgcgcagcggtacaacgccatctggagcttcggcgactccatctccgacaccggcaacctctgcgtggggggcgggtgcccttcctggctcaccacggggcagccgccctacggggagaccttcttcggccgccccaccggacgctgctccgacggccgcgtcatcgtcgacttcctggccgagcactttgggctgcccctgctgccggcttcgaaagccggcggcgacttgaagaagggggcgaacatggcgatcatcggcgccaccaccatggactttgacttcttcaagtccatcggcctcagcgacaagatctggaacaacgggccgctggacacccaaatccagtggttcaggcagctgctcccctccgtgtgcgggaaggcagattgcaagaactacctgtccaagtccctgttcgtggtgggcgagttcggcggcaacgactacaacgcggcgctcttctcggggcggtccatggcggaggtgagagggtacgtgcccatggtggtgagcaagctcgtccgcggcctggaggcgatcgtgaggagcggagccgtggacgtggtggtgcccggggtgctccccatcggctgcttccccatctacctcaccctctacggcacctccaacgccgccgactacgaccgcgacggctgcctccgcgcctacaacggcctctcctcctaccacaacgcgctgctgcggcggagcctgtccggcctgcgcaggacgtacccgcacgcccggatcatgtacgccgacttctacacccaggtcacccacatgatccgggcccctcacaacttcgggctcaagtacggcctcaaggtctgctgcggcgccggcgggcagggccagtacggctacaacaacaaggcgcggtgcggcatggccggggccagcgcctgcgccgacccgggcaactacctcatctgggacggcatccacctcaccgaggcggcctaccgctccattgccgacggctggctcaagggcccctactgcagccctcccatccagcactgatcgagctagctgggccgggggactgaatagctaattaagctagcagcatattattcatgagtgacatcatcgtgctttgtttgtttacggctaattgccatgtgcatcatcctagcgctctagcaggttcatcaatgatgggtttgctatttggtttgtcaattagttgttcaattggtgaggaaggggtagctggtgtttcggcggtgtggtgggaacagtgatgaataaacgtgtaatggactgtttacaattagctacgacgtacgtgaacaataagctcatatcacagcaaacaacaatatatgacgggaaggagcacaccaaacaacaagatatgaaaagttagggcaataaaatgatagtagataagtaatttttttggtgattatattgaaagttagatttctcaatcggccgtgatcttcccatttacatagagagggttatcttaccctagttggaaacaagttcaaaatacagtcttcaattttttcacgtcgaaaatagatccaaaaatcaatttgaaacaaa

SEQ ID NO: 76625 - DNA, 378 bp, Zea Mays
aagcacaccaatgcaagcctccaaagagatggagtaagactacatgtgaagctaaactgtccatcaaagctccaaaagctctaaagagagcccacacaaagcgaaagggtatgttccaagcttaactggcagtacagagagccttggccatgcatcctctagactagacgacgatggtatgcaagaacatgcatgcaagaggtagcataggtctgtgaaccacaccactacgtatacgccttgcacttgcacgcaagagccgccagtagttgaacaaggttgatatatacaagatggtgtgagctcgcaaactgacgtttcactgcaagatgatgcgacgatttttgaggtcacccaatcggcttgcttagctgtttc

SEQ ID NO: 76626 - DNA, 482 bp, Zea Mays
gagaagggaggattgagagagaggacgggtgggagaagctcagaagcaggtggcggcggctagaggaaggaggcgcgcgcggctaggttagggtcgttaggcggcggctgcttgttgggccttgggccgttagttaggttaggttttagtttttttctttttcttttttttctatttcctttttctaaatttgaaatctatttttaaataaccctaaaattcataatgatgaaatcaaaattatttataaataaaatagttatttttggactagtacttattatattatttatttgggtttttacttaacaagaaatgctattcgatatccaaaatcaattaagagaaatcaaaaatcattgagtagttaaaacagtcacatgtcaatcaatagcgaccaaccgtcggatgtccacctgtctctatagcgaccaaccttgagtagttaaatttctagacttttagcgaccggtggcccgtcg

SEQ ID NO: 76627 - DNA, 1112 bp, Zea Mays
gagacaaataaagagtcgagtcaaaaataaagtctgtgagtgatgttctaagtgcggccaatgactacaaatgttatttatagagtttaatatttacattttctagtttcttctgtgtgtcacccttgaccacctgcgccgtgtctcttctgtgtgccactgctgccctcacccctggatgagaaatgaaggcaccagatttaaagtgctcatatgagcacaagagctccatgagcacataatacgttccctttgctaaaagcaaccacaagcgaaaaaaaaacaaatttccctgctctttccgtcgcctccgccgtcgccgtaagactgtcgatggccgcagccaccgccaccgtcaccttctcgccatctcccccatccttcctcaactcccatatccctcgtggccaccgacctgcctccaccacgacgatagcttttgcacgccgttttcgcggtgtaaaacctagtcccgatcgctcccgaggcaaggtcgaccaggtcgcccaccccgacgatggattcggcgcactcgaagcggagctctggcgcctgcgccgcctcgtggagctaaagatccaccgcctcggcaccgaggccgacgccgcctaccgcgacctacgctcggcggtgcgcgaggtcagcggagaccgcgtcgtcctaaccttccgccgctcgtcgctgcgctacctcaccggagcactcctcttcttgctcgcctgcgccatcgcggcgcgattgctgctggggatggtcttacgggcgtggcagcggcggggtttgaggaggggattgtggggtgaaggcggcagggcggttgtgcgaaggagggaccgcagcttgggagggaaggaggtggtggttgctgtgtcgtcgccgcctaaggaggcagctcggaccagtcgtgtcgcagagccagcaaaggaggtctggagggggtactcacaagctaagttgccagactggtggcccaatgttggagcgacggtgatggaacctgggccagagatggagaagtgggcaagaatggcaaacagattggtccgagcaataattgatagtagagtcatggggagggattacagatatgatgatgcaattcaacttcggcg

SEQ ID NO: 76628 - DNA, 1918 bp, Zea Mays
gagacaaataaagagtcgagtcaaaaataaagtctgtgagtgatgttctaagtgcggccaatgactacaaatgttatttatagagtttaatatttacattttctagtttcttctgtgtgtcacccttgaccacctgcgccgtgtctcttctgtgtgccactgctgccctcacccctggatgagaaatgaaggcaccagatttaaagtgctcatatgagcacaagagctccatgagcacataatacgttccctttgctaaaagcaaccacaagcgaaaaaaaaacaaatttccctgctctttccgtcgcctccgccgtcgccgtaagactgtcgatggccgcagccaccgccaccgtcaccttctcgccatctcccccatccttcctcaactcccatatccctcgtggccaccgacctgcctccaccacgacgatagcttttgcacgccgttttcgcggtgtaaaacctagtcccgatcgctcccgaggcaaggtcgaccaggtcgcccaccccgacgatggattcggcgcactcgaagcggagctctggcgcctgcgccgcctcgtggagctaaagatccaccgcctcggcaccgaggccgacgccgcctaccgcgacctacgctcggcggtgcgcgaggtcagcggagaccgcgtcgtcctaaccttccgccgctcgtcgctgcgctacctcaccggagcactcctcttcttgctcgcctgcgccatcgcggcgcgattgctgctggggatggtcttacgggcgtggcagcggcggggtttgaggaggggattgtggggtgaaggcggcagggcggttgtgcgaaggagggaccgcagcttgggagggaaggaggtggtggttgctgtgtcgtcgccgcctaaggaggcagctcggaccagtcgtgtcgcagagccagcaaaggaggtctggagggggtactcacaagctaagttgccagactggtggcccaatgttggagcgacggtgatggaacctgggccagagatggagaagtgggcaagaatggcaaacagattggtccgagtgcgggatgttactattgttctccatatatgttaatatactcaatcggcgaaccaaaattatagcaataattgatagtagagtcatggggagggattacagatatgatgatgcaattcaagttgcatgtaagttcacgggcaacgtactgatcaagtggttcctaaaaagcttcgggctacatgacaacaccgtgctgatgaagtggttcctaatgcgagggctacatgacaacaacgtgctgatgaagtggttcctaatgcgagagcgtattggtgaagtggttcctaatgcaagagtcgaagttactcaaggactggtattgacatcaatggaaggaatgaagtggtgactggagggctaggggtgcctcatcaaatattgctacggcagaagctggtaatacgttgctcacccttgtcattgggcaacataacaatcagccacaactattcagaaatagtgatgaaccataatgaaatgggaataaagaacattatgatgccattacaaatgcatgtgcctcttacttttgacttccttataggtgatgcagctgtagcctcatgcttcttgacaccacttgcaataactgatcaagaaaaaacaaggatcatgatttgcaaccctgtagtagtagatgaggcacctcttatatcactcaataaggtagcaattcttacataattgggtatggtcacaagaatgaaaagaatgggcacaagggcaacggaagaagcaagctttaaaactgctttatcccgtcaaaacaaaatcatgctaaacaattggttagtacaacatcctgtatttacgctggtcagtgccattgcttcgcaatctcctcatcaaggatttggcaagcctgctg

SEQ ID NO: 76629 - DNA, 2038 bp, Zea Mays
gttgtcgccgcatcccagtatcccacggccggccggccacccacacccacctctcaactacgccaagccaagcttagcgaaactcaggcgatcggaccacgccccaccgaacaagtgcagcgcccgaccctccccacggaacgaagcttcggcgttctcgtcgccccgtcgcaagatcacaagtccataacaagaaagacaacaaaactatgctgaaagatgtgcttgcatagaagatacttctgctgcaacaccaccaagggcctagtggctcttgcgcaagatctgcaggcctgctcgtctcttgacttgagcggcggtcaccttgtccgcatctactccacgcccttcagactccgacgccagcaacctataaggcgcagtccacctgattgacaacagaaagctagccttgtgcgtgatcacacagttttcatggatataaaagatatgaagaccagagggaagactttgacggagcggtatgagctggggaagctgctggggaaaggcgcgttcgggaaggtacactatggaagggaccttgagtccaaccaggatgttgctatcaagatcatggataaggacagggtgctcaaggccgggctctcagagcaggtaaaatgtgagatcacgacgatgcggctggtgacacacaaaaacatcgttcgtctccatgaggtcatggcgacgcgaaataagatctacatcatcatggagtatgcgaaagggggtgagctctttgaaaagattaagaggagcgacaggctcacggaggctgacacacacaaatacttccaacagctcatcgatgcactagatcactgccatagccgaggcgtgtaccatcgggacttgaagcctgagaacctgctgctggatgagaatggggacctcaaggtgtctgactttggactgagcgcgttttcagagtcgaggaggacagatgggttgctccatactgtctgtgggaccccggtgtatatagctccagaggtgatcaagaagacaggctacgatggtgcaaaatcagacatctggtcttgtggtgttgtcctctttgttctcgctgctggctacctccctttccagggcccaaacttgatggagatttatcggaagatacatgatagagattttaggtgccccagttggttttcacacaaactcaagaggttgctatacaagatcctgaaccccaaccccagcatgagaccttcaattcaggagataaaagagtctacctggttccgaaaaggtcctagggagatcagtgcagtgaacgagaaagttcttagcgagaatgccaccaccacaaatgctgccccagtgcttccttctaggcgcaaggagattgctcacgaagatatgaagtccttggttgccacaaacctcaatgcctttgaaatcatcgcgttatcagcaggattggacctgtctggtctgtttatcaaggagtgcaggaaggagacaaggttcacttcagataagcctgcattgtccatcatcgcaaagcttgaagacgtcgcaaaagcactgaatctcaggataaggaagaaggacaacaacactatcagcattcaagggaggaaggaggggggcaatggtgtccttaagtttgacacgcagatctttgagatcacaccatcctgccatctcgttcagattaaacaaaccagtggcaatctacttgagtacgagaaactgttggaagagggcatccgaccagggttaaaggacgttgtctcggcatggcatggagatgatctgcaacagaagcagaagtagcttcggatgtctcctgtagattctattctagtacatttcattccttatttttttagcagctacattccttttttgtattggtggtgatatgaaccattaggttgtgttttgttcagcaataattgttaaggagctgagttattgtgttacaacctaatgattgttacaattttataatgaaaaaatgttgtcgatccttaaaaagggtcgagctttccaggagatccattagtagtttgatgtgtaccag

SEQ ID NO: 76630 - DNA, 278 bp, Zea Mays
gaaggcaacaatccaatatcaacaaactcgccccaccatacaagagtcttaaattcacaatagcgtgtgaccagtttcaatgcgaattttccatacaatacaggagcatcctgtgcaatagttttgtaggttgtatcggaattagaaccatggaaagagctccacttttctctgtaggaagctgcattctcaagagacagaatcagctgacctttccaatcagtgcatcagatctgcagacatcgccacgacaaagtggacaaaccctagaaaacaag

SEQ ID NO: 76631 - DNA, 2086 bp, Zea Mays
gctgcgttgacgtccagctcctgctcgttggtcgctggtgggcaccagcacaaaactgggtctcctcggttcttctcctcgcatccagcagaccgcagacgacgactacctcagccgccttccaatggcgcccctctcctgccgcgaccttcccgcccggctaccgactcttccccaccatgctagcactcacccacacctctccttcctatcgggcggcccagcccctcgccgatggcgatcactcaccacctcaaacactctgcggcttcgcttggcggccactaaggacgacgcggtcgcctccctcgtcggaaggctcgagcacgacgtggcgaacgcccagtaccgcgacgacgttctggaagaagaagacgaagagcagcgggaggaggaagaagaggagcagcagttccttgacgacgacaacgctcggcgccgcggcgcggggaagcatcgggacgagctgcgcagtcggtggcgcgagatccacgggtgcgacgactgggcggggctcctggaccccatggacccgctgctgcggtcggagctgatccggtacggcgagctggcgcaggcctgctacgacgccttcgactacgacccgtcgtcccgctactgcggcagctgcaagtactcgcggcgcgacttgttcgagcggctgggcatggcggacgcggcgcgcggctacgtggtgtcccggtacctgttcgcgacgtccaacatccggttccccaacttgttcccgcagtcccgggcgggcgccaggatctggagccagagcgcgagctggatcgggtacgtggccgtgtccacggacgaggagagcgcgcggctggggcggcgcgacatcgccatcgcgtggcgcggcacggtgacgcggctggaatgggtgtcggacctcatggacttcctccggcccgtggcggaggagggcatcccgtgcccggaccgggaggtgaaggtgctggccgggttcgtggacctgtacacggaccgggaccccagctgccggttctgcaagtactcggcgcgcgagcaggtcctgacggaggtccgccggctggtgggccgctacacggcggcgggggaggacgtgagcgtgacggtgaccgggcacagcctcggcagcgcgctggccatgctgagcgcctacgacgtgacgcggatgccggggatcctgctgaacgagggggcgcccgaggtggtgcggcgcgtggcggaaggcctgctgcgtgtgccctggtgctacgcccacgtcggcgtggagctgccgctcgaccacaagcgctcgccgttcctcaaggacacgctggaccccgcgtgctaccacgacctggaggcgcacctccacctcatcgacgggtaccacggacgcggtgagcggttcgtgctggcgagcgggcgcgacccggcgctggtgaacaaggcgtgcgacttcctcaaggaccaccacggcgtgcccccgtgctggcgccaggacgagaacaagggcatggtccgcgcccgcgacggccgatgggtccagcccgaccgccacggctggcacctggacgaccacgaccacgaccacggtgaccaccgtcaccaccaccaccaccaccaccacgacggtcaccaccaccgtcatcacaagaagcacagcaccgagggcgcccggcaccaccaccgtcacggtcacggccaggacatgcagtctcatgcataggccaaagcatgaactatatatagctctgaccgttcccgtcccgcgggacaccagttgtccgcgtgttgatgccgtgccgcacggagatgcaaacctagccgtggagaggagctgaaatattgggatcttatctctcgatcgatggtcatgtgcgatgtgagcgtgtattattattattatattggtgttatcctgattgtacagtgaatcaacacatggctttactggctacggagctcattgcaatttggtaggctcgtgtatcgaaaccatcgctttctctagtttccaagtacaatgcaaatacaaacccgctggatccaatggacgggtttgtctattgtcatttaactatatatagatcggtttgtatgtcag

SEQ ID NO: 76632 - DNA, 1956 bp, Zea Mays
ccgtatggctttgacttttgaccagttggaactacacggattagctgcagacagaggggaggaagtttagcacacgtcatcaaaacaccctgtttctccttgtcttccatgtgagcccggtgctctgcattctccttcgtcatttcctccaccgctcacctcttctgctccccaccccaactccgcccccatgaatatgatcatcagatgcggctagcatcatatctcgcctccacttcgtcacctcctcgccattctatcccaccagctgcatatatccctggtgtgtgaggtcagctgttttagctcagcgcgcgcggcgtggcagcaaaggaagcaaggagggagagcagcggcggcggcgtagcatgcggcggtgagagcgagggagctagggaggaggaagggatagccgagagagcgagagccagaggatgatgcagctgccgcagcatcacaagccgtccgcccactcctgctgcccgtcgtggatccggaggtccccgccgtcgccgccgccgccgccgcacaagaagctgggcggcgggaggagccggtatgcttgccgcctcgtgcccctgctcgtgctcaccgtgtacagcgtcgtcaccgtgcttcgcatccccagcgcctccctcgtcgtctccaccgccgattcaggcaagagcatcaaggatttccaggcgctactccaccggagctacagccggacgacgacgacaccgtcggcgtcgccacccgtgccagtgccgcttcccctggcgccgccgtcccggtcccggtcccgggcgtgcccgcgcccggccgccaagccgaagctgctcatcttcatccgcaagcagaaccgcgtgctgctcaacctcccgcacgtggtgacggcctgccggcgggccgggttcgcgccgcacgtgatgaacctgcggcggcagaccccgctggccgcgatccacgccgcgctggcgtcggcggacgccatggtggccgtgcacggcgcggccgtcacccacttcctcttcatgcgcccgggctccgtgctcctccagatcgtgcccgtgggtctcgactgggcggccgacgccttctacggcaagcccgcgcagcagctcggcctcgagtacctcgagtacaaggtggcgcccgaggagagctcgctggccgccgagtacggcctcgacagcaccgttctgaggaacccctgggtgatcagcagccgcggctggtgggagatgaagaaagtgtacatggaccgccagaacgtcaccgttaacatcaagcggttcggcgagctactcaggacggcgcggacgcacctcaagaacaccacggcgtgcgccgccgccgcggcgctgaggtagaagatgctagttgagcttggtcaggtgctaatgacttagtcatacttgtcaatttctttgtgttttcgtcgagatcctgtaaatatgattgggttggttcttttggtcgagagattggtggggatcgatcgccttcttctacagtgcattcgtttggttcatggtgttgctagagcagaagcagatgaagaatagtttatggcaggggcagctgtcctcaaacaccttgttcacactagttcataggggtagcagctctttttatttctcttcaaattttctttttgttcttctcattctttgggtgtcatgatgatgtataagaaactacatgtctttctctgtaacaaagatcaatagtccagactcttttacagattgtcgcgtgccttctctcttccagcgtgtggcacgaaccaaaagaagcagcacgaaactacaatgcagttcttgtggatccttttgaagttcggtccacatggagatgtatagtttgtcgatttgtctcccaacctaccctagtgaacaccgaggcaacgttgctcgcgagcagtagggtgtaatcggattatgataagatttgaatatatattgatatttt

SEQ ID NO: 76633 - DNA, 3127 bp, Zea Mays
gtgctagtcattgggcctgttagatctgataggcccaacaccgagactttttctagagggatgatgatggtgacaatgcttttcacatagctgctgacgcagcaaaaatgatacgcgaaaacttgacttggattgctcaaatgctactacagccgtcacctgctgttgatgtgagaaaccaccgaggttggacactacgagactttcttgagaggcttccacgagaatggatttatgaagaattgatggaaatgcttgaagataaaggagttcatctctcaccaaccatatatgaggttgcggattgggtaaaatttagaagaactgttacatcaccagcttttggctggcaaggtgcaggacctagaagcattggttttgtccagtctgttgtagacaatgaccaccttgcggtgtcattttgtactggagaagcccatgttttgacaagtgaagttatcaaagttattccattaaataggggccaacatgtgcaactcaagcctgatgtttctgaaccaagatttggatggcgtggtcaatcgcgggatagcattgggacagttctctgtgttgatgatgatggaatcttgagggttggttttccaggagcttctaggggatggagagctgatcctgcagaaattgaaagggttgaagaatataaggttggtaactgggttcggattcgtccttcactaacggttgctgtgcatggcatggagtccattactcctggaagtgttgggattgtatactccatcagaccagatagcagtcttttattgggactttgctatttgtccaatccatggctgtgtgaaccggaggaggttgaacatgttgacccattcaagattggggaccaagtatgtgtaaagaggtctgttgcagagcccagatatgcatggggcggtgagactcatcacagtgttgggaaaataattgacatcgagagtgatggcctgctcatcattgatattcctaatcgggctgcaccatggcaggcagatccatcggacatggaaaagattgagaacttcaaggttggcgattggattagagtcaaagtgacagttccctcacccaaatatggatgggaggatgtgactcgaaatagtattgggataattcatagtctacaagatgatggagatgtgggtgttgctttctgctttagaagcaagctttttctttgctcagttgcagatatcgagaaggcacaaccatttgaagtaggggaaaaagttcatgtgtcaccttccatatctgagccacgcctcggctggttaaatgaaactgcagctactattggagccatatcaaggattgacatggatgggactttaaatatcaaggtttctggccgaaaaagcttatggaaggttgctcctggtgacgctgagaggctttcagcttttgaggttggagattgggtccgcccaaaaccaagtattgggagcagacctacttatgactggaatagtgttgggagaataaacattgcagtagtccatagcattcaggactctggttacttggagttagctggctgtttcaggcatgggaagtggctaacccataacacagacattgagaaagtgcagacagtaaaaattggtcagcatgttcggttccgtgctggaatttcagagcctagatggggatggagagatgcgaaccctgattctagaggcatcatcgctggtgtacatgctgatggagaagtaagggtcgccttctttggtgtgccgggattgtggagaggcgatcctgcagatcttgaaattgagaatatcttcgaggttggagagtgggttaggctgaggaacgatgtggagcagtggagatcactcaagcctggtagcattggtgtggtgcatggggtgggatatcaaggtgatgcttgggatggaaccattcatgtcgctttttgtggtgagcaggaaaggtggattgggccttctagccagcttgaaggagttagcaagtttgttgttgggcagcgtgttcgaatcagaggctgtatccgccagccaagatttggttggtccaatcatagtcattcaagcatagggacaatctcatctattgacgcagatgggaaactgaggattcatacaccagctggtgccagggcttggttgacagacccagcagaggtggaaaaagtggaggacgaggaggaagtctgtattggggactgggtgaaggttaaggactcagttggaaccccagtgtatcaatggggtgatgtgaaccacagcagtataggggtggtccaccgggctgatgatggagagctctggattgctttctgcttctgtgagaggctgtggttatgcaaagcatgggaggtggaaaaggtgaggcccttcagacaaggtgacaaagtacggatacgatctggtcttgtatcccccagatggggctgggggatggagacctacgcgagcaaaggcgaggttgtgggtgtggatgcaaacggaaagctgaggataaagtttcggtggagggatagactttggattggggacccggctgatgtcgttcttgatgatgcccatttattgacggaggcttctaatggcttttgacctttttgttcataggcttgtggtattcttttgaccccatatctcatttcttgcacccatccattttgcagcatttcaaatttagcaaaatctcaacctgcagtggagttgcaagttgcacatagttatcatcgcataggcatgcatggcagggtgtatttcttgttgataaccggggaatgagaagacagcgatagtgaaatactcctagagttgataaccaccacctaggtttttttccctttggtctacatgtataattatgccgcctgataccttttgggtttcagtgtaccatatataccagtgtacaggttcggacctgaacattaatttgattgatagtggtctactggtcttgtatgtgctgactcgttgtgcaccgagtggctggcaatgccgcgtgtaccaggagttactgcaagctgctcagtggcatacgagtatgatgacgtatatggtacaaactgcactgctgtgtatgcgtggcaccagtgttggtgtggtaatggatcgtgatctaaataatt

SEQ ID NO: 76634 - DNA, 3110 bp, Zea Mays
aaagggggcaaggcgataggcccagatggtatctcgatagaggatgatgatggtgacaatgcttttcacatagctgctgacgcagcaaaaatgatacgcgaaaacttgacttggattgctcaaatgctactacagccgtcacctgctgttgatgtgagaaaccaccgaggttggacactacgagactttcttgagaggcttccacgagaatggatttatgaagaattgatggaaatgcttgaagataaaggagttcatctctcaccaaccatatatgaggttgcggattgggtaaaatttagaagaactgttacatcaccagcttttggctggcaaggtgcaggacctagaagcattggttttgtccagtctgttgtagacaatgaccaccttgcggtgtcattttgtactggagaagcccatgttttgacaagtgaagttatcaaagttattccattaaataggggccaacatgtgcaactcaagcctgatgtttctgaaccaagatttggatggcgtggtcaatcgcgggatagcattgggacagttctctgtgttgatgatgatggaatcttgagggttggttttccaggagcttctaggggatggagagctgatcctgcagaaattgaaagggttgaagaatataaggttggtaactgggttcggattcgtccttcactaacggttgctgtgcatggcatggagtccattactcctggaagtgttgggattgtatactccatcagaccagatagcagtcttttattgggactttgctatttgtccaatccatggctgtgtgaaccggaggaggttgaacatgttgacccattcaagattggggaccaagtatgtgtaaagaggtctgttgcagagcccagatatgcatggggcggtgagactcatcacagtgttgggaaaataattgacatcgagagtgatggcctgctcatcattgatattcctaatcgggctgcaccatggcaggcagatccatcggacatggaaaagattgagaacttcaaggttggcgattggattagagtcaaagtgacagttccctcacccaaatatggatgggaggatgtgactcgaaatagtattgggataattcatagtctacaagatgatggagatgtgggtgttgctttctgctttagaagcaagctttttctttgctcagttgcagatatcgagaaggcacaaccatttgaagtaggggaaaaagttcatgtgtcaccttccatatctgagccacgcctcggctggttaaatgaaactgcagctactattggagccatatcaaggattgacatggatgggactttaaatatcaaggtttctggccgaaaaagcttatggaaggttgctcctggtgacgctgagaggctttcagcttttgaggttggagattgggtccgcccaaaaccaagtattgggagcagacctacttatgactggaatagtgttgggagaataaacattgcagtagtccatagcattcaggactctggttacttggagttagctggctgtttcaggcatgggaagtggctaacccataacacagacattgagaaagtgcagacagtaaaaattggtcagcatgttcggttccgtgctggaatttcagagcctagatggggatggagagatgcgaaccctgattctagaggcatcatcgctggtgtacatgctgatggagaagtaagggtcgccttctttggtgtgccgggattgtggagaggcgatcctgcagatcttgaaattgagaatatcttcgaggttggagagtgggttaggctgaggaacgatgtggagcagtggagatcactcaagcctggtagcattggtgtggtgcatggggtgggatatcaaggtgatgcttgggatggaaccattcatgtcgctttttgtggtgagcaggaaaggtggattgggccttctagccagcttgaaggagttagcaagtttgttgttgggcagcgtgttcgaatcagaggctgtatccgccagccaagatttggttggtccaatcatagtcattcaagcatagggacaatctcatctattgacgcagatgggaaactgaggattcatacaccagctggtgccagggcttggttgacagacccagcagaggtggaaaaagtggaggacgaggaggaagtctgtattggggactgggtgaaggttaaggactcagttggaaccccagtgtatcaatggggtgatgtgaaccacagcagtataggggtggtccaccgggctgatgatggagagctctggattgctttctgcttctgtgagaggctgtggttatgcaaagcatgggaggtggaaaaggtgaggcccttcagacaaggtgacaaagtacggatacgatctggtcttgtatcccccagatggggctgggggatggagacctacgcgagcaaaggcgaggttgtgggtgtggatgcaaacggaaagctgaggataaagtttcggtggagggatagactttggattggggacccggctgatgtcgttcttgatgatgcccatttattgacggaggcttctaatggcttttgacctttttgttcataggcttgtggtattcttttgaccccatatctcatttcttgcacccatccattttgcagcatttcaaatttagcaaaatctcaacctgcagtggagttgcaagttgcacatagttatcatcgcataggcatgcatggcagggtgtatttcttgttgataaccggggaatgagaagacagcgatagtgaaatactcctagagttgataaccaccacctaggtttttttccctttggtctacatgtataattatgccgcctgataccttttgggtttcagtgtaccatatataccagtgtacaggttcggacctgaacattaatttgattgatagtggtctactggtcttgtatgtgctgactcgttgtgcaccgagtggctggcaatgccgcgtgtaccaggagttactgcaagctgctcagtggcatacgagtatgatgacgtatatggtacaaactgcactgctgtgtatgcgtggcaccagtgttggtgtggtaatggatcgtgatctaaataatt

SEQ ID NO: 76635 - DNA, 5497 bp, Zea Mays
gcaatttgcaagcgcaggaaccaggagaaaggtcggcggagcgagcaggaagggcaacgcagcgctgcgtgttgcttgtcgtccttccttccccagcctcccaccgcatcaccaccaaccctctacctctcactttctgaaattcccacgttgctctcccgtcttccctcctcccctccccaaacccccaccccaacgcccagatctaccctccccatttacagctttctctccggccctgcgccccagggcaccgcgccgcccgaaaccgtcggcgccggcgcgatgcgcgtgccatgctgctcgttatgcaacgtcagatatgacgaggaggagcggacgccgctgctcctccactgcggccatggattctgccgcgcgtgcctctcccgcatgctagcggcagcccccggagccacgctgccgtgcccgcgatgtcgccatccgaccgccgtaggcaactcagtctctgcgctgcggaagaacttccccattctatcgctcctctccgcatccccctcatccccgtctttcctccactccgactcggggtcatcctccgacggctccgaagatgaggatgacttcttcgcacggcccactcgccgccccgcgcccgcgcccgccgccgcgtcgcccggatgcagctccttcgacctcgcctcgcacccggacctcaagctcgcccgtcgcatcgggagcggcccgcctgggcccgccgggcaggacgtgtgggtcggcacgctgtctcgtggcggcggcggggtcaagcggtgcaagcaccaggtggcagtgaagagggtgccccaaaccgcgggggatgggctcgaggttgttcaagaggaggtggagcggctgaggcgtgcctccacatggtgtcggaacgtgtgcaccttccatggtgctgtgagggtcggcggccacctctgtttcgtgatggatcattatgtcgggtctgtgcaggcggagatgcggcagaatggtggacgcctcacgctggagcagattctcagcaattctgaagaataggagagttcctgatgactccggtgctggcattgatgctatgctgcttagtcccaattatacagctcctgaggcatggggaccactgaagaagtcactgaatatgttttgggatagtgcaaacggtatatcaccagagtcggatgcatggagttttggttgcacgctcgtggaaatgtgtactggtgctgttccatgggctggactgactgcagaggagatctgtaagtctgttgcaaaagagaagaagccaccacctcaatattcaagagtagtaggtgtaggacttcctggggagctgtggaagatgattggtgaatgtttgcagttccgagcttcaagaagaccatccttccaggacatgctgaaaattttccttcgacaccttctggacataccacggagcccacctgctagtcctgagaatgatttcgcaaatgaaaacttgcccaatggcatggaacctccaacaacctccatcctagagatggttcgttataatccaaatgccttgcatcatcttgtatgcgaaggagatgctgctggtgttagggatctacttgcgaaggttgcatcagagagaaatggtggtttcatccgttctctcttagaagcacaaaatacagatggactcactgccctacatttagcatgtcgccgaggctcggcagagcttgtggaagctattgtggcttaccaagagaatgtagatatattagataaggatgaagacccacctatagtatttgctttggctgctggctctccacgatgtgttcgtgcacttgtaggcaggtctgctagtatcaattctaggcttagagaaggcctgggtcctactcttgcccatgtctgtgctcatcatggtcaaccagagtgcatgcaagagctgctgatggctggagctgatcccaacgcagtagatggtgaaggtgaatctgtcctgcatattgccgtggccaggagatatactgattgtgctattgctatacttgaaaatggaggctgcagatcgatgggaatatcaaattctcaacataaaacgccattgcatttatgtgttgagacatggaacacgactgtggtaagaagatgggttgatgttgcatctctagaggatatagcagaagcaattgatgtacccagccctgttggtacagctttatgcatggcagcagctcttaaaaaggagcacgagaaagagggtcgagagttagtaagaatattgcttgctgctggtgctgatcctacagcacaagatgatccacactgtagaactgcattacatactgcagcaatgatcaatgacgtggagcttgttaagattatactggaagcaggagtcgatgttaatataagaaatgctcaaaatacaaccccactccatgttgcacttaatagaggatgatgatggtgacaatgcttttcacatagctgctgacgcagcaaaaatgatacgcgaaaacttgacttggattgctcaaatgctactacagccgtcacctgctgttgatgtgagaaaccaccgaggttggacactacgagactttcttgagaggcttccacgagaatggatttatgaagaattgatggaaatgcttgaagataaaggagttcatctctcaccaaccatatatgaggttgcggattgggtaaaatttagaagaactgttacatcaccagcttttggctggcaaggtgcaggacctagaagcattggttttgtccagtctgttgtagacaatgaccaccttgcggtgtcattttgtactggagaagcccatgttttgacaagtgaagttatcaaagttattccattaaataggggccaacatgtgcaactcaagcctgatgtttctgaaccaagatttggatggcgtggtcaatcgcgggatagcattgggacagttctctgtgttgatgatgatggaatcttgagggttggttttccaggagcttctaggggatggagagctgatcctgcagaaattgaaagggttgaagaatataaggttggtaactgggttcggattcgtccttcactaacggttgctgtgcatggcatggagtccattactcctggaagtgttgggattgtatactccatcagaccagatagcagtcttttattgggactttgctatttgtccaatccatggctgtgtgaaccggaggaggttgaacatgttgacccattcaagattggggaccaagtatgtgtaaagaggtctgttgcagagcccagatatgcatggggcggtgagactcatcacagtgttgggaaaataattgacatcgagagtgatggcctgctcatcattgatattcctaatcgggctgcaccatggcaggcagatccatcggacatggaaaagattgagaacttcaaggttggcgattggattagagtcaaagtgacagttccctcacccaaatatggatgggaggatgtgactcgaaatagtattgggataattcatagtctacaagatgatggagatgtgggtgttgctttctgctttagaagcaagctttttctttgctcagttgcagatatcgagaaggcacaaccatttgaagtaggggaaaaagttcatgtgtcaccttccatatctgagccacgcctcggctggttaaatgaaactgcagctactattggagccatatcaaggattgacatggatgggactttaaatatcaaggtttctggccgaaaaagcttatggaaggttgctcctggtgacgctgagaggctttcagcttttgaggttggagattgggtccgcccaaaaccaagtattgggagcagacctacttatgactggaatagtgttgggagaataaacattgcagtagtccatagcattcaggactctggttacttggagttagctggctgtttcaggcatgggaagtggctaacccataacacagacattgagaaagtgcagacagtaaaaattggtcagcatgttcggttccgtgctggaatttcagagcctagatggggatggagagatgcgaaccctgattctagaggcatcatcgctggtgtacatgctgatggagaagtaagggtcgccttctttggtgtgccgggattgtggagaggcgatcctgcagatcttgaaattgagaatatcttcgaggttggagagtgggttaggctgaggaacgatgtggagcagtggagatcactcaagcctggtagcattggtgtggtgcatggggtgggatatcaaggtgatgcttgggatggaaccattcatgtcgctttttgtggtgagcaggaaaggtggattgggccttctagccagcttgaaggagttagcaagtttgttgttgggcagcgtgttcgaatcagaggctgtatccgccagccaagatttggttggtccaatcatagtcattcaagcatagggacaatctcatctattgacgcagatgggaaactgaggattcatacaccagctggtgccagggcttggttgacagacccagcagaggtggaaaaagtggaggacgaggaggaagtctgtattggggactgggtgaaggttaaggactcagttggaaccccagtgtatcaatggggtgatgtgaaccacagcagtataggggtggtccaccgggctgatgatggagagctctggattgctttctgcttctgtgagaggctgtggttatgcaaagcatgggaggtggaaaaggtgaggcccttcagacaaggtgacaaagtacggatacgatctggtcttgtatcccccagatggggctgggggatggagacctacgcgagcaaaggcgaggttgtgggtgtggatgcaaacggaaagctgaggataaagtttcggtggagggatagactttggattggggacccggctgatgtcgttcttgatgatgcccatttattgacggaggcttctaatggcttttgacctttttgttcataggcttgtggtattcttttgaccccatatctcatttcttgcacccatccattttgcagcatttcaaatttagcaaaatctcaacctgcagtggagttgcaagttgcacatagttatcatcgcataggcatgcatggcagggtgtatttcttgttgataaccggggaatgagaagacagcgatagtgaaatactcctagagttgataaccaccacctaggtttttttccctttggtctacatgtataattatgccgcctgataccttttgggtttcagtgtaccatatataccagtgtacaggttcggacctgaacattaatttgattgatagtggtctactggtcttgtatgtgctgactcgttgtgcaccgagtggctggcaatgccgcgtgtaccaggagttactgcaagctgctcagtggcatacgagtatgatgacgtatatggtacaaactgcactgctgtgtatgcgtggcaccagtgttggtgtggtaatggatcgtgatctaaataatt

SEQ ID NO: 76636 - DNA, 5666 bp, Zea Mays
gtcacacgtcacccgcgctgccaaaacacgcgctcgtcgcaatttgcaagcgcaggaaccaggagaaaggtcggcggagcgagcaggaagggcaacgcagcgctgcgtgttgcttgtcgtccttccttccccagcctcccaccgcatcaccaccaaccctctacctctcactttctgaaattcccacgttgctctcccgtcttccctcctcccctccccaaacccccaccccaacgcccagatctaccctccccatttacagctttctctccggccctgcgccccagggcaccgcgccgcccgaaaccgtcggcgccggcgcgatgcgcgtgccatgctgctcgttatgcaacgtcagatatgacgaggaggagcggacgccgctgctcctccactgcggccatggattctgccgcgcgtgcctctcccgcatgctagcggcagcccccggagccacgctgccgtgcccgcgatgtcgccatccgaccgccgtaggcaactcagtctctgcgctgcggaagaacttccccattctatcgctcctctccgcatccccctcatccccgtctttcctccactccgactcggggtcatcctccgacggctccgaagatgaggatgacttcttcgcacggcccactcgccgccccgcgcccgcgcccgccgccgcgtcgcccggatgcagctccttcgacctcgcctcgcacccggacctcaagctcgcccgtcgcatcgggagcggcccgcctgggcccgccgggcaggacgtgtgggtcggcacgctgtctcgtggcggcggcggggtcaagcggtgcaagcaccaggtggcagtgaagagggtgccccaaaccgcgggggatgggctcgaggttgttcaagaggaggtggagcggctgaggcgtgcctccacatggtgtcggaacgtgtgcaccttccatggtgctgtgagggtcggcggccacctctgtttcgtgatggatcattatgtcgggtctgtgcaggcggagatgcggcagaatggtggacgcctcacgctggagcagattctcaggtatggggctgatattgctcgtggagtagcagaactccatgcagcgggtattgtttgtatgagcataaagccgtcaaacattcttttggatgctcatggacatgcagtcgtttcggattatggtctttcagcaattctgaagaataggagagttcctgatgactccggtgctggcattgatgctatgctgcttagtcccaattatacagctcctgaggcatggggaccactgaagaagtcactgaatatgttttgggatagtgcaaacggtatatcaccagagtcggatgcatggagttttggttgcacgctcgtggaaatgtgtactggtgctgttccatgggctggactgactgcagaggagatctgtaagtctgttgcaaaagagaagaagccaccacctcaatattcaagagtagtaggtgtaggacttcctggggagctgtggaagatgattggtgaatgtttgcagttccgagcttcaagaagaccatccttccaggacatgctgaaaattttccttcgacaccttctggacataccacggagcccacctgctagtcctgagaatgatttcgcaaatgaaaacttgcccaatggcatggaacctccaacaacctccatcctagagatggttcgttataatccaaatgccttgcatcatcttgtatgcgaaggagatgctgctggtgttagggatctacttgcgaaggttgcatcagagagaaatggtggtttcatccgttctctcttagaagcacaaaatacagatggactcactgccctacatttagcatgtcgccgaggctcggcagagcttgtggaagctattgtggcttaccaagagaatgtagatatattagataaggatgaagacccacctatagtatttgctttggctgctggctctccacgatgtgttcgtgcacttgtaggcaggtctgctagtatcaattctaggcttagagaaggcctgggtcctactcttgcccatgtctgtgctcatcatggtcaaccagagtgcatgcaagagctgctgatggctggagctgatcccaacgcagtagatggtgaaggtgaatctgtcctgcatattgccgtggccaggagatatactgattgtgctattgctatacttgaaaatggaggctgcagatcgatgggaatatcaaattctcaacataaaacgccattgcatttatgtgttgagacatggaacacgactgtggtaagaagatgggttgatgttgcatctctagaggatatagcagaagcaattgatgtacccagccctgttggtacagctttatgcatggcagcagctcttaaaaaggagcacgagaaagagggtcgagagttagtaagaatattgcttgctgctggtgctgatcctacagcacaagatgatccacactgtagaactgcattacatactgcagcaatgatcaatgacgtggagcttgttaagattatactggaagcaggagtcgatgttaatataagaaatgctcaaaatacaaccccactccatgttgcacttaatagaggatgatgatggtgacaatgcttttcacatagctgctgacgcagcaaaaatgatacgcgaaaacttgacttggattgctcaaatgctactacagccgtcacctgctgttgatgtgagaaaccaccgaggttggacactacgagactttcttgagaggcttccacgagaatggatttatgaagaattgatggaaatgcttgaagataaaggagttcatctctcaccaaccatatatgaggttgcggattgggtaaaatttagaagaactgttacatcaccagcttttggctggcaaggtgcaggacctagaagcattggttttgtccagtctgttgtagacaatgaccaccttgcggtgtcattttgtactggagaagcccatgttttgacaagtgaagttatcaaagttattccattaaataggggccaacatgtgcaactcaagcctgatgtttctgaaccaagatttggatggcgtggtcaatcgcgggatagcattgggacagttctctgtgttgatgatgatggaatcttgagggttggttttccaggagcttctaggggatggagagctgatcctgcagaaattgaaagggttgaagaatataaggttggtaactgggttcggattcgtccttcactaacggttgctgtgcatggcatggagtccattactcctggaagtgttgggattgtatactccatcagaccagatagcagtcttttattgggactttgctatttgtccaatccatggctgtgtgaaccggaggaggttgaacatgttgacccattcaagattggggaccaagtatgtgtaaagaggtctgttgcagagcccagatatgcatggggcggtgagactcatcacagtgttgggaaaataattgacatcgagagtgatggcctgctcatcattgatattcctaatcgggctgcaccatggcaggcagatccatcggacatggaaaagattgagaacttcaaggttggcgattggattagagtcaaagtgacagttccctcacccaaatatggatgggaggatgtgactcgaaatagtattgggataattcatagtctacaagatgatggagatgtgggtgttgctttctgctttagaagcaagctttttctttgctcagttgcagatatcgagaaggcacaaccatttgaagtaggggaaaaagttcatgtgtcaccttccatatctgagccacgcctcggctggttaaatgaaactgcagctactattggagccatatcaaggattgacatggatgggactttaaatatcaaggtttctggccgaaaaagcttatggaaggttgctcctggtgacgctgagaggctttcagcttttgaggttggagattgggtccgcccaaaaccaagtattgggagcagacctacttatgactggaatagtgttgggagaataaacattgcagtagtccatagcattcaggactctggttacttggagttagctggctgtttcaggcatgggaagtggctaacccataacacagacattgagaaagtgcagacagtaaaaattggtcagcatgttcggttccgtgctggaatttcagagcctagatggggatggagagatgcgaaccctgattctagaggcatcatcgctggtgtacatgctgatggagaagtaagggtcgccttctttggtgtgccgggattgtggagaggcgatcctgcagatcttgaaattgagaatatcttcgaggttggagagtgggttaggctgaggaacgatgtggagcagtggagatcactcaagcctggtagcattggtgtggtgcatggggtgggatatcaaggtgatgcttgggatggaaccattcatgtcgctttttgtggtgagcaggaaaggtggattgggccttctagccagcttgaaggagttagcaagtttgttgttgggcagcgtgttcgaatcagaggctgtatccgccagccaagatttggttggtccaatcatagtcattcaagcatagggacaatctcatctattgacgcagatgggaaactgaggattcatacaccagctggtgccagggcttggttgacagacccagcagaggtggaaaaagtggaggacgaggaggaagtctgtattggggactgggtgaaggttaaggactcagttggaaccccagtgtatcaatggggtgatgtgaaccacagcagtataggggtggtccaccgggctgatgatggagagctctggattgctttctgcttctgtgagaggctgtggttatgcaaagcatgggaggtggaaaaggtgaggcccttcagacaaggtgacaaagtacggatacgatctggtcttgtatcccccagatggggctgggggatggagacctacgcgagcaaaggcgaggttgtgggtgtggatgcaaacggaaagctgaggataaagtttcggtggagggatagactttggattggggacccggctgatgtcgttcttgatgatgcccatttattgacggaggcttctaatggcttttgacctttttgttcataggcttgtggtattcttttgaccccatatctcatttcttgcacccatccattttgcagcatttcaaatttagcaaaatctcaacctgcagtggagttgcaagttgcacatagttatcatcgcataggcatgcatggcagggtgtatttcttgttgataaccggggaatgagaagacagcgatagtgaaatactcctagagttgataaccaccacctaggtttttttccctttggtctacatgtataattatgccgcctgataccttttgggtttcagtgtaccatatataccagtgtacaggttcggacctgaacattaatttgattgatagtggtctactggtcttgtatgtgctgactcgttgtgcaccgagtggctggcaatgccgcgtgtaccaggagttactgcaagctgctcagtggcatacgagtatgatgacgtatatggtacaaactgcactgctgtgtatgcgtggcaccagtgttggtgtggtaatggatcgtgatctaaataatt

SEQ ID NO: 76637 - DNA, 5764 bp, Zea Mays
gctacctccatggtccatgccgatgatgagctcatgagaaccgtcacacgtcacccgcgctgccaaaacacgcgctcgtcgcaatttgcaagcgcaggaaccaggagaaaggtcggcggagcgagcaggaagggcaacgcagcgctgcgtgttgcttgtcgtccttccttccccagcctcccaccgcatcaccaccaaccctctacctctcactttctgaaattcccacgttgctctcccgtcttccctcctcccctccccaaacccccaccccaacgcccagatctaccctccccatttacagctttctctccggccctgcgccccagggcaccgcgccgcccgaaaccgtcggcgccggcgcgatgcgcgtgccatgctgctcgttatgcaacgtcagatatgacgaggaggagcggacgccgctgctcctccactgcggccatggattctgccgcgcgtgcctctcccgcatgctagcggcagcccccggagccacgctgccgtgcccgcgatgtcgccatccgaccgccgtaggcaactcagtctctgcgctgcggaagaacttccccattctatcgctcctctccgcatccccctcatccccgtctttcctccactccgactcggggtcatcctccgacggctccgaagatgaggatgacttcttcgcacggcccactcgccgccccgcgcccgcgcccgccgccgcgtcgcccggatgcagctccttcgacctcgcctcgcacccggacctcaagctcgcccgtcgcatcgggagcggcccgcctgggcccgccgggcaggacgtgtgggtcggcacgctgtctcgtggcggcggcggggtcaagcggtgcaagcaccaggtggcagtgaagagggtgccccaaaccgcgggggatgggctcgaggttgttcaagaggaggtggagcggctgaggcgtgcctccacatggtgtcggaacgtgtgcaccttccatggtgctgtgagggtcggcggccacctctgtttcgtgatggatcattatgtcgggtctgtgcaggcggagatgcggcagaatggtggacgcctcacgctggagcagattctcaggtatggggctgatattgctcgtggagtagcagaactccatgcagcgggtattgtttgtatgagcataaagccgtcaaacattcttttggatgctcatggacatgcagtcgtttcggattatggtctttcagcaattctgaagaataggagagttcctgatgactccggtgctggcattgatgctatgctgcttagtcccaattatacagctcctgaggcatggggaccactgaagaagtcactgaatatgttttgggatagtgcaaacggtatatcaccagagtcggatgcatggagttttggttgcacgctcgtggaaatgtgtactggtgctgttccatgggctggactgactgcagaggagatctgtaagtctgttgcaaaagagaagaagccaccacctcaatattcaagagtagtaggtgtaggacttcctggggagctgtggaagatgattggtgaatgtttgcagttccgagcttcaagaagaccatccttccaggacatgctgaaaattttccttcgacaccttctggacataccacggagcccacctgctagtcctgagaatgatttcgcaaatgaaaacttgcccaatggcatggaacctccaacaacctccatcctagagatggttcgttataatccaaatgccttgcatcatcttgtatgcgaaggagatgctgctggtgttagggatctacttgcgaaggttgcatcagagagaaatggtggtttcatccgttctctcttagaagcacaaaatacagatggactcactgccctacatttagcatgtcgccgaggctcggcagagcttgtggaagctattgtggcttaccaagagaatgtagatatattagataaggatgaagacccacctatagtatttgctttggctgctggctctccacgatgtgttcgtgcacttgtaggcaggtctgctagtatcaattctaggcttagagaaggcctgggtcctactcttgcccatgtctgtgctcatcatggtcaaccagagtgcatgcaagagctgctgatggctggagctgatcccaacgcagtagatggtgaaggtgaatctgtcctgcatattgccgtggccaggagatatactgattgtgctattgctatacttgaaaatggaggctgcagatcgatgggaatatcaaattctcaacataaaacgccattgcatttatgtgttgagacatggaacacgactgtggtaagaagatgggttgatgttgcatctctagaggatatagcagaagcaattgatgtacccagccctgttggtacagctttatgcatggcagcagctcttaaaaaggagcacgagaaagagggtcgagagttagtaagaatattgcttgctgctggtgctgatcctacagcacaagatgatccacactgtagaactgcattacatactgcagcaatgatcaatgacgtggagcttgttaagattatactggaagcaggagtcgatgttaatataagaaatgctcaaaatacaaccccactccatgttgcacttaatagaggtgcaaactcgtgtgttggcttgcttttagcatctggtgcaaattgcaacatacaggatgatgatggtgacaatgcttttcacatagctgctgacgcagcaaaaatgatacgcgaaaacttgacttggattgctcaaatgctactacagccgtcacctgctgttgatgtgagaaaccaccgaggttggacactacgagactttcttgagaggcttccacgagaatggatttatgaagaattgatggaaatgcttgaagataaaggagttcatctctcaccaaccatatatgaggttgcggattgggtaaaatttagaagaactgttacatcaccagcttttggctggcaaggtgcaggacctagaagcattggttttgtccagtctgttgtagacaatgaccaccttgcggtgtcattttgtactggagaagcccatgttttgacaagtgaagttatcaaagttattccattaaataggggccaacatgtgcaactcaagcctgatgtttctgaaccaagatttggatggcgtggtcaatcgcgggatagcattgggacagttctctgtgttgatgatgatggaatcttgagggttggttttccaggagcttctaggggatggagagctgatcctgcagaaattgaaagggttgaagaatataaggttggtaactgggttcggattcgtccttcactaacggttgctgtgcatggcatggagtccattactcctggaagtgttgggattgtatactccatcagaccagatagcagtcttttattgggactttgctatttgtccaatccatggctgtgtgaaccggaggaggttgaacatgttgacccattcaagattggggaccaagtatgtgtaaagaggtctgttgcagagcccagatatgcatggggcggtgagactcatcacagtgttgggaaaataattgacatcgagagtgatggcctgctcatcattgatattcctaatcgggctgcaccatggcaggcagatccatcggacatggaaaagattgagaacttcaaggttggcgattggattagagtcaaagtgacagttccctcacccaaatatggatgggaggatgtgactcgaaatagtattgggataattcatagtctacaagatgatggagatgtgggtgttgctttctgctttagaagcaagctttttctttgctcagttgcagatatcgagaaggcacaaccatttgaagtaggggaaaaagttcatgtgtcaccttccatatctgagccacgcctcggctggttaaatgaaactgcagctactattggagccatatcaaggattgacatggatgggactttaaatatcaaggtttctggccgaaaaagcttatggaaggttgctcctggtgacgctgagaggctttcagcttttgaggttggagattgggtccgcccaaaaccaagtattgggagcagacctacttatgactggaatagtgttgggagaataaacattgcagtagtccatagcattcaggactctggttacttggagttagctggctgtttcaggcatgggaagtggctaacccataacacagacattgagaaagtgcagacagtaaaaattggtcagcatgttcggttccgtgctggaatttcagagcctagatggggatggagagatgcgaaccctgattctagaggcatcatcgctggtgtacatgctgatggagaagtaagggtcgccttctttggtgtgccgggattgtggagaggcgatcctgcagatcttgaaattgagaatatcttcgaggttggagagtgggttaggctgaggaacgatgtggagcagtggagatcactcaagcctggtagcattggtgtggtgcatggggtgggatatcaaggtgatgcttgggatggaaccattcatgtcgctttttgtggtgagcaggaaaggtggattgggccttctagccagcttgaaggagttagcaagtttgttgttgggcagcgtgttcgaatcagaggctgtatccgccagccaagatttggttggtccaatcatagtcattcaagcatagggacaatctcatctattgacgcagatgggaaactgaggattcatacaccagctggtgccagggcttggttgacagacccagcagaggtggaaaaagtggaggacgaggaggaagtctgtattggggactgggtgaaggttaaggactcagttggaaccccagtgtatcaatggggtgatgtgaaccacagcagtataggggtggtccaccgggctgatgatggagagctctggattgctttctgcttctgtgagaggctgtggttatgcaaagcatgggaggtggaaaaggtgaggcccttcagacaaggtgacaaagtacggatacgatctggtcttgtatcccccagatggggctgggggatggagacctacgcgagcaaaggcgaggttgtgggtgtggatgcaaacggaaagctgaggataaagtttcggtggagggatagactttggattggggacccggctgatgtcgttcttgatgatgcccatttattgacggaggcttctaatggcttttgacctttttgttcataggcttgtggtattcttttgaccccatatctcatttcttgcacccatccattttgcagcatttcaaatttagcaaaatctcaacctgcagtggagttgcaagttgcacatagttatcatcgcataggcatgcatggcagggtgtatttcttgttgataaccggggaatgagaagacagcgatagtgaaatactcctagagttgataaccaccacctaggtttttttccctttggtctacatgtataattatgccgcctgataccttttgggtttcagtgtaccatatataccagtgtacaggttcggacctgaacattaatttgattgatagtggtctactggtcttgtatgtgctgactcgttgtgcaccgagtggctggcaatgccgcgtgtaccaggagttactgcaagctgctcagtggcatacgagtatgatgacgtatatggtacaaactgcactgctgtgtatgcgtggcaccagtgttggtgtggtaatggatcgtgatctaaataatt

SEQ ID NO: 76638 - DNA, 1782 bp, Zea Mays
cgtccccatcccactcgtcgcccatctgccgtgacgtctctcctctctccagcggttcccatctactacttaactcgcaggccgcggccgcctagaccttcctctcacttcgcgggtacgcagagtcgctagacgcacctcgctcgcaacttgttggactcgaaggggcaatagacagcaggcagggccccgaactgcgggaggagattcccaaggatctcgtcggccgggtagaggaagggacggggacgggcgatggcggcggacggcggcggcggggtggactgggagagcctggcggaggccacctccggggcaatcggctcgctcgtcagcaccaccgtgctctacccgctcgacacctgcaagaccaagttccaggccgagctccagacgcaccagggcgctcagaagtataggaacctttcagatgtcttttgggaagcgattcgtaaaaagcaatttttgtccctatatcagggcctgaacacgaagaacattcagtcttttgtctcctcgtttttttatttttatgggtatagctattttaaaagactctacttggagaagagtggagcaaagtctattggaacaacagccaacttgttagttgctgctgctgctggtgcttgtactgttatcgtgacacagatacagcagcttctaggatgcagacaagtgtctttggaaagtctaaagggctgagagaaactcttgcagaaggtacttggatggaagcattcgatggcttaggcatttccattatattgacttgcaatccttctattcagtacaccgcgtttgatcagttcaagcaaaggatacttcataggcagcggcgcaaaaatgcaggatcagcggaggataattccggagttgctctttctgctttctcagcttttctgcttggcgccgtctctaaaagtattgctacagtattgacttatccattaatcagatgcaaggtgatgattcaggctgcagaccctgatgaggatgatgacgatgaacctggaaggccaagcaaatcaagaacaccaaaaacaatgctaggtgccttgcatgctatctggagcaaggaaggcattccaggcttcttcaaaggcttgaatgctcagatccttaaaacagttctgagctccgccttgctgctgatgattaaggagaagatctcgaagttcacttgggtctcactgcttgccctgcggcggtatcttttcgtttctcagaagaggatcaagagtgcaactgtataaatacgttagctccaaaacacaaactagcacacatagcgacatggtgcttctggagatgttatgccaaggaataaatctgaggaataatcagcagaaatacttaaccaagagagagagaataaggtgtgtatctggggtcgatagcatcagagggctcttcaataagtttgtccatttcttttttttctctctctctctgaatctcttgtagctagtgacgtagatgttgcgcggatctgaaactggactgtacttttagcgtttgttgcctgtaattaggggtgataatgggctctgaattttacagtataatatttaaggttcggattatgattgggtcctgtttctattcatttttaattaaattttatttaggactctaagaaattgtgaaaaacatttagagcgtgatctattatcatccctacctgtaacgtgtaaaatagcagcgtgttaatattccctttaaaaaaggtaatcgatcggcagtgtgatgtaagatgtgttgtcgatcgttcccttttgc

SEQ ID NO: 76639 - DNA, 1728 bp, Zea Mays
cgtccccatcccactcgtcgcccatctgccgtgacgtctctcctctctccagcggttcccatctactacttaactcgcaggccgcggccgcctagaccttcctctcacttcgcgggtacgcagagtcgctagacgcacctcgctcgcaacttgttggactcgaaggggcaatagacagcaggcagggccccgaactgcgggaggagattcccaaggatctcgtcggccgggtagaggaagggacggggacgggcgatggcggcggacggcggcggcggggtggactgggagagcctggcggaggccacctccggggcaatcggctcgctcgtcagcaccaccgtgctctacccgctcgacacctgcaagaccaagttccaggccgagctccagacgcaccagggcgctcagaagtataggaacctttcagatgtcttttgggaagcgattcgtaaaaagcaatttttgtccctatatcagggcctgaacacgaagaacattcagtcttttgtctcctcgtttttttatttttatgggtatagctattttaaaagactctacttggagaagagtggagcaaagtctattggaacaacagccaacttgttagttgctgctgctgctggtgcttgtactgttatcgtgacacagccattagatacagcagcttctaggatgcagacaagtgtctttggaaagtctaaagggctgagagaaactcttgcagaaggtacttggatggaagcattcgatggcttaggcatttccattatattgacttgcaatccttctattcaggatcagcggaggataattccggagttgctctttctgctttctcagcttttctgcttggcgccgtctctaaaagtattgctacagtattgacttatccattaatcagatgcaaggtgatgattcaggctgcagaccctgatgaggatgatgacgatgaacctggaaggccaagcaaatcaagaacaccaaaaacaatgctaggtgccttgcatgctatctggagcaaggaaggcattccaggcttcttcaaaggcttgaatgctcagatccttaaaacagttctgagctccgccttgctgctgatgattaaggagaagatctcgaagttcacttgggtctcactgcttgccctgcggcggtatcttttcgtttctcagaagaggatcaagagtgcaactgtataaatacgttagctccaaaacacaaactagcacacatagcgacatggtgcttctggagatgttatgccaaggaataaatctgaggaataatcagcagaaatacttaaccaagagagagagaataaggtgtgtatctggggtcgatagcatcagagggctcttcaataagtttgtccatttcttttttttctctctctctctgaatctcttgtagctagtgacgtagatgttgcgcggatctgaaactggactgtacttttagcgtttgttgcctgtaattaggggtgataatgggctctgaattttacagtataatatttaaggttcggattatgattgggtcctgtttctattcatttttaattaaattttatttaggactctaagaaattgtgaaaaacatttagagcgtgatctattatcatccctacctgtaacgtgtaaaatagcagcgtgttaatattccctttaaaaaaggtaatcgatcggcagtgtgatgtaagatgtgttgtcgatcgttcccttttgc

SEQ ID NO: 76640 - DNA, 1778 bp, Zea Mays
cgtccccatcccactcgtcgcccatctgccgtgacgtctctcctctctccagcggttcccatctactacttaactcgcaggccgcggccgcctagaccttcctctcacttcgcgggtacgcagagtcgctagacgcacctcgctcgcaacttgttggactcgaaggggcaatagacagcaggcagggccccgaactgcgggaggagattcccaaggatctcgtcggccgggtagaggaagggacggggacgggcgatggcggcggacggcggcggcggggtggactgggagagcctggcggaggccacctccggggcaatcggctcgctcgtcagcaccaccgtgctctacccgctcgacacctgcaagaccaagttccaggccgagctccagacgcaccagggcgctcagaagtatagatgtcttttgggaagcgattcgtaaaaagcaatttttgtccctatatcagggcctgaacacgaagaacattcagtcttttgtctcctcgtttttttatttttatgggtatagctattttaaaagactctacttggagaagagtggagcaaagtctattggaacaacagccaacttgttagttgctgctgctgctggtgcttgtactgttatcgtgacacagccattagatacagcagcttctaggatgcagacaagtgtctttggaaagtctaaagggctgagagaaactcttgcagaaggtacttggatggaagcattcgatggcttaggcatttccattatattgacttgcaatccttctattcagtacaccgcgtttgatcagttcaagcaaaggatacttcataggcagcggcgcaaaaatgcaggatcagcggaggataattccggagttgctctttctgctttctcagcttttctgcttggcgccgtctctaaaagtattgctacagtattgacttatccattaatcagatgcaaggtgatgattcaggctgcagaccctgatgaggatgatgacgatgaacctggaaggccaagcaaatcaagaacaccaaaaacaatgctaggtgccttgcatgctatctggagcaaggaaggcattccaggcttcttcaaaggcttgaatgctcagatccttaaaacagttctgagctccgccttgctgctgatgattaaggagaagatctcgaagttcacttgggtctcactgcttgccctgcggcggtatcttttcgtttctcagaagaggatcaagagtgcaactgtataaatacgttagctccaaaacacaaactagcacacatagcgacatggtgcttctggagatgttatgccaaggaataaatctgaggaataatcagcagaaatacttaaccaagagagagagaataaggtgtgtatctggggtcgatagcatcagagggctcttcaataagtttgtccatttcttttttttctctctctctctgaatctcttgtagctagtgacgtagatgttgcgcggatctgaaactggactgtacttttagcgtttgttgcctgtaattaggggtgataatgggctctgaattttacagtataatatttaaggttcggattatgattgggtcctgtttctattcatttttaattaaattttatttaggactctaagaaattgtgaaaaacatttagagcgtgatctattatcatccctacctgtaacgtgtaaaatagcagcgtgttaatattccctttaaaaaaggtaatcgatcggcagtgtgatgtaagatgtgttgtcgatcgttcccttttgc

SEQ ID NO: 76641 - DNA, 1784 bp, Zea Mays
gcaaaataccgtagacgcccggcccggccgcccgcacctgcccccgctcagcgtggcggctggcgtccccatcccactcgtcgcccatctgccgtgacgtctctcctctctccagcggttcccatctactacttaactcgcaggccgcggccgcctagaccttcctctcacttcgcgggtacgcagagtcgctagacgcacctcgctcgcaacttgttggactcgaaggggcaatagacagcaggcagggccccgaactgcgggaggagattcccaaggatctcgtcggccgggtagaggaagggacggggacgggcgatggcggcggacggcggcggcggggtggactgggagagcctggcggaggccacctccggggcaatcggctcgctcgtcagcaccaccgtgctctacccgctcgacacctgcaagaccaagttccaggccgagctccagacgcaccagggcgctcagaagtataggaacctttcagatgtcttttgggaagcgattcgtaaaaagcaatttttgtccctatatcagggcctgaacacgaagaacattcagtcttttgtctcctcgtttttttatttttatgggtatagctattttaaaagactctacttggagaagagtggagcaaagtctattggaacaacagccaacttgttagttgctgctgctgctggtgcttgtactgttatcgtgacacagccattagatacagcagcttctaggatgcagacaagtgtctttggaaagtctaaagggctgagagaaactcttgcagaagtacaccgcgtttgatcagttcaagcaaaggatacttcataggcagcggcgcaaaaatgcaggatcagcggaggataattccggagttgctctttctgctttctcagcttttctgcttggcgccgtctctaaaagtattgctacagtattgacttatccattaatcagatgcaaggtgatgattcaggctgcagaccctgatgaggatgatgacgatgaacctggaaggccaagcaaatcaagaacaccaaaaacaatgctaggtgccttgcatgctatctggagcaaggaaggcattccaggcttcttcaaaggcttgaatgctcagatccttaaaacagttctgagctccgccttgctgctgatgattaaggagaagatctcgaagttcacttgggtctcactgcttgccctgcggcggtatcttttcgtttctcagaagaggatcaagagtgcaactgtataaatacgttagctccaaaacacaaactagcacacatagcgacatggtgcttctggagatgttatgccaaggaataaatctgaggaataatcagcagaaatacttaaccaagagagagagaataaggtgtgtatctggggtcgatagcatcagagggctcttcaataagtttgtccatttcttttttttctctctctctctgaatctcttgtagctagtgacgtagatgttgcgcggatctgaaactggactgtacttttagcgtttgttgcctgtaattaggggtgataatgggctctgaattttacagtataatatttaaggttcggattatgattgggtcctgtttctattcatttttaattaaattttatttaggactctaagaaattgtgaaaaacatttagagcgtgatctattatcatccctacctgtaacgtgtaaaatagcagcgtgttaatattccctttaaaaaaggtaatcgatcggcagtgtgatgtaagatgtgttgtcgatcgttcccttttgc

SEQ ID NO: 76642 - DNA, 1784 bp, Zea Mays
atttttatagaaacgattatcaaaaaacagagtgagaagccaagctgaaacaagcccattgtcctttattaacagttctattgttgcgtctcgtctttgtatcggcataactgttggggttcaccgaacacccgtaacaatacaatcatggcgcaacccacatgtaaactgtgattggcgtatcttttgctagaagtattattcaacatggcagtctaaagcaacagtgttgcaagtttgcaactggcgacaccggacttgcgttcacctcagccctcggtcatggaacgaaccttgcgtgcccctgcaacaataataataattcaaaagcaagaaacaaagaaatgattagtagttccgcaaaatgttaaaaggaagagcattacattacatgtaaatttgtaacatgtaacccaagattgacaacactaggcaagggcgagaaacgattacgaccacgaatgaactctcaaaacattactgaagaagtacaacattatgtttggaaccaattcctaaataggactggccaattttgagaaagaaaaaaataatggtcccgccaaatttcattctttcatgtataactttaacatctgagaagcaagataaagtacagacacaacattttatctggcatcacaaaggaaaaagtgtgtaacaaccaacctccggaaacatagttaggctgtctccaacaactatcctatattatcctctatttcaaacttcactttgcaaatagagtgcaaatcctctattttacacaatctgctgcggacaaccttacacatcatcaaacttatacaatacattagcatttaacttagaccatgttataaaaaaatgtattatatattcagtatgaagtttgaaataggggatagtataggatagctgttgaagacatgttccatggagacttaacaaaactaattgatgttttaatgctggtgcattcttgtgtgatcgaggttagagaagtttgactcagtaaaacattcattctaatggaaggagtgatttgagtcaaacctaacaaactccaggctcataaaacacggccacacaagagccccataacctaacagtcctaggtaaatacttctataatttcaagtgaactaggttgccaatatcggtcaaacatagaagaatgcattcctctaattcaagagttgcgacaacaatgtagtatggggtataagcacaatttacttgttccgttgaaatggcattcaaaattctcttgtttaccattacatgaaaaatactcactccgtttcaaaatattagtcgttttaacattttgatagattcatacaatatttaatatatgtatcttatatatgtctacatacattgacatccatttgaatatagacataaaatttaagggctacaacgactaatattttagaacgtagggagtagtaaatatatcatgagacataagcacattaaatcattttacatgtaaaacttcggtaaaatgctaatttggaaaaggctattcaaaagatcattccatgtccaaaacaatagtaaaccagagagagtataaatgaatcataggtaaacagtttatctctttattagcccaaacaccaatagctagatatttctgttagagtactcgtttagggtttagggttagccccttataattacagttatacccctgtgtaataggccaagcccaacaacctgagcctgttaatacatctcccaaccctgagttagggtttccattctccaacttggtacaagagctaggtctagat

SEQ ID NO: 76643 - DNA, 4221 bp, Zea Mays
tatatacatgatacatcacattttaatgtaacccctttttggtactggtagcgcttagcaggtgcatcaaaaacataaagattaagtattatactgccaaatagaaaagaaacaaatagaacacaactcactggagccttgtgtgataatacattacattcaaaggtgttatttgtgtgaactgcaacttgcgttaccacttaaaaagcacctgtaactaagccaaattaaatgattgtccgataatgctttccctccaatttctagccatgatgcaaacaagtttgtcgcatttcaatgtaactatattctttgttgcctaaaatttcaaaatcactggggcatatttgaaggcaatgttacaacgactgacaagctatacagtcaataaatttgcacaatcaagcatacaagatccaaaaagatctgactggtgtactaacagaagcattcgtcagtgctagctcttagcaagaaggtgcatcaaagctgtagagattgcagtgttgtactgcccataaaaaaatagaacagaactctattacctagagtttccaattcacaagggtacatttccaggtttgatacaacaccaaaaaaaggcatgattaccacataagcctcaggcattgacatttccaaaaatacatgcttagacaaccatgattatatcaataaaaagaacaaagatggatcttagccaaataggttgtgtctcatttgaaagctcccaatcccaatacttctcaacaacagttttggtctttttcttaggctacatacagagagacactaactcaaccagtaacaaagggctacataattttgtccctggtaaagcaatgcaaaaccaagaatcgcagctacttataagctcatgctgcagctgggagaatatcaacaaaataagaaagtttgggatctttatgtaccttagaaatgacaattacaagagtagctagttgccagttgagatcctagttgagcaatttgatgatcaatcccaccaggatcgatgttgtcaataaatcttacctagaaatcaagcatgataaatgtttaggactatatcttggaaatgtcaaggcatattaaatacaaaagatagacaaatgcatttctgtgcattcctaggattttgacttaggggcataccttcagtggagggttatcaggtgcaagtggtttagcaacaaattgagggcccaaagcagaccctctgattcctacggagagaattgaagtgacatgtccagatggaaaagcaaccatagcatactaaagatggaaaagtacattcttaccatttctccagccgacagttaggttgacaactgtggttaaaaaagcgagaagcgtgttctgtaaaagctgcatcaattacaaagtccttgctgactttacacatgtagaaattctaatctctatgttgtctcatatgctgaagcctatctttacatattgcatcatctgtaactgaagagagatgttaacggtaaaatacgaaatatgatgtggattataataaacaatgacattaaaaaggaaatataacttgatcacaaatctagccttgtcattaatacaattttttcatgtaaaccaactacgtaaagcataccatttcaattgtgcacacgtggataagacataacttttacttctaacatatgacagctctccggtcttgtttaggaaatgaggaaatattcaatgttttactacctccattcgaaattgtaaatatattatatatatctaggtgcataacaagatctgtgtatctaaaacaatttataatttggaaggtatggagtagaatattaaagaaaatatttcagtaatcaacctgtaccatcagaaaatcccaggagttaggagaaactcgatagcaaacagattgcaagagccacataaaggaaaacttagtatgtaagacagttttggtactataaaaggaacctcaatacaatatatcctaaaaagtcattcataagtttgaaagacataagatagtcataatatgcaaaaaacacattagagaaagaattcattggatattacatatattatcttctgtaaccactgcttaaggcaaaagctgaacttcaacatggttggtggttaacttaaatgatgaatccaagtttttttatgtaccttacaatgtatacaaaaaataagatgattaaggaacaacaccacttaagaagaaaacattattaagtctgaacaaccacctacacttcctatatatccaaacttgtgtgtttcatgtgaaagaaaaagtcacataaatggtcctaatgttaagtacatgcaagcaaatgtagtagctaacaaaaggaaaacctgaagatccctaggaacttcaactaactctatcacaaaatcatctttcccaaaggtttgcagcgcaacatgccccatccacattaatgtgtatacgaaattagaccattaggtagttacttggtagtccaaataattgggtgtgccaaacccaaaaaaaatctgggccaaataatgaaaacaatgaattgaactgactctcgtgttaagcaagaacgatagttaaataaagggacacttctgctaataaaggtacagtataagtactttgcgaatatcaataagccaagtcctttggatggcccaactgtaagacaataataagattcacatacaatataaccatcaatagggtcagaaagaggggaagcacatatagcacttcacatgagacatcaattgtagacaccagaacaaaattgcagctctatcattgcagggatgtgaagcaaatcatcgaataaattataagaaatagcataacaatgtctgccagaatggaaatcttggtctaaaaaatggcactatcagaccaattaaactaccagaaatgctatagctttaaccctatacaacgtggatatttttgggacaggtcagttcgtagtcataggcttttcttgacatcccaaaccctgcatatttaggtattgacatcccaaaacctgcatattcagcttttaatcatacctaagtaaatggatccttaatgtcagcacgttgaatatatgcaaaaatcagatgtgcaatagatgtggaactatcctgttgcagaatataagtatcaaacaacgactaactgggtcaatcaaacagacatcaacatatggtttatagcctgggactccctccatatagaactttagtaaggaaagaaaccaaagagtgcaaaccttgtaagttgttgacagaccactaccaaagacgcctagatgcttgttggaccgagggttctctgattgaagaagcaaacaatttaaaatacgttaactttggaatacacaatcaacatcgccaacaattagtgattttgacaacaaaaacacaaggctgttttaaattgctaatctgctatcattttctaagacaatagaatctacaaatagcacacattatcctactgcttaactcacagggtagcacgacaattgagcagagggtggcatggttcaatgctctgccgaggaggtggtggcatacctgtgcgaggggccacggtaacgccaaggcccaggaggaggtgacaggcactggagtcgagggcaagacagtgcacccggactgaggtggtggagcgcctaaaccttgaaggaggtgatggagggacagctgcaggaggccgacgatgacctgattgggggtaggcataccgtccgaggaagggcgtcgtcagctcccatcgcgtgcttccaccgctgtgcgtcgttggctgacatggtgtgggccgccttcgtcgcctaaagccgtctcacgccgctctcgttggtcgtcggtcatggcggaggcagatccgggtgtgatggcgacagatacggagaagggctggctcgacgacggaggaggcgagcgaggcgatggtgaagaagagagggcgacggtgttgagggcatcacgcgtaggggagaaggaagaagcagggccgacggtgggggtaaggagcctgccggagactggggacggacgcgggcgaggaggagagggcggagaaggaggcggtggtggaaggggaggtccaggcgatgagggccacggacgcaagcgtcggattccgtcgaattcaataaaaatttcgggtccgggagccgcttccacgcgtcgacaagacgtggacccgagtacgcgcgaagtgcgggcaggcgctgaaaccgg

SEQ ID NO: 76644 - DNA, 693 bp, Zea Mays
tggcgctgtctccactggaacttgtggcagcccaagccgtaggactggtattcttgaaaagggcggaagctgctgcaaggagtcagtccatcggttttcccctgcttttcgtcatctacgtggcagttgttggcattttgctcggttaccttctacacctatgaggacggtgaattttagaagaagcacctgcgccattgctgatctctcttggagtcgctgagttcctgaacctgggttactttgtcagagtgaacctactgtcacgtcatgattgtcacattagtcagatgaacttgcatacatcttaggaccgggggtgataattactggagtatatagaaatagagcagcttaattttttacttggtataagaatagagtagtggttgatatatgctttgatcgagaaggccctgtaaccaggagatcatatccttgatacttctcctttcatgacaaggaacctccccttgtccttgtcacaatacgaacagaaactataaagagtttgttgaccttgtcaattaggttagagatcggttgttgattagcataaaatcttcccgaagatgctactatggcagtacaggttcgggattgtctaaatatgtacctcaaaaatcggctggcctgttgccggccgatgaagttcacgggtggctaataaatgaagcccaccgaacgaggatt

SEQ ID NO: 76645 - DNA, 1689 bp, Zea Mays
aaacaaaatcctacagttttatccaacgagaacaaactactttgtgttgagagtggactaattaaacggaaactgctaaggtgttccgtgcttggttggtaacagactacaatctgcctttcaaagttgaggtgaagaagcagagttcatgttgtatccatcttgttaataagtcagatcaatatatcgcattcaaggttaaaacaacttctccaaaaaaatattgtgttcgaccaaatataggagttattcttccattggcatcacgtgattttacagttactatgcaagcgctaaagaatgttccacctgatttgcaaacaaaagacaagtttcttgtgcagaccacagttgttccatttggtacagctgacgaggacatcgttcctgcttttttctccaaagaaactgatcaatatattgaggagaagaagttgaaagttgtcactgtcagagtatcagagcctcaagtagagaagctcatcaatggagttccccatgccaaggaaacagctggagttactgtggcagagcagacactagatagtgtgaatgaagcacctaatgtggtgaatgaagttcgtcattctctgaaagcaagctttccgtctttaagtggaactcctgctactttcaatgaaaactcctcatctgtaaacgaatgccctactatcctgcaagaatttctagtcccatccaaacaagcttcatttgcattgtcagaatctgcttccaatttgcaagaatcctctgttgcctctatagaaactctgttttcttcaacagaagcaagtgtagacctgaaagaatctccaccgctggaatatactcctgctccaagtgaagttccatcattaagtgataaagaatctaccaatgctgataatgtttatatacctcaggtaaccaaagattttcaaaatttacagatgaaacttaacaatcttgaagtaaaacttgatgaggctaaaactttgattgtaaaattgagggaagcaaacagaactaccatcctagagcgggataaattgcagaaagagatggtattcttgaaaagggcggaagctgctgcaaggagtcagtccatcggttttcccctgcttttcgtcatctacgtggcagttgttggcattttgctcggttaccttctacacctatgaggacggtgaattttagaagaagcacctgcgccattgctgatctctcttggagtcgctgagttcctgaacctgggttactttgtcagagtgaacctactgtcacgtcatgattgtcacattagtcagatgaacttgcatacatcttaggaccgggggtgataattactggagtatatagaaatagagcagcttaattttttacttggtataagaatagagtagtggttgatatatgctttgatcgagaaggccctgtaaccaggagatcatatccttgatacttctcctttcatgacaaggaacctccccttgtccttgtcacaatacgaacagaaactataaagagtttgttgaccttgtcaattaggttagagatcggttgttgattagcataaaatcttcccgaagatgctactatggcagtacaggttcgggattgtctaaatatgtacctcaaaaatcggctggcctgttgccggccgatgaagttcacgggtggctaataaatgaagcccaccgaacgaggatt

SEQ ID NO: 76646 - DNA, 1843 bp, Zea Mays
tggacatcgatcacgttgccatctcactagcctacatttcggcggccgccgaaggcccgaaaccgtcgggcgtctcagggaggcgctgacgggggactcggagttgaggcgccggagtggcggcatccccctccagtcccagtccactactttctctgttcctttccgagacaggcacgcacgacacgcgctcgcacgcagagcaactgcttcgatctctccgtgtccgtcctctactctctagctaaccgcggtcggcccggggaggtggcgatgggcagcgaggacatgctcgtcgagatccacccccgcgagctccgctttctcgttgaggtgaagaagcagagttcatgttgtatccatcttgttaataagtcagatcaatatatcgcattcaaggttaaaacaacttctccaaaaaaatattgtgttcgaccaaatataggagttattcttccattggcatcacgtgattttacagacaagtttcttgtgcagaccacagttgttccatttggtacagctgacgaggacatcgttcctgcttttttctccaaagaaactgatcaatatattgaggagaagaagttgaaagttgtcactgtcagagtatcagagcctcaagtagagaagctcatcaatggagttccccatgccaaggaaacagctggagttactgtggcagagcagacactagatagtgtgaatgaagcacctaatgtggtgaatgaagttcgtcattctctgaaagcaagctttccgtctttaagtggaactcctgctactttcaatgaaaactcctcatctgtaaacgaatgccctactatcctgcaagaatttctagtcccatccaaacaagcttcatttgcattgtcagaatctgcttccaatttgcaagaatcctctgttgcctctatagaaactctgttttcttcaacagaagcaagtgtagacctgaaagaatctccaccgctggaatatactcctgctccaagtgaagttccatcattaagtgataaagaatctaccaatgctgataatgtttatatacctcaggtaaccaaagattttcaaaatttacagatgaaacttaacaatcttgaagtaaaacttgatgaggctaaaactttgattgtaaaattgagggaagcaaacagaactaccatcctagagcgggataaattgcagaaagagatggtattcttgaaaagggcggaagctgctgcaaggagtcagtccatcggttttcccctgcttttcgtcatctacgtggcagttgttggcattttgctcggttaccttctacacctatgaggacggtgaattttagaagaagcacctgcgccattgctgatctctcttggagtcgctgagttcctgaacctgggttactttgtcagagtgaacctactgtcacgtcatgattgtcacattagtcagatgaacttgcatacatcttaggaccgggggtgataattactggagtatatagaaatagagcagcttaattttttacttggtataagaatagagtagtggttgatatatgctttgatcgagaaggccctgtaaccaggagatcatatccttgatacttctcctttcatgacaaggaacctccccttgtccttgtcacaatacgaacagaaactataaagagtttgttgaccttgtcaattaggttagagatcggttgttgattagcataaaatcttcccgaagatgctactatggcagtacaggttcgggattgtctaaatatgtacctcaaaaatcggctggcctgttgccggccgatgaagttcacgggtggctaataaatgaagcccaccgaacgaggatt

SEQ ID NO: 76647 - DNA, 1917 bp, Zea Mays
cagcaggacaggccaaccatacaacacaaccttcttccccatctgcttcaagccccatggccgccgtggctttgagcttgggcagtggcagcggtggtaggaggagacggtcgtgccgagcggcgcgcaggggggacggaggaggggcaggggcaggggcaggctgccgccatttccacgtccactaccagtaccacatccctcgccaggcagtgtgggcatcctcgcctcctgctgttgcccccgtacggtacctgctgatccttccggtgattttcttggcggcgcttgcctttctcgtgtgcttcggctggctcaccctggtctaccttgcgtcgtcgtcgctgtggagccgtagcgtggaccgcgccggcgacgccagtggattcgccggagaagacgaacgggaggagagacctgtgatgcctgtgacggacacggagcatgctgctggtcgttctggcgtctcaggagtttgtgctggtgaagggaagacggagataggagaggctggagatggaatctctgaggaacgtcggtacgtatcaaccatggtttcaacaggaatctgtttcagcgatgacgagcgagccagtgatgagaagattgtcaaggaagtgatggtgtttgagccgtgtaaagctaaagcatttgccgagctggatggttcttcggaggaggaggagcaccagctgctgctaatggacattccaatagattgttttcttgaagaggttatcaacaccaggcagttcagcatctcactcagtaacgcaaccaaattacttgacgcgctgtcagttggtgaagtaattgctgcagatacgaaggaagtctcagatttgagttcaacagagatctggaaattcgttgacaggcatgatactgcagcagaaaaaataccagttcacggtgctggggctgattttgtgattccggaggcaacgtattccgctgattcaacccttcatggccttgaagatgagtatgagagtgagatcaaacaagaacagagcctagcagaactatcagctgacactgttcctggaaatgtcaccgacgaatggcaagaaacacaaacttcggttactgagcataacaacaagcaggctgaacctgaagcagcctccagtgaaggatacagaaagcaggtcgttggtgtttcagacgaatctcatgattccgtacgtgaaaatatatctgaaaacgaagcggcttcaaacgctccgttccatcaaacaaacagcgatgaagatactgaactccaagaaggccttttcccgaacaagcgagcggaggcgtcaacgtctgcgtctgctgtctgcgattttgccgacaaccattggcgaacagcagaagaacttgctggctctgcggatgaaggaaacgttcacggagaggggaggacttcagtccttgaaacggcacaagacggggatgaggacagagacaatcatgtctccatgggggcgccacgcccacgcccacgcaggttgccgctcgttcggaggtccccagcaccgtggtggagcttttgtggagttcttgatgcgtttgcaggcggtgaagactgacaagatttccagatgtcgtcagtccacacgggagtattaggccttctaaaatttcaaaaaaaaaacctaatgctcaccccattctgctacccacaatgtacctcagggcctgaggttttatccacaatgtgcagtggctttgaccatttgttttttctctctctctcattactttccttcattttagaagctttggacttccaactatagggtgttgctccaaacaaggattgggttttgccatttgtgcttgtgtgttgaccactggaaaagaattggattgatgtttacgctgaagccacaaaaataataatacattgtgtatacattcttttgttttgac

SEQ ID NO: 76648 - DNA, 1929 bp, Zea Mays
cagcaggacaggccaaccatacaacacaaccttcttccccatctgcttcaagccccatggccgccgtggctttgagcttgggcagtggcagcggtggtaggaggagacggtcgtgccgagcggcgcgcaggggggacggaggaggggcaggggcaggggcaggctgccgccatttccacgtccactaccagtaccacatccctcgccaggcagtgtgggcatcctcgcctcctgctgttgcccccgtacggtacctgctgatccttccggtgattttcttggcggcgcttgcctttctcgtgtgcttcggctggctcaccctggtctaccttgcgtcgtcgtcgctgtggagccgtagcgtggaccgcgccggcgacgccagtggattcgccggagaagacgaacgggaggagagacctgtgatgcctgtgacggacacggagcatgctgctggtcgttctggcgtctcaggagtttgtgctggtgaagggaagacggagataggagaggctggagatggaatctctgaggaacgtcggtacgtatcaaccatggtttcaacaggaatctgtttcagcgatgacgagcgagccagtgatgagaagattgtcaaggaagtgatggtgtttgagccgtgtaaagctaaagcatttgccgagctggatggttcttcggaggaggaggagcaccagctgctgctaatggacattccaatagattgttttcttgaagaggttatcaacaccaggcagttcagcatctcactcagtaacgcaaccaaattacttgacgcgctgtcagttggtgaagtaattgctgcagatacgaaggaagtctcagatttgagttcaacagagatctggaaattcgttgacaggcatgatactgcagcagaaaaaataccagttcacggtgctggggctgattttgtgattccggaggcaacgtattccgctgattcaacccttcatggccttgaagatgagtatgagagtgagatcaaacaagaacagagcctagcagaactatcagctgacactgttcctggaaatgtcaccgacgaatggcaagaaacacaaacttcggttactgagcataacaacaagcaggctgaacctgaagcagcctccagtgaaggatacagaaagcaggtcgttggtgtttcagacgaatctcatgattccgtacgtgaaaatatatctgaaaacgaagcggcttcaaacgctccgttccatcaaacaaacagcgatgaagatactgaactccaagaaggccttttcccgaacaagcgagcggaggcgtcaacgtctgcgtctgctgtctgcgattttgccgacaaccattggcgaacagcagaagaacttgctggctctgcggatgaaggaaacgttcacggagaggggaggacttcagtccttgaaacggcacaagacggggatgaggacagagacaatcatgtctccatggttgccgctcgttcggaggtccccagcaccgtggtggagcttttgtggagttcttgatgcgtttgcaggcggtgaagactgacaaggactcatcctaatctggtatcagcttttgtttacacagatttccagatgtcgtcagtccacacgggagtattaggccttctaaaatttcaaaaaaaaaacctaatgctcaccccattctgctacccacaatgtacctcagggcctgaggttttatccacaatgtgcagtggctttgaccatttgttttttctctctctctcattactttccttcattttagaagctttggacttccaactatagggtgttgctccaaacaaggattgggttttgccatttgtgcttgtgtgttgaccactggaaaagaattggattgatgtttacgctgaagccacaaaaataataatacattgtgtatacattcttttgttttgac

SEQ ID NO: 76649 - DNA, 1917 bp, Zea Mays
atgcattgaccgctccaagccacaaagaatccaccccctcgaagcctccgtcctcgccagtccaatctccaacgtcggaactccgaagaaccacccccaaattacgcagtagcccgtacgaatctccgctcgccatggacgccgtggcctcatcccggaacaccgttgcactggcggcgcccgcggcggtgccgctggaggctcatgcccaaaaccctagcattgccatcgctaacccgccgtcgccggagatggaggctacagcggaggcgctcacgcaggaggaggtccttcgccggcgccggcgccgcgcggcccggctagctggtgtgtaccgccggctctactgggccatggccgaggaggtgcgcgcgcggcaccggcagtacgtctgggatctcgcccggagcccactggaggcagagcagccgccggcgcctcctgggggtcccgtcccggcggcggttggggagccgccgaagccggcaccggtgccgaggaggaagaagtgcgggttcacagggtgcaaggtgcgggccatggccacaacccgcttctgccactctcacatcctctccgatcccaaacagatgctgtacaagccctgcgcgtccatcatcaaaagtgggccacagggtgggcttgtcacctgtggtagaccgatcataaagtctgcagctccctccttatgtaatatgcacttgcaaaaatgccagaaaaacattgcagcggcttataggaaggttggctttaacccatcccttacaggcaaagtcaccccaaagtttagtgttttggttgctgaatgtgttcgtcagatccaagacaaaaggagaaaatcactgaaagctacagcacaatagaaatgtcctaaagacggaaatgttgattgaatcatacttgatctacatgtgtgtgcataaacttcatgggaatattattctgaggtttatccaaaacagtgataacggcaggttagtacagtcagtcctgctcctactggaatgatatgaataatggaaacttgcatcatacgcattagttgaagattgaagtgtcattggaagaatggatgtcgggaataattgttaacagcatatttgaaatgaaaaattgaatggacaacatcatgggagaatcaagtatctgtgagagcctgcagcatacagttatagaatcctacttacatgggcagcagcatgttctattgtttatcgggcagtctttatcttgggctttgtgagttgctgaagatgcagcaagactgcatggttgatatgatggtgtgttgaacatcatcagcttgctggcagtattatacagcctgcatgaaactggtgattgccagcatgaaatacctacctacatgggctcgaatgaaaaacttgaccactcctagaatgtcaccgttcacatattgatttggattccattttggtgttacacagatccgaattgcaacctgtattgcatttattggtagctcggtgtggaaaatgtgcatattctggaggaagcaaaattatttcttgccaaattgagattcagtacagttacctgtaagagctcaggtctgataaaggctaaggcgacaaacagaagattatttttcctgataccacagttgacagttttgctattacctgttagatgttccaatatgtaaatcagtaaatagcacttgagcttacttcttgtttatcttatcctcagatttgtattccttctttcttactattacattcagtttatgcgtattgttaatgtatacattttagtttccggtcctggtttttgtcagtgacagctatttaggctactgagaaaatgttcctttgtagtgtcttacttttatcttgcaacttattcttcgtccactgaaatattatatttcttagatctggggcacttgtcggc

SEQ ID NO: 76650 - DNA, 1490 bp, Zea Mays
attcaagtctccccacaggcactgccattataaatcattgatgatatgaatgtgtattgaacgaaataaaaaatatatagggtccactttatgaatttaccgcaatccacaacgatccatgcagttaaatactagcgactcacatatcaaacgttcccaacccccatggactcccaagtttttagcaaaatcaagcccggaccaaaccagaccgaacacctgagactcctccaactcggcccgggcccaaatgatagcaatcgtattccatggctaaagggcaccaaacttccactggacgcggacagacaaactagttcagcaccaggcgaatctgcgtgcaagtgcaaccacaccaactactcagctggggctgtgtcggctttggtttcagtcactttgccagaatcagtggactcagacttgccacttccctcagatttgccctcgctcacagtgagcttcgccagcaatccagccgtggaaccaccatcttcaccttccttgccctcgttctttgtaagcgactcagctatctcctcaaccaactccttgaacttcttgcagtttttggatttggttggaagcttcccaggcagcaatgtcaaccccaggccaccaaaattggatgcctgggctcaaacaaaaaaggcccttgaaattttattttagaacactgagattatgaagttgaaccatttggtatcagacagatacttcgggcttaacaaccgggtaaacgaggtagaggactcactttctaccgaaccaaacctgatggcaaacatctcctccttaagttcgccatcggcaaagtcagcagcgtgccaaacacacgacttgtcgctgcccgcatgctcctgcatcttcgtggaagggataccgaggtggttcgcgcagatcttaagcgttttagcctggcgcatgactaggcggaccttgccggtctgcttgtgcttgagaagcttgacagcgcccgtgccccgttccttccattggttaccgtctttgtcgaatcggtacagcttcgccttcctgcaaaacccgaatcagcactaaatcgagcgggggcggccaaccgcgcgcagcaatgaacaagtacatggggagggagggcgcctcacatgtcgagcaggacgtcctcgtcctcctcgccggtggtgacggctacctcctcaagccgcacgatgggagccacctgggcgcccgtgtcctcctcctcccccgcggcggcggcggctgaggcgtcctcctcctcctcacccgcctctggccgctccacgacaggctccttgtccgccatgaggtgggtgatcgcggcgcgattcgattcgaacttcgaagaggatgcgacggcggggcaagggaggaattctccggaagctttgggtgcaggcctggctgcgcctgcgtgctagggtttttgtgcgcggaggggagacgtatagccagcgaggataggtcactttcagagagtggggccccatgtg

SEQ ID NO: 76651 - DNA, 3082 bp, Zea Mays
tataaaccctagccgcctcattttcattcctcctctccctcgccggagttgagtttcatttgaataggcgggtgggaaagcatcctaaaccaccctccgctatccccaaccgccccgaaccatagcctcccctccgtgtcgccgtccggatctcgtgggttcgcgtgcagcggggatccgtccaggcttggattgatttcttatctgcgcgccatggatatcactcaggttctgatagctgctcaatctccagatgctaaccttcggaccgtggcagaaggcaacctcacacagttccaggagcagaattttcctaactttctcctctccttatcaatagagctctcgaacgatgaaaaacctccagagtctagaaggcttgctggtattatccttaagaattctttggatgcaaaggattctgcgaaaaaggagctactgactcagcaatgggtaagtgtggatccatctatcaaattgaaaatcaaggagttgttgctggtgacactaggatcttctgtgcatgatgcaagacatacctcttcacaagtcattgccaaggttgcatcaattgagatagcacgtcgagaatggcaagatctcgttgccaaattactggggaacatgacttctgcaggtgcacctgctcctttgaaacaagcaacactagaggcattggggtatgtgtgtgaggagatttctccacaggacttggagcaggaccaagtgaatgctgttctgactgctgttgtccagggaatgaaccagacagagctcagccctgaagttcgtcttgctgcagttaaagccctatataatgctcttgactttgcggagagtaactttgcaaatgaaatggagaggaattatataatgaaggtggtttgtgatactgctgtgtctaaagaagtggagatcagacaggctgcatttgaatgccttgttgcaatagcatccacctattattcacacttagagccttttatggaaaccatattctacctgacagctaatgcagttaaaggtgatgaggaaccggttgcacttcaagctgttgagttctggagcgctatctgtgacgaagagattgcactccaagatgaatatgagggatctgaggatggtaactctgctatacacttccgctttattgaaaaggccctccctttacttgttccgttgctgctagaaactttgttgaagcaagaggaagatcaagatcaagatgataatgcttggaatatttctatgagtggtggaacatgccttggactcatttctagaactgttggtgatgcagttgtccctcttgtgatgccatttgtcgagaccaacatcacaaagcctgattggcattgtcgtgaggcagctacctttgcatttggttctatccttgaaggcccctctgttgggaaacttgctccacttgtccaggctggtcttgatttcttgctcaacacgatgaatgatgcaaatagccaggtaaaagatactactgcttggactcttgggagagtatttgagctcttgcattctccagctggtataaactcaatcataaatggttcaaaccttccccgtatcatgtctgtattgcttgagagtactaaagatgctccaaatgtagccgagaaagtctgtggagctatttattttctcgcccaaggttatgaagatgcagagtcaacgtcttctgtcctcacaccttatctatctaatacgattgctgctcttctttctgccgcagaccgtgctgagaccacccatttcaggcttcgtgcttctgcttatgaagcactgaatgagatcgtgagggtcagcaacatacctgaaacttcaggcatcatagcacaattattgcaggagatcatgagaagattaaaccttacatttgatctccatatactttcttctggtgataaggagaaacaaagcgatctgcaggctttgctatgtggtgttctacaggtcatcatccagaaactgagcagcacagatgcaaagtctataatttctcagaccactgatcagctgatggtgctttttctgcgtgtctttgcctgccacaattctactgttcatgaagaagcaatgcttgcaattggtgctcttgcatatgctactggtccagattttgtgaaatacatgcctaacttctttacatacctggaggctggtttgcagaattatgaagagtaccaagtgtgttccatctctgttggagtggttggtgatatttgtcgtgccttagaagataaaagtttgcctttctgtgatcgcattatgacggttcttcttaaggacctatcaagctctatgctcaatcgatctgtgaagcctctgattttctcgtgctttggagacattgctcttgctattggtgagaattttgagaaatacctaccttatgccgtgccgatgcttcaaggagctgcaggactccttggtacacttgacctgagtgatgatgatatggttgattatggcaaccagctcagacgtggcatttttgaggcatactctggtatactccagggcatcaagggcccaaaagctcagctgatgatcccatatgcaacccatctactacagttcactgaagctgtctccaaagataggagcagggatgacagtgtgacaaaggctgcagttgctgtccttggggatctcgcggacacgcttggccaaagctcaaaggatctgttcaagacccacctattccatgttgagttcttgagggaatgtcaagctcaagagttggatgatgaagttcgggagactgcacaatgggcccaggggatgataaaccaggcggtggtctcttaatgcgggatgattttggtttgttagttacgggtggtttcttctgtggtggtgccaagttcatttgccacagatgaacgaaaggataccaatatatatgtagcgtcagtcttaggatcctggttggtctgtcaagccggtgtgggtcacattggaccgggtggtttctgtccatgaatgtcttgaacagcaaaaattggttcatttatcatgatattttttaatgctggggatgtgtttgcctccaaatttccattta

SEQ ID NO: 76652 - DNA, 3107 bp, Zea Mays
caagcaggccgcccgcctcccacctcctataaaccctagccgcctcattttcattcctcctctccctcgccggagttgagtttcatttgaataggcgggtgggaaagcatcctaaaccaccctccgctatccccaaccgccccgaaccatagcctcccctccgtgtcgccgtccggatctcgtgggttcgcgtgcagcggggatccgtccaggcttggattgatttcttatctgcgcggatacagccatggatatcactcaggttctgatagctgctcaatctccagatgctaaccttcggaccgtggcagaaggcaacctcacacagttccaggagcagaattttcctaactttctcctctccttatcaatagagctctcgaacgatgaaaaacctccagagtctagaaggcttgctggtattatccttaagaattctttggatgcaaaggattctgcgaaaaaggagctactgactcagcaatgggtaagtgtggatccatctatcaaattgaaaatcaaggagttgttgctggtgacactaggatcttctgtgcatgatgcaagacatacctcttcacaagtcattgccaaggttgcatcaattgagatagcacgtcgagaatggcaagatctcgttgccaaattactggggaacatgacttctgcaggtgcacctgctcctttgaaacaagcaacactagaggcattggggtatgtgtgtgaggagatttctccacaggacttggagcaggaccaagtgaatgctgttctgactgctgttgtccagggaatgaaccagacagagctcagccctgaagttcgtcttgctgcagttaaagccctatataatgctcttgactttgcggagagtaactttgcaaatgaaatggagaggaattatataatgaaggtggtttgtgatactgctgtgtctaaagaagtggagatcagacaggctgcatttgaatgccttgttgcaatagcatccacctattattcacacttagagccttttatggaaaccatattctacctgacagctaatgcagttaaaggtgatgaggaaccggttgcacttcaagctgttgagttctggagcgctatctgtgacgaagagattgcactccaagatgaatatgagggatctgaggatggtaactctgctatacacttccgctttattgaaaaggccctccctttacttgttccgttgctgctagaaactttgttgaagcaagaggaagatcaagatcaagatgataatgcttggaatatttctatgagtggtggaacatgccttggactcatttctagaactgttggtgatgcagttgtccctcttgtgatgccatttgtcgagaccaacatcacaaagcctgattggcattgtcgtgaggcagctacctttgcatttggttctatccttgaaggcccctctgttgggaaacttgctccacttgtccaggctggtcttgatttcttgctcaacacgatgaatgatgcaaatagccaggtaaaagatactactgcttggactcttgggagagtatttgagctcttgcattctccagctggtataaactcaatcataaatggttcaaaccttccccgtatcatgtctgtattgcttgagagtactaaagatgctccaaatgtagccgagaaagtctgtggagctatttattttctcgcccaaggttatgaagatgcagagtcaacgtcttctgtcctcacaccttatctatctaatacgattgctgctcttctttctgccgcagaccgtgctgagaccacccatttcaggcttcgtgcttctgcttatgaagcactgaatgagatcgtgagggtcagcaacatacctgaaacttcaggcatcatagcacaattattgcaggagatcatgagaagattaaaccttacatttgatctccatatactttcttctggtgataaggagaaacaaagcgatctgcaggctttgctatgtggtgttctacaggtcatcatccagaaactgagcagcacagatgcaaagtctataatttctcagaccactgatcagctgatggtgctttttctgcgtgtctttgcctgccacaattctactgttcatgaagaagcaatgcttgcaattggtgctcttgcatatgctactggtccagattttgtgaaatacatgcctaacttctttacatacctggaggctggtttgcagaattatgaagagtaccaagtgtgttccatctctgttggagtggttggtgatatttgtcgtgccttagaagataaaagtttgcctttctgtgatcgcattatgacggttcttcttaaggacctatcaagctctatgctcaatcgatctgtgaagcctctgattttctcgtgctttggagacattgctcttgctattggtgagaattttgagaaatacctaccttatgccgtgccgatgcttcaaggagctgcaggactccttggtacacttgacctgagtgatgatgatatggttgattatggcaaccagctcagacgtggcatttttgaggcatactctggtatactccagggcatcaagggcccaaaagctcagctgatgatcccatatgcaacccatctactacagttcactgaagctgtctccaaagataggagcagtgtgacaaaggctgcagttgctgtccttggggatctcgcggacacgcttggccaaagctcaaaggatctgttcaagacccacctattccatgttgagttcttgagggaatgtcaagctcaagagttggatgatgaagttcgggagactgcacaatgggcccaggggatgataaaccaggcggtggtctcttaatgcgggatgattttggtttgttagttacgggtggtttcttctgtggtggtgccaagttcatttgccacagatgaacgaaaggataccaatatatatgtagcgtcagtcttaggatcctggttggtctgtcaagccggtgtgggtcacattggaccgggtggtttctgtccatgaatgtcttgaacagcaaaaattggttcatttatcatgatattttttaatgctggggatgtgtttgcctccaaatttccattta

SEQ ID NO: 76653 - DNA, 933 bp, Zea Mays
gttatttgtttcatcatcctatctttctataatgtgatctctaatattctattggcttttcttccattagcttgccttttttaccagatctgttgcaataaaataacatgcgagtcaatatcataaatatacatacatagtatccagagaacatacagtaacgatatgcatataccaaatttatttctaagaaagtcccacaacaatgtgcgggctattcttttagttaatacttaaaagtacttgataatctgatgggtctgacagaaacgttgggtttagttttcacttagactagttaaacaactcaaataagtcctttgcttccactagtttagtatctcaatttacaaatgcagccacaaccaatttaataatgcttgtgcataagaaaaatatgcctttcgcaatcagctttaaactttttattacctgaagcatcacatgaattcagcctaaaaaaatagaaatcaaaataataaaggaaaataaaatcgacaaattgggtgacaaagaactaaccatgtatccacgtaataaggcttcagctggcagaaattgcgttcaaacgcatcttggtcctcaaatttcatactcaaaacaacagcatgctcataaatgtcccctgaaatgttttgggctgagttcaaaacttgctctgttgaaggaatggtaactaaaagaacagcataacagttcaaggacctcttgatcttttctgctactaaatcactagatagcttagtcataaggacgaaaacttaagttaagaacagtttactgcatatctgcgactctgcgtgcaagaatagaaatgaaacaaagcatcaaaaaatagcatcaaatgcgacatccattatcgtgctcatcgttatccatgttagcaatgtgcatagtcaagaatgcattttttcatatactagagcacttagg

SEQ ID NO: 76654 - DNA, 1602 bp, Zea Mays
cgggagcaagtagagggattcgcgagcctacaccgtatctctgcgagactcccaagatggataagctcagtggttctgcacgtcttatgattgtttcagatcttgaccatacaatggttgatcatcatgacgaggagaacctgtccttgcttaggtttggtgccctgtgggaatctgtttactgtgaggattctctactagtcttctcgactggaagatcaccaactctttacaaggaattaaggaaagagaagcctatgctaactccagacatcactatcatgtctgttggcactgagataacatatggggaggcaatggttcctgatgatggctgggaagaatatctgaacaataagtgggacaggaatattgttgtagcagaaactgtgagcttttctgagctgaagcttcagccagagacagaacagcgcccgcacaaggtcagcttttttgttgataagaagaatgcccaggaagtgataaaatctgttgccgagagattggacaaatgtgggatgccaaaataatatatagtggtggccaggaccttgatatattacctcaaggagctggaaagggccaagcacttgcatatttgcttaaaaagctaagctcatgtggaaaaccgcccaacaatactcttgtttgtggtgactctggtaatgatgcagaattattcagcatccctggtgtacatggtgtcatggtcagcaatgcccaagaggaactacttcagtggtacacagaaaatgcgaaggataacccaaagataattcattcaaatgagagatgtgcagctggtattatacaagctattggacacttcaagctaggacctaacatttctcctagagacctgcagtttccttatgcaaaggaagcctctttcaaacctacagatgctgtagtgaagttctacgttctctatgagaagtggcgcagggctgaggttccaaagtctgattcagttataaagtacttcaaaaacatcactcatgcaaatggagttaccatccatcctgctgggcttgaactctcactccatgcatccattgatgcgttgggatcatgttatggtgacaaacaagggagaaagtaccgagcatgggtggacagactttttatcacacagactggttcagatagttgggtggggaggtttgacttgtgggaatcagaaggtgatgtgcgtgcgtgttctctgtcaagtcttgctttgattctgaaggctgaatccccagagggctttgtgctaacccacatccaaaagacatggctgaacggatactcgtcaggggttgagcaggcgtttaagctgtagagcagtataccgtctcggctcgtggttggagttttcttgagaatagaatagaataatgtacctgtttataatattaacttcccaaaaccgcactggaggatcaccagggagaggattcggtgccttctcctatttggcgcgtaagataaatgttttgtctcatggctttcatgagaagatgaaattgactcatcttggtatatatttacaaatcttgaataatgcagcgttatctatatccagggatgtcaacggcaatccagggaaattgggttttt

SEQ ID NO: 76655 - DNA, 1645 bp, Zea Mays
ttgggtcctcgcgcgcgggaggaaaaggaaggtctcgcacgggagcaagtagagggattcgcgagcctacaccgtatctctgcgagactcccaagatggataagctcagtggttctgcacgtcttatgattgtttcagatcttgaccatacaatggttgatcatcatgacgaggagaacctgtccttgcttaggtttggtgccctgtgggaatctgtttactgtgaggattctctactagtcttctcgactggaagatcaccaactctttacaaggaattaaggaaagagaagcctatgctaactccagacatcactatcatgtctgttggcactgagataacatatggggaggcaatggttcctgatgatggctgggaagaatatctgaacaataagtgggacaggaatattgttgtagcagaaactgtgagcttttctgagctgaagcttcagccagagacagaacagcgcccgcacaaggtcagcttttttgttgataagaagaatgcccaggaagtgataaaatctgttgccgagagattggacaaatgtgggctagatgccaaaataatatatagtggtggccaggaccttgatatattacctcaaggagctggaaagggccaagcacttgcatatttgcttaaaaagctaagctcatgtggaaaaccgcccaacaatactcttgtttgtggtgactctggtaatgatgcagaattattcagcatccctggtgtacatggtgtcatggtcagcaatgcccaagaggaactacttcagtggtacacagaaaatgcgaaggataacccaaagataattcattcaaatgagagatgtgcagctggtattatacaagctattggacacttcaagctaggacctaacatttctcctagagacctgcagtttccttatgcaaaggaagcctctttcaaacctacagatgctgtagtgaagttctacgttctctatgagaagtggcgcagggctgaggttccaaagtctgattcagttataaagtacttcaaaaacatcactcatgcaaatggagttaccatccatcctgctgggcttgaactctcactccatgcatccattgatgcgttgggatcatgttatggtgacaaacaagggagaaagtaccgagcatgggtggacagactttttatcacacagactggttcagatagttgggtggggaggtttgacttgtgggaatcagaaggtgatgtgcgtgcgtgttctctgtcaagtcttgctttgattctgaaggctgaatccccagagggctttgtgctaacccacatccaaaagacatggctgaacggatactcgtcaggggttgagcaggcgtttaagctgtagagcagtataccgtctcggctcgtggttggagttttcttgagaatagaatagaataatgtacctgtttataatattaacttcccaaaaccgcactggaggatcaccagggagaggattcggtgccttctcctatttggcgcgtaagataaatgttttgtctcatggctttcatgagaagatgaaattgactcatcttggtatatatttacaaatcttgaataatgcagcgttatctatatccagggatgtcaacggcaatccagggaaattgggttttt

SEQ ID NO: 76656 - DNA, 1656 bp, Zea Mays
gcaccaccgtccatattcccccatcaaactgcgaaccgaaaaaggagaagacggacaacgaattgggatcgaaaaacatctccgttccccaccaccaccttcgctccttctgcttcgcccgtccccctccgtcgcgtcgactcccaagatggataagctcagtggttctgcacgtcttatgattgtttcagatcttgaccatacaatggtttggtgccctgtgggaatctgtttactgtgaggattctctactagtcttctcgactggaagatcaccaactctttacaaggaattaaggaaagagaagcctatgctaactccagacatcactatcatgtctgttggcactgagataacatatggggaggcaatggttcctgatgatggctgggaagaatatctgaacaataagtgggacaggaatattgttgtagcagaaactgtgagcttttctgagctgaagcttcagccagagacagaacagcgcccgcacaaggtcagcttttttgttgataagaagaatgcccaggaagtgataaaatctgttgccgagagattggacaaatgtgggatgccaaaataatatatagtggtggccaggaccttgatatattacctcaaggagctggaaagggccaagcacttgcatatttgcttaaaaagctaagctcatgtggaaaaccgcccaacaatactcttgtttgtggtgactctggtaatgatgcagaattattcagcatccctggtgtacatggtgtcatggtcagcaatgcccaagaggaactacttcagtggtacacagaaaatgcgaaggataacccaaagataattcattcaaatgagagatgtgcagctggtattatacaagctattggacacttcaagctaggacctaacatttctcctagagacctgcagtttccttatgcaaaggaagcctctttcaaacctacagatgctgtagtgaagttctacgttctctatgagaagtggcgcagggctgaggttccaaagtctgattcagttataaagtacttcaaaaacatcactcatgcaaatggagttaccatccatcctgctgggcttgaactctcactccatgcatccattgatgcgttgggatcatgttatggtgacaaacaagggagaaagtaccgagcatgggtggacagactttttatcacacagactggttcagatagttgggtggggaggtttgacttgtgggaatcagaaggtgatgtgcgtgcgtgttctctgtcaagtcttgctttgattctgaaggctgaatccccagagggctttgtgctaacccacatccaaaagacatggctgaacggatactcgtcaggggttgagcaggcgtttaagctgtagagcagtataccgtctcggctcgtggttggagttttcttgagaatagaatagaataatgtacctgtttataatattaacttcccaaaaccgcactggaggatcaccagggagaggattcggtgccttctcctatttggcgcgtaagataaatgttttgtctcatggctttcatgagaagatgaaattgactcatcttggtatatatttacaaatcttgaataatgcagcgttatctatatccagggatgtcaacggcaatccagggaaattgggttttt

SEQ ID NO: 76657 - DNA, 2106 bp, Zea Mays
aacggccaaggtcgccccgtgcccgaatcttctggacgcgccatctcctcaataaaacctcctcggctcctccagtgtccctcgtctctcgcctgagaaaaaaaaaatccacgaaccaatttctcagcaaccagcagcacgacctgtgagggttcgaaggaagtagcagtgttttttgttcctagagggaggaagagatggcaaagggggaggggccggcgatcgggatcgacctgggaacgacgtactcgtgtgtcggcgtgtggcagcacgaccgcgtcgagatcatcgccaacgaccaggggaaccgcaccacgccgtcctacgtcgccttcaccgacaccgagcggctcatcggcgatgccgccaagaaccaggtcgccatgaaccccaccaacaccgtatttgacgcaaagcggttgattggtaggaggttctcggacccttccgttcagagtgatatgaagctatggccattcaaggtcgtggcgggccctggcgacaagccgatgatcgtggttagctacaaggaggcaggccaccaaggatgccggcgtcatctccgggctcaacgtgatgcgtatcatcaacgagcccaccgccgcggccattgcctacgggctcgacaaaaaggccaccagcagcggcgagaagaacgtgctcatcttcgacctcggtggtggcaccttcgatgtgtcgctcttgaccatcgaggagggcatcttcgaggtgaaggccaccgccggtgatacccatctgggtggggaggacttcgacaaccgcatggtcaaccacttcgtccaggagttcaagcgcaagcacaagaaggacatcagcggcaacccgcgcgcgctgcggcgtctgcggacggcctgcgagcgggccaagcgcacgctgtcgtccaccgcgcagaccaccatcgagatcgactcgctgtacgagggcatcgacttctacaccaccatcacccgcgcccggttcgaggagctgaacatggacctcttccgcaagtgcatggagcccgtggagaaatgcctccgcgatgccaagatggacaagagcaccgtgcacgacgtggtgctcgtgggcggctccacgcgcatccccaaggccgccatcctgagcggcgagggcaacgagaaggtgttctccacctactccgacaaccagccgggggtgctgatccaggtgtacgagggagagcgcgccaggaccaaggacaacaacctccttggcaagttcgagctgtccggcatcccgccggcgcctcgcggcgtgccccagatcaccgtgtgcttcgacatcgacgccaacggcattctgaacgtatcagcggaggacaagactacaggacagaaaaacaagatcaccatcaccaacgacaaggggcggctgagcaaggaggagatcgagaagatggtgaaggaggcggagaagtacaaggcggaggacgaggagcataagaagaaggtggacgccaagaactcgctggagaactacgcgtacaacatgcgcaacaccatcaaggacgacaagatcgcctccaagctaggtgcggatgacaagaagcgcatcgagaacgccgtggacggtgccatcagctggctggacagcaaccagctcgcggaggtggacgagttcgaggacaagatgaaggagctggagggcatctgcaaccccatcatcgccaagatgtaccagggcgctggcgcggacatgggtgctgctgccggcatggacgaggacgcaccggccgccggcggcagcgccgctggccccaagatcgaggaggtcgactaagtgcttccacctgtggtcgtgttatcgtggtagaagttgaattgcttctgtttctgtgggaacagtaaactctgagggcctccagctagaggcgcacgaaggatcgttcttttttgcaatttgcttgtcaccatgatcgcgcgggagtaatatgctgtaggcagtccacactgcagagagcatcgcactcggtgctgaggatcaatgttggtgagtaaagctgccctgatggagatagtctggggagccatttttcattaatagcgccataacaagttgcgagaatttgacaggatatgatttttc

SEQ ID NO: 76658 - DNA, 1910 bp, Zea Mays
ttcggctgcttctatcttgcagctcagaaacatgtggtcagtttccctccactccgtcggtttttttttttccttccattatctgcatgagcagataactccaaacgacgggctgagaggtgctgtgacactgcaggcgataaaggtatataagccaaacgcttttgcaaactgggagcctgggatcaccaaatggaccgtgttcttctgagctcccacttgccatctcacgctcatgcaaacacgaggttgcagcagggtcctggtggcctcaacagtataggatttgcagtcataaaaaagggatgcttgaagttaagatgttacgcgatcggcgatgaactcggtggtccagggcgctttatgacgcagagggtgatccagacaaacctaccgatgggttctcctcgatcgaccaggctataggtgctttgcgtgaagggaagatgatgagaacggcgacaacgaaggcgaccttgtgatggcggccactctagtggaccagaagtcagtcgcattcatgatcaggaatggctctgggattatctcggtaggcatggaggaggaggacctgactagactgatgattccgatgatgtcccctatcacagaaatcgaagatatcacggctgctgcttccacggtgacagtggatgccagggttggcatatctacgggtgtgtcggctgcagacagggcgaagaccatcctcactctagcctcctctgactccaagcccagtgatctgaggagaccaggccacatattccccctcaagtaccggaacgggggcgtgctgaagagagctggccacacagaagcgtcggtggatctggttgcgttggcaggtctccgtcctgtgtccgttctctccaccgtcatggaccccagggacggttcgatggcaggcgtaacggttctccagcagatggctatggagcatgacatacccatcgtttcgattgctgatctcatccggtataggagaaagcgggagaagctggtggagctgattgctgtgtctcgcttgccgacgaaatggggcctcttccgagcctactgctaccagtccaggctcgatggaaccgagcacatcgctgttgtgaagggcgatatcggcgacggcgaagaggtcctggtgagggtgcactcggagtgcctgacgggggacatcctcggctcagcccgctgcgactgcggcaaccagctggagctggcgatgcagctgatcgagaaggccggccgtggcgtgctcgtgtacctccgcggccacgagggccgcggcattggcctgggccagaagctccgcgcctacaacctccaggacgagggccacgacaccgtcgaggccaacgtcgagctcggcctcgccgtggacgcccgcgagtacggcatcggcgcccagatactccgtgacatcggcgtgcgcacgatgcggctgatgaccaacaaccccgccaagttcatcgggctcaagggctacgggctcgccgtggtggggagggtgccggtgatctctcccatcaccaaggagaaccagaagtacctcgagaccaagcgcaccaagatgggccacgtctacggctccgatctcccgggaagcctgccggagttcgccaacccacaagaggcccccacagaacaagacgacgacgataaccaaaactgataaaaaaactatacggtgtcgtttttttaggaaaagataccaatataaccacaaattcttgtattccactgagaacgagtattgcagagtatttatttatcaactgcaaaattattaagtataatagagatacaaacttttatcaacgcctcttttacggaggtaaagcatgtttctccctaatatttattagagcctcatgtaagagaagcggatcaagctctcggccaggtactttccg

SEQ ID NO: 76659 - DNA, 2187 bp, Zea Mays
gtgaaaccgtccaaaagatgctatctgcaaaaatatctttcacttgtcgctgtctcgtccagcttacatttcttttgacccatagcagaaggcattggaagcgtggtttctttgtcatcacctgaagtgtgcgatgtgccggattcggctgcttctatcttgcagctcagaaacatgtggtcagtttccctccactccgtcggtttttttttttccttccattatctgcatgagcagataactccaaacgacgggctgagaggtgctgtgacactgcaggcgataaaggtatataagccaaacgcttttgcaaactgggagcctgggatcaccaaatggaccgtgttcttctgagctcccacttgccatctcacgctcatgcaaacacgaggttgcagcagggtcctggtggcctcaacagtataggatttgcagtcataaaaaagggatgcttgaagttaagatgttacgcgatcggcgatgaactcggtggtccagggcgctttagtaagcatttcatcgagaacagtaatggacctgttttccagggactcgatgcgtctgctggttcttttagaactgtcggtgctgaaatcactcaggacactggagatttctttgtcagtgacgcagagggtgatccagacaaacctaccgatgggttctcctcgatcgaccaggctataggtgctttgcgtgaagggaagatgatgagaacggcgacaacgaaggcgaccttgtgatggcggccactctagtggaccagaagtcagtcgcattcatgatcaggaatggctctgggattatctcggtaggcatggaggaggaggacctgactagactgatgattccgatgatgtcccctatcacagaaatcgaagatatcacggctgctgcttccacggtgacagtggatgccagggttggcatatctacgggtgtgtcggctgcagacagggcgaagaccatcctcactctagcctcctctgactccaagcccagtgatctgaggagaccaggccacatattccccctcaagtaccggaacgggggcgtgctgaagagagctggccacacagaagcgtcggtggatctggttgcgttggcaggtctccgtcctgtgtccgttctctccaccgtcatggaccccagggacggttcgatggcaggcgtaacggttctccagcagatggctatggagcatgacatacccatcgtttcgattgctgatctcatccggttagtatatcctaaggtataggagaaagcgggagaagctggtggagctgattgctgtgtctcgcttgccgacgaaatggggcctcttccgagcctactgctaccagtccaggctcgatggaaccgagcacatcgctgttgtgaagggcgatatcggcgacggcgaagaggtcctggtgagggtgcactcggagtgcctgacgggggacatcctcggctcagcccgctgcgactgcggcaaccagctggagctggcgatgcagctgatcgagaaggccggccgtggcgtgctcgtgtacctccgcggccacgagggccgcggcattggcctgggccagaagctccgcgcctacaacctccaggacgagggccacgacaccgtcgaggccaacgtcgagctcggcctcgccgtggacgcccgcgagtacggcatcggcgcccagatactccgtgacatcggcgtgcgcacgatgcggctgatgaccaacaaccccgccaagttcatcgggctcaagggctacgggctcgccgtggtggggagggtgccggtgatctctcccatcaccaaggagaaccagaagtacctcgagaccaagcgcaccaagatgggccacgtctacggctccgatctcccgggaagcctgccggagttcgccaacccacaagaggcccccacagaacaagacgacgacgataaccaaaactgataaaaaaactatacggtgtcgtttttttaggaaaagataccaatataaccacaaattcttgtattccactgagaacgagtattgcagagtatttatttatcaactgcaaaattattaagtataatagagatacaaacttttatcaacgcctcttttacggaggtaaagcatgtttctccctaatatttattagagcctcatgtaagagaagcggatcaagctctcggccaggtactttccg

SEQ ID NO: 76660 - DNA, 2203 bp, Zea Mays
gtgaaaccgtccaaaagatgctatctgcaaaaatatctttcacttgtcgctgtctcgtccagcttacatttcttttgacccatagcagaaggcattggaagcgtggtttctttgtcatcacctgaagtgtgcgatgtgccggattcggctgcttctatcttgcagctcagaaacatgtggtcagtttccctccactccgtcggtttttttttttccttccattatctgcatgagcagataactccaaacgacgggctgagaggtgctgtgacactgcaggcgataaaggtatataagccaaacgcttttgcaaactgggagcctgggatcaccaaatggaccgtgttcttctgagctcccacttgccatctcacgctcatgcaaacacgaggttgcagcagggtcctggtggcctcaacagtataggatttgcagtcataaaaaagggatgcttgaagttaagatgttacgcgatcggcgatgaactcggtggtccagggcgctttagtaagcatttcatcgagaacagtaatggacctgttttccagggactcgatgcgtctgctggttcttttagaactgtcggtgctgaaatcactcaggacactggagatttctttgtcagtgacgcagagggtgatccagacaaacctaccgatgggttctcctcgatcgaccaggctataggtgctttgcgtgaagggaagtttgttattgctgtagatgatgagaacggcgacaacgaaggcgaccttgtgatggcggccactctagtggaccagaagtcagtcgcattcatgatcaggaatggctctgggattatctcggtaggcatggaggaggaggacctgactagactgatgattccgatgatgtcccctatcacagaaatcgaagatatcacggctgctgcttccacggtgacagtggatgccagggttggcatatctacgggtgtgtcggctgcagacagggcgaagaccatcctcactctagcctcctctgactccaagcccagtgatctgaggagaccaggccacatattccccctcaagtaccggaacgggggcgtgctgaagagagctggccacacagaagcgtcggtggatctggttgcgttggcaggtctccgtcctgtgtccgttctctccaccgtcatggaccccagggacggttcgatggcaggcgtaacggttctccagcagatggctatggagcatgacatacccatcgtttcgattgctgatctcatccggttagtatatcctaaggtataggagaaagcgggagaagctggtggagctgattgctgtgtctcgcttgccgacgaaatggggcctcttccgagcctactgctaccagtccaggctcgatggaaccgagcacatcgctgttgtgaagggcgatatcggcgacggcgaagaggtcctggtgagggtgcactcggagtgcctgacgggggacatcctcggctcagcccgctgcgactgcggcaaccagctggagctggcgatgcagctgatcgagaaggccggccgtggcgtgctcgtgtacctccgcggccacgagggccgcggcattggcctgggccagaagctccgcgcctacaacctccaggacgagggccacgacaccgtcgaggccaacgtcgagctcggcctcgccgtggacgcccgcgagtacggcatcggcgcccagatactccgtgacatcggcgtgcgcacgatgcggctgatgaccaacaaccccgccaagttcatcgggctcaagggctacgggctcgccgtggtggggagggtgccggtgatctctcccatcaccaaggagaaccagaagtacctcgagaccaagcgcaccaagatgggccacgtctacggctccgatctcccgggaagcctgccggagttcgccaacccacaagaggcccccacagaacaagacgacgacgataaccaaaactgataaaaaaactatacggtgtcgtttttttaggaaaagataccaatataaccacaaattcttgtattccactgagaacgagtattgcagagtatttatttatcaactgcaaaattattaagtataatagagatacaaacttttatcaacgcctcttttacggaggtaaagcatgtttctccctaatatttattagagcctcatgtaagagaagcggatcaagctctcggccaggtactttccg

SEQ ID NO: 76661 - DNA, 974 bp, Zea Mays
gccggtgctgggcctcggcactcggcagccatggttcgccttgcgaagttctatctcgtctgctacaactccctccaatcgctcggatggttcgtctccctcctccgcctcctgccctgcctcgtccctcccttccctgtccactccgcacatgtgcgatccttgaaacggtccacgctgccatcggattggtgccgaccgcgccacttcttgctttcttgcaatggggagggaggatccacttcatcctggctgttgtccggcaaattcccgaggttcagagcagtccatctgtgttcataacatttatagcttggagcatatctgaggtcatccgttactctcactatgctctgactaccttaaaagtttgtccagcatggctgacttatctcaggtacactgcttttatcccgctgtatccaatcggggttggcccaggagaaatgtggacaatgtaccaagccctcccgtttgtgaagaagagggacctttactcaggtttcttcgagaagttctccatgagctaccgttcctttctagtgggtgtgctggtgctctacccgttcctgtggctgaagctgtaccagcacgtgttcaagcagcgcaagtccaagctggggaaggggagcaggaagaaacgggcctgagaaaatctggctctgctcagctcagctgccacttgttgctgtcatgtgaaacgctaacgggtcattgtggatttttgttttggaagaaaatctttgtgagttgttgtctgatgcgacgggggcagttattggattacgctttgggttctctgtttgtttcaattgctctgcgttttatgtctgtattaacatacatcaagcatatataatagtcatgttgctgctgcgagtctaatcaatcttgcgatcctggttttctcgctcaattgcctacactgaatgaggctgatcacgctgctctgtgcctacagcaggcgattgtca

SEQ ID NO: 76662 - DNA, 1018 bp, Zea Mays
ggcagccggtgctgggcctcggcactcggcagccatggttcgccttgcgaagttctatctcgtctgctacaactccctccaatcgctcggatggtacggtagccaccagcaaccatagaccaccggccggcggaccgttgcttccactactaatgcttcttttttttatctcctgaattcaggtttcctacagacatgtgcgatccttgaaacggtccacgctgccatcggattggtgccgaccgcgccacttcttgctttcttgcaatggggagggaggatccacttcatcctggctgttgtccggcaaattcccgaggttcagagcagtccatctgtgttcataacatttatagcttggagcatatctgaggtcatccgttactctcactatgctctgactaccttaaaagtttgtccagcatggctgacttatctcaggtacactgcttttatcccgctgtatccaatcggggttggcccaggagaaatgtggacaatgtaccaagccctcccgtttgtgaagaagagggacctttactcaggtttcttcgagaagttctccatgagctaccgttcctttctagtgggtgtgctggtgctctacccgttcctgtggctgaagctgtaccagcacgtgttcaagcagcgcaagtccaagctggggaaggggagcaggaagaaacgggcctgagaaaatctggctctgctcagctcagctgccacttgttgctgtcatgtgaaacgctaacgggtcattgtggatttttgttttggaagaaaatctttgtgagttgttgtctgatgcgacgggggcagttattggattacgctttgggttctctgtttgtttcaattgctctgcgttttatgtctgtattaacatacatcaagcatatataatagtcatgttgctgctgcgagtctaatcaatcttgcgatcctggttttctcgctcaattgcctacactgaatgaggctgatcacgctgctctgtgcctacagcaggcgattgtca

SEQ ID NO: 76663 - DNA, 1047 bp, Zea Mays
tgcctcgccggtgtcgaaaccacagccacacaggcagccggtgctgggcctcggcactcggcagccatggttcgccttgcgaagttctatctcgtctgctacaactccctccaatcgctcggatggttcgtctccctcctccgcctcctgccctgcctcgtccctcccttccctgtccactccgcgtacgtggtcgccggcgacctcatctgtttcctacagacatgtgcgatccttgaaacggtccacgctgccatcggattggtgccgaccgcgccacttcttgctttcttgcaatggggagggaggatccacttcatcctggctgttgtccggcaaattcccgaggttcagagcagtccatctgtgttcataacatttatagcttggagcatatctgaggtcatccgttactctcactatgctctgactaccttaaaagtttgtccagcatggctgacttatctcaggtacactgcttttatcccgctgtatccaatcggggttggcccaggagaaatgtggacaatgtaccaagccctcccgtttgtgaagaagagggacctttactcaggtttcttcgagaagttctccatgagctaccgttcctttctagtgggtgtgctggtgctctacccgttcctgtggctgaagctgtaccagcacgtgttcaagcagcgcaagtccaagctggggaaggggagcaggaagaaacgggcctgagaaaatctggctctgctcagctcagctgccacttgttgctgtcatgtgaaacgctaacgggtcattgtggatttttgttttggaagaaaatctttgtgagttgttgtctgatgcgacgggggcagttattggattacgctttgggttctctgtttgtttcaattgctctgcgttttatgtctgtattaacatacatcaagcatatataatagtcatgttgctgctgcgagtctaatcaatcttgcgatcctggttttctcgctcaattgcctacactgaatgaggctgatcacgctgctctgtgcctacagcaggcgattgtca

SEQ ID NO: 76664 - DNA, 1595 bp, Zea Mays
cgccgttttccccatctcgcgcagcgctactgccggctgtcccgagtcccgaccaccgtcctccgctcccggacgtgaatccttcctcctaccgcgatggagaccttcccgtcggtgaagaacatcctcctactggactccgaggggaagcgcgtcgccgtgaagtactacagcgatggctggcctactctctccgcgaagctggccttcgagaagtcggtcttcgccaaaacccagaaagcgaatgctggaacggatgcagagattgtaatgtttgatggtcaaattgtggtatacaagttcatccaagacctgcacttttttgttactggaggagaagaggagaatgagcttattttagcatcagttcttcagggattctctgatgctgtcgaacgacttctcaagttatcttccctctattgaagtttatcttttcaaccattgtttgttctgttacatgttattgtgttaatgctgattgtatatgaatgtgtttccaaccttggtggtttcaggaacatggttgacaaaaggacagcactcgagaatttggacctgatcctattgtgtcttgatgaaattgttgatggagggtaaagccttttcttactacgtacatgatattaagggcttcttttcttgttctctttattgtgtacatttattatcctttgatctgaaatcacctgactcatctgggccatggcaatagagctctattagggcctctatttgtaatggttgtattcaccggattcaaaggtttagtctggtgttctgcttctgtacctcaagcccaagcatgcctaaccttttaatggggttacacaatttgatgtgtgaaacaatggcttagtttgctaaagacatcagcaaaataaacagcccattcctttttttttgaaatggaacaaaactgattatccacatgaagaattgtatctatttgattttgagtttgagatcttgaacgactgcaggtaccacaactatgcactcgcctcaatgtgtctttgataacccattgatgtctaaactctgaaatgtggaagtgataggatcaagcatagagatgaatagaatcgcacattgtaagcagcatgtaattgtttggtgcattaaacataattttctgaatgattacacaggattgtacttgaaacagaaggaagagagatagctgaaaaggtgtctggtcacggatcggagggtgcttcatcggctgagcaactttagtcaatgccctaacgcaagcaagagagcatctggcgaagtctcttctcatgtgatgttgtgctttatattttgggggtgacgacggagtatctattattgtgtctggatgacactattctttttgttagcaacggagaaagaaaaatgtctgaagcatttgaatgtgtagagtggcacattgcttccaaaattctcatggtcatctataagccttcaaagttctgtagcatgattgttcttatattgactggttcagttatttgtcgttacttgttttgtttaaccttttccctttggaaacgttaaaatagcaagcttatggagataatttagcatgtcctaccataacgaatcag

SEQ ID NO: 76665 - DNA, 1136 bp, Zea Mays
cgccgttttccccatctcgcgcagcgctactgccggctgtcccgagtcccgaccaccgtcctccgctcccggacgtgaatccttcctcctaccgcgatggagaccttcccgtcggtgaagaacatcctcctactggactccgaggggaagcgcgtcgccgtgaagtactacagcgatggctggcctactctctccgcgaagctggccttcgagaagtcggtcttcgccaaaacccagaaagcgaatgctggaacggatggtaatttacatctgatttctcttaatacggaagaattgttttcgactgatggtgagcgttgttgtgctcccttgaggtagtccggagtacttgattaacattatcatctcataatgaactcatgagtgtgatgtattgatgtgcctgtttgcgtgttttttcttttcttcaagtatttcatatgtttatttgtttctctttaacagcagagattgtaatgtttgatggtcaaattgtggtatacaagttcatccaagacctgcacttttttgttactggaggagaagaggagaatgagcttattttagcatcagttcttcagggattctctgatgctgtcgaacgacttctcaagaacatggttgacaaaaggacagcactcgagaatttggacctgatcctattgtgtcttgatgaaattgttgatggagggattgtacttgaaacagaaggaagagagatagctgaaaaggtgtctggtcacggatcggagggtgcttcatcggctgagcagactttagtcaatgccctaacgcaagcaagagagcatctggcgaagtctcttctcatgtgatgttgtgctttatattttgggggtgacgacggagtatctattattgtgtctggatgacactattctttttgttagcaacggagaaagaaaaatgtctgaagcatttgaatgtgtagagtggcacattgcttccaaaattctcatggtcatctataagccttcaaagttctgtagcatgattgttcttatattgactggttcagttatttgtcgttacttgttttgtttaaccttttccctttggaaacgttaaaatagcaagcttatggagataatttagcatgtcctaccataacgaatcag

SEQ ID NO: 76666 - DNA, 1472 bp, Zea Mays
cgcaggcttcccttccgtttcgtcatcctccggtcgaccggtcctccccaaaacgtccgcacgccgttttccccatctcgcgcagcgctactgccggctgtcccgagtcccgaccaccgtcctccgctcccggacgtgaatccttcctcctaccgcgatggagaccttcccgtcggtgaagaacatcctcctactggactccgaggggaagcgcgtcgccgtgaagtactacagcgatggctggcctactctctccgcgaagctggccttcgagaagtcggtcttcgccaaaacccagaaagcgaatgctggaacggatgcagagattgtaatgtttgatggtcaaattgtggtatacaagttcatccaagacctgcacttttttgttactggaggagaagaggagaatgagcttattttagcatcagttcttcagggattctctgatgctgtcgaacgacttctcaagaacatggttgacaaaaggacagcactcgagaatttggacctgatcctattgtgtcttgatgaaattgttgatggagggtaaagccttttcttactacgtacatgatattaagggcttcttttcttgttctctttattgtgtacatttattatcctttgatctgaaatcacctgactcatctgggccatggcaatagagctctattagggcctctatttgtaatggttgtattcaccggattcaaaggtttagtctggtgttctgcttctgtacctcaagcccaagcatgcctaaccttttaatggggttacacaatttgatgtgtgaaacaatggcttagtttgctaaagacatcagcaaaataaacagcccattcctttttttttgaaatggaacaaaactgattatccacatgaagaattgtatctatttgattttgagtttgagatcttgaacgactgcaggtaccacaactatgcactcgcctcaatgtgtctttgataacccattgatgtctaaactctgaaatgtggaagtgataggatcaagcatagagatgaatagaatcgcacattaaggaagagagatagctgaaaaggtgtctggtcacggatcggagggtgcttcatcggctgagcagactttagtcaatgccctaacgcaagcaagagagcatctggcgaagtctcttctcatgtgatgttgtgctttatattttgggggtgacgacggagtatctattattgtgtctggatgacactattctttttgttagcaacggagaaagaaaaatgtctgaagcatttgaatgtgtagagtggcacattgcttccaaaattctcatggtcatctataagccttcaaagttctgtagcatgattgttcttatattgactggttcagttatttgtcgttacttgttttgtttaaccttttccctttggaaacgttaaaatagcaagcttatggagataatttagcatgtcctaccataacgaatcag

SEQ ID NO: 76667 - DNA, 1549 bp, Zea Mays
tggcaccgcaggcttcccttccgtttcgtcatcctccggtcgaccggtcctccccaaaacgtccgcacgccgttttccccatctcgcgcagcgctactgccggctgtcccgagtcccgaccaccgtcctccgctcccggacgtgaatccttcctcctaccgcgatggagaccttcccgtcggtgaagaacatcctcctactggactccgaggggaagcgcgtcgccgtgaagtactacagcgatggctggcctactctctccgcgaagctggccttcgagaagtcggtcttcgccaaaacccagaaagcgaatgctggaacggatgagattgtaatgtttgatggtcaaattgtggtatacaagttcatccaagacctgcacttttttgttactggaggagaagaggagaatgagcttattttagcatcagttcttcagggattctctgatgctgtcgaacgacttctcaagaacatggttgacaaaaggacagcactcgagaatttggacctgatcctattgtgtcttgatgaaattgttgatggagggtaaagccttttcttactacgtacatgatattaagggcttcttttcttgttctctttattgtgtacatttattatcctttgatctgaaatcacctgactcatctgggccatggcaatagagctctattagggcctctatttgtaatggttgtattcaccggattcaaaggtttagtctggtgttctgcttctgtacctcaagcccaagcatgcctaaccttttaatggggttacacaatttgatgtgtgaaacaatggcttagtttgctaaagacatcagcaaaataaacagcccattcctttttttttgaaatggaacaaaactgattatccacatgaagaattgtatctatttgattttgagtttgagatcttgaacgactgcaggtaccacaactatgcactcgcctcaatgtgtctttgataacccattgatgtctaaactctgaaatgtggaagtgataggatcaagcatagagatgaatagaatcgcacattgtaagcagcatgtaattgtttggtgcattaaacataattttctgaatgattacacaggattgtacttgaaacagaaggaagagagatagctgaaaaggtgtctggtcacggatcggagggtgcttcatcggctgagcagactttagtcaatgccctaacgcaagcaagagagcatctggcgaagtctcttctcatgtgatgttgtgctttatattttgggggtgacgacggagtatctattattgtgtctggatgacactattctttttgttagcaacggagaaagaaaaatgtctgaagcatttgaatgtgtagagtggcacattgcttccaaaattctcatggtcatctataagccttcaaagttctgtagcatgattgttcttatattgactggttcagttatttgtcgttacttgttttgtttaaccttttccctttggaaacgttaaaatagcaagcttatggagataatttagcatgtcctaccataacgaatcag

SEQ ID NO: 76668 - DNA, 1293 bp, Zea Mays
cacctgcactgcaccgcaagtaacccaaccctgcttccagtgcaagtgactgaccccgtgacccggcccatcataacaaatcaaaccatcacccgacttgtttacccccgaaaatttgccgtcttctcatctcgctcccctctttgcgccgcccccagatccggcaccgcccgctgctcgaacccgcaccccacgcccgcaggccgggaccggtgggcgcgcgccgggcagtaggagggagaggaagggcggcatggcggcgccgccggcgagggcccgggccgactacgactaccttatcaagcttcttctcattggggatagcggtgttggcaagagttgcctcctgttgcggttctctgatggttccttcactacaagctttattaccacaattggtattgactttaagatacggacaatagaattggatggcaagcgtataaagctacagatttgggatacagcgggccaagaacgcttccgtactattaccactgcgtactaccgtggagctatgggtatcttgctggtttatgatgtcaccgatgaatcttctttcaacaacatcagcaaaataaacagcccattcctttttttttgaaatggaacaaaactgattatccacatgaagaattgtatctatttgattttgagtttgagatcttgaacgactgcaggtaccacaactatgcactcgcctcaatgtgtctttgataacccattgatgtctaaactctgaaatgtggaagtgataggatcaagcatagagatgaatagaatcgcacattgtaagcagcatgtaattgtttggtgcattaaacataattttctgaatgattacacaggattgtacttgaaacagaaggaagagagatagctgaaaaggtgtctggtcacggatcggagggtgcttcatcggctgagcagactttagtcaatgccctaacgcaagcaagagagcatctggcgaagtctcttctcatgtgatgttgtgctttatattttgggggtgacgacggagtatctattattgtgtctggatgacactattctttttgttagcaacggagaaagaaaaatgtctgaagcatttgaatgtgtagagtggcacattgcttccaaaattctcatggtcatctataagccttcaaagttctgtagcatgattgttcttatattgactggttcagttatttgtcgttacttgttttgtttaaccttttccctttggaaacgttaaaatagcaagcttatggagataatttagcatgtcctaccataacgaatcag

SEQ ID NO: 76669 - DNA, 1550 bp, Zea Mays
ctgaaattgtattgtggccggcatctccattagcgcagaatagcgtccggcagatcaccacttcaccggtaggtggctgagcgcctcgggttaaagtaaagtgttaaacacctgcactgcaccgcaagtaacccaaccctgcttccagtgcaagtgactgaccccgtgacccggcccatcataacaaatcaaaccatcacccgacttgtttacccccgaaaatttgccgtcttctcatctcgctcccctctttgcgccgcccccagatccggcaccgcccgctgctcgaacccgcaccccacgcccgcaggccgggaccggtgggcgcgcgccgggcagtaggagggagaggaagggcggcatggcggcgccgccggcgagggcccgggccgactacgactaccttatcaagcttcttctcattggggatagcggtgttggcaagagttgcctcctgttgcggttctctgatggttccttcactacaagctttattaccacaattggtattgactttaagatacggacaatagaattggatggcaagcgtataaagctacagatttgggatacagcgggccaagaacgcttccgtactattaccactgcgtactaccgtggagctatgggtatcttgctggtttatgatgtcaccgatgaatcttctttcaacaacatccgaaactggattcggaacattgagcaacatgcctctgataatgtcaacaaaattttggtgggcaacaaggccgatatggacgaaagcaagagggctgtacctactgcgaaaggacaagcacttgctgatgagtatgggatcaagttttttgaaacgagtgccaagacaaacctgaacgtggagcaagtgttcttctccatcgcacgtgacatcaagcagaggcttgcagagactgattcaaagccagaggacaaggcaatcaaaattaacaagccagaccagggttccgaggcaccagctgcccagcgatctgcatgctgcggttcataagcagacgcacgatagccataatcattggttatttgacactatttatttcctgcttggcttttataggaagaatttgaggaagccacttatgatatactgatgatgtggttgtactcttgtttgcttccactcttcgaagcaagcacctcttgctgttgacgtagctattgcactctggacatccgttggaacaacctctctcctccctacagtctacagtgtgtgatggacgaattccatgccgttgggtttgcattatcgatcaatgcatggattaacgtatcgcccttgtgtggattgttgtgttttttttctctcatgttgctgttcctttagattgaatttgttgggaaggaaaatatattttccttttcttatgtatatcaggtgcatttttatcttttgtacctggaatgtatgtatccacggaaagcgtgaatcttcaatttagaaaagaagaaaacttatctggaaatataagaccagtgcatgcggtattgtttgaataaaaaatataataaaacttatacatttgtatatc

SEQ ID NO: 76670 - DNA, 4087 bp, Zea Mays
acgaaatcacgaccatgtacatctgatatgttcctacccttgttcgccaccgtattcgccggctgtctccgcccatctcgcctgagaactaaggcggccgccagtcgcagccctcggtggtcggcacctcctcagcccgtttcccctaacgctcacactctacgccgccgcgtcgtcggcctcgccctccctctcgacgaactaagccatccccggccgagcttccgacgcattcccgggccacttccctcccttccggccttcctactccctccacgcaccgcaactgtgacactccgctccgacgcgggcgccgcaggccgttgacgacacccgaacccaaccggcaacgcgcccgaaaggggcagggactccttttgcttgtccttcgcccctcttctcgctttctgcggagggaaaaactttcccagtcaattaaaaaaaaaatcgacggacggctttacgcacgcgattcgctgctcgcccccaaatttctcctctgcttctggttcctttgacgcatctgatcatttccccctcctctacgcgggtcgaatcgcgagagtgtggcggcggctgtggtggttgactggtgcttagggttggagctccaggaggatggcgagccacggcatcggggcggccgctggatctgacgccccgcacgctgaggtcgtcactatgggacagacaaatccatctccttatcctcctgtatcttccagtcatcattcatggtcctctgcaactgggtcagtttcatggaacaatacagtggacaaacttagccaagatacagtttattatgatccacaaagggatgtatcggtttcaggagggaatcaaaatgtaggaagcagtgcgcctcatgttgcccaggcgagtatggggataacagacgcagctcattcccatgtaccttactctagttcagatcaacatggctataaccctgtagaatatgccaattattattatagctacccacaagcggcaaatgattcttctgtccagcaaggagcaaaccaacatccagactgtgccaggatatggaagcagcagctactattttcagaacaacacatggaatggtggaagcacagggaataattttgctcaatcataccagaactactcaccatctgatacaaatgcacaacagagctctacttcagtgcctgccaattctttaccgtatcagcagcagtataaccagtggccgtactattacaatcaatctgtgccaagtgcttctagcaatccagttgctgggaacagtactacagataacttagctgttaacaccccttctagctactcctatcctaatagccagccacctccaccaggaacaacatcatggaaaagtaattcaagtgcttctgttgcgcctcctatgcaggtaccaggtgttttggaacatcaaaatcaatatggcaaccaggcggaaggtcattataaccagggaccaggtgtccaatggtctcaaaaccattacgcctaccagacacagccataccctcagaagattaattccaattattcgcaactaagcaaccctgaagatcaactgaggactgtagattctaacggtccaagcacaaatctttcgtctaaccatgtttctgaaaattttaaaccaaacttgctggattctgtgacaatgaacacttccagcgaaagcaaaatacaagttcctataaatcctcgaattgcccaaggtttctctatggtgataccaaagaatgagaagaaaagttctggacttgatttatcaaggaaacctgcctatgttagtgtgtccatgccggcgaacgatgctaaagcaagtcaagttggtcctgatgctagatcgatacccttttcactccgtaactatgctatgaggaacctcaatcgttgcaagaatgatacccagagggcagcctgccgaagcataatggaggagatcacaaaaaaagcttttgctgagggaacccttcttactaagaactgggacactgaaccactatttcctttgcctgaaagtgttgtgggcatggctggagcaagcagtgatttaagtcccttcttgtcagtatctaccccaaggaaacgtgtgaaaagtagatgggagcctgttgtggatgaaaatgttaccaataaggtggaacaaatagcaaaaggattgatcagcagtaatgtccacagtactttggaccctaaaaatagaattccaaatcctgtgcggggtagcagttgggatcgtgggaagtttctccagtcttgtcaagcatcatcaaataaagtcaatcagaggcctgccaagaagcaaaaaatggctagtaatttgagtcaaatacagaatggaagtgcttcaagtgacagtgagaaggaacatgatctaaccaaacattatgccagtgcaactgcactagcaaactcgcctgaggaaaagaaacgtagggagcatagatccaagcgttttgaaaagagtaaagattcatcattaaaatcaagaaatgcttctgcaaataacgatggtatggctagttttcgtgcaagaagggcaatttcgtctcttcgtactagaacctatgaagaaggcactttggctgtggaggatatggattgggatgcactgacagtcaaaggaacatgtcaggaaattgagaaacgctatctacgacttacagaagcacctgatcctgccaaagtaaggccagaagatgttctggagaaggcccttgcaatggttgaaacatcagaaaagaattacctttacaagtgtgatcaactaaaatctatccggcaagatcttacagttcagagaatccagaatgaactgactgtaaaggtttatgaaacccatgcccgattagctatgcaagctggcgatttacccgaatttaaccagtgccagtcacaactgaagaggctatatgcacaaggaatcaagggttgctattttgaattttctgcttacaatttgttgtgtgtcatgctacactctaataataaacgagacttgctgtcatcaatggcaagcttgtcaaaagaagccaaacaagatgcagctgttaagcattcccttgcagttcatgcttctgttttatcttgcaattacgttcaatttttcaaactatacaagaaggcacccaatttgaactcatgcctcatggatctatatgtggagcggatgcgctttgaagctatgaaatgcatgtctaggtcatatcgcccaactgtacctgtgggatatgttgcacagattttggggttcttgagaacagatacaggctgtgcaaccaatggggatgatggattagaaggatgcgaaaaatggttgaaagcgcatgggacagttctttcagaagatagcagtggggaattgcagatagatacgaaggcctcttcttctacactctacatgccagagccagagaacgccgttgcacatggtgatgcatcacttgctgttgatgacttttttgcacggactgacggacaacttaaaaggggcagcagcgatggaccaacagtggatactccgtagtagtattgggggctgccgtggcagtagtgctgaggtggcttcttccgtagaaattacaacagggggcatgaaatggaactgaccaacgatgccagcggagctacagtcggaacatgggtgctctaactgatccagtcatcgggttctggcatttgcctcaaagtgatctagtcatccagagttgcaccgcgatgagcttcgttgagaaggcagataagaaagcagcattacaagtttttaatgtcttggtggtttactcacccctaactttaagcgtagaaagaactgtgaaaaaacaactacaggtctacagctttgaagcatacacgtatgttttccggggctcctttttttctggctgccccttagtccgtgaagattgtaaaaatatttttaatgcacataaatttgctttcctatcctatcgaataacaacatttatgtacgtactaatactcctatagttatatctctcgctcgctcgagccgaaccgtttactgatactaagtctttcatatatatgatgatgcgatagcccgaaatggcttgtt

SEQ ID NO: 76671 - DNA, 4045 bp, Zea Mays
acgaaatcacgaccatgtacatctgatatgttcctacccttgttcgccaccgtattcgccggctgtctccgcccatctcgcctgagaactaaggcggccgccagtcgcagccctcggtggtcggcacctcctcagcccgtttcccctaacgctcacactctacgccgccgcgtcgtcggcctcgccctccctctcgacgaactaagccatccccggccgagcttccgacgcattcccgggccacttccctcccttccggccttcctactccctccacgcaccgcaactgtgacactccgctccgacgcgggcgccgcaggccgttgacgacacccgaacccaaccggcaacgcgcccgaaaggggcagggactccttttgcttgtccttcgcccctcttctcgctttctgcggagggaaaaactttcccagtcaattaaaaaaaaaatcgacggacggctttacgcacgcgattcgctgctcgcccccaaatttctcctctgcttctggttcctttgacgcatctgatcatttccccctcctctacgcgggtcgaatcgcgagagtgtggcggcggctgtggtggttgactggtgcttagggttggagctccaggaggatggcgagccacggcatcggggcggccgctggatctgacgccccgcacgctgaggtcgtcactatgggacagacaaatccatctccttatcctcctgtatcttccagtcatcattcatggtcctctgcaactgggtcagtttcatggaacaatacagtggacaaacttagccaagatacagtttattatgatccacaaagggatgtatcggtttcaggagggaatcaaaatgtaggaagcagtgcgcctcatgttgcccaggcgagtatggggataacagacgcagctcattcccatgtaccttactctagttcagatcaacatggctataaccctgtagaatatgccaattattattatagctacccacaagcggcaaatgattcttctgtccagcaaggagcaaaccaacatccaggtgcagcttatcagcctcttacttcatttcaaaattcagggtcttacattgatcctacaagtaacacatattacaatgctggggatcatcagactgtgccaggatatggaagcagcagctactattttcagaacaacacatggaatggtggaagcacagggaataattttgctcaatcataccagaactactcaccatctgatacaaatgcacaacagagctctacttcagtgcctgccaattctttaccgtatcagcagcagtataaccagtggccgtactattacaatcaatctgtgccaagtgcttctagcaatccagttgctgggaacagtactacagataacttagctgttaacaccccttctagctactcctatcctaatagccagccacctccaccaggaacaacatcatggaaaagtaattcaagtgcttctgttgcgcctcctatgcaggtaccaggtgttttggaacatcaaaatcaatatggcaaccaggcggaaggtcattataaccagggaccaggtgtccaatggtctcaaaaccattacgcctaccagacacagccataccctcagaagattaattccaattattcgcaactaagcaaccctgaagatcaactgaggactgtagattctaacggtccaagcacaaatctttcgtctaaccatgtttctgaaaattttaaaccaaacttgctggattctgtgacaatgaacacttccagcgaaagcaaaatacaagttcctataaatcctcgaattgcccaaggtttctctatggtgataccaaagaatgagaagaaaagttctggacttgatttatcaaggaaacctgcctatgttagtgtgtccatgccggcgaacgatgctaaagcaagtcaagttggtcctgatgctagatcgatacccttttcactccgtaactatgctatgaggaacctcaatcgttgcaagaatgatacccagagggcagcctgccgaagcataatggaggagatcacaaaaaaagcttttgctgagggaacccttcttactaagaactgggacactgaaccactatttcctttgcctgaaagtgttgtgggcatggctggagcaagtgatttaagtcccttcttgtcagtatctaccccaaggaaacgtgtgaaaagtagatgggagcctgttgtggatgaaaatgttaccaataaggtggaacaaatagcaaaaggattgatcagcagtaatgtccacagtactttggaccctaaaaatagaattccaaatcctgtgcggggtagcagttgggatcgtgggaagtttctccagtcttgtcaagcatcatcaaataaagtcaatcagaggcctgccaagaagcaaaaaatggctagtaatttgagtcaaatacagaatggaagtgcttcaagtgacagtgagaaggaacatgatctaaccaaacattatgccagtgcaactgcactagcaaactcgcctgaggaaaagaaacgtagggagcatagatccaagcgttttgaaaagagtaaagattcatcattaaaatcaagaaatgcttctgcaaataacgatggtatggctagttttcgtgcaagaagggcaatttcgtctcttcgtactagaacctatgaagaaggcactttggctgtggaggatatggattgggatgcactgacagtcaaaggaacatgtcaggaaattgagaaacgctatctacgacttacagaagcacctgatcctgccaaagtaaggccagaagatgttctggagaaggcccttgcaatggttgaaacatcagaaaagaattacctttacaagtgtgatcaactaaaatctatccggcaagatcttacagttcagagaatccagaatgaactgactgtaaaggtttatgaaacccatgcccgattagctatgcaagctggcgatttacccgaatttaaccagcttgtcaaaagaagccaaacaagatgcagctgttaagcattcccttgcagttcatgcttctgttttatcttgcaattacgttcaatttttcaaactatacaagaaggcacccaatttgaactcatgcctcatggatctatatgtggagcggatgcgctttgaagctatgaaatgcatgtctaggtcatatcgcccaactgtacctgtgggatatgttgcacagattttggggttcttgagaacagatacaggctgtgcaaccaatggggatgatggattagaaggatgcgaaaaatggttgaaagcgcatgggacagttctttcagaagatagcagtggggaattgcagatagatacgaaggcctcttcttctacactctacatgccagagccagagaacgccgttgcacatggtgatgcatcacttgctgttgatgacttttttgcacggactgacggacaacttaaaaggggcagcagcgatggaccaacagtggatactccgtagtagtattgggggctgccgtggcagtagtgctgaggtggcttcttccgtagaaattacaacagggggcatgaaatggaactgaccaacgatgccagcggagctacagtcggaacatgggtgctctaactgatccagtcatcgggttctggcatttgcctcaaagtgatctagtcatccagagttgcaccgcgatgagcttcgttgagaaggcagataagaaagcagcattacaagtttttaatgtcttggtggtttactcacccctaactttaagcgtagaaagaactgtgaaaaaacaactacaggtctacagctttgaagcatacacgtatgttttccggggctcctttttttctggctgccccttagtccgtgaagattgtaaaaatatttttaatgcacataaatttgctttcctatcctatcgaataacaacatttatgtacgtactaatactcctatagttatatctctcgctcgctcgagccgaaccgtttactgatactaagtctttcatatatatgatgatgcgatagcccgaaatggcttgtt

SEQ ID NO: 76672 - DNA, 4084 bp, Zea Mays
acgaaatcacgaccatgtacatctgatatgttcctacccttgttcgccaccgtattcgccggctgtctccgcccatctcgcctgagaactaaggcggccgccagtcgcagccctcggtggtcggcacctcctcagcccgtttcccctaacgctcacactctacgccgccgcgtcgtcggcctcgccctccctctcgacgaactaagccatccccggccgagcttccgacgcattcccgggccacttccctcccttccggccttcctactccctccacgcaccgcaactgtgacactccgctccgacgcgggcgccgcaggccgttgacgacacccgaacccaaccggcaacgcgcccgaaaggggcagggactccttttgcttgtccttcgcccctcttctcgctttctgcggagggaaaaactttcccagtcaattaaaaaaaaaatcgacggacggctttacgcacgcgattcgctgctcgcccccaaatttctcctctgcttctggttcctttgacgcatctgatcatttccccctcctctacgcgggtcgaatcgcgagagtgtggcggcggctgtggtggttgactggtgcttagggttggagctccaggaggatggcgagccacggcatcggggcggccgctggatctgacgccccgcacgctgaggtcgtcactatgggacagacaaatccatctccttatcctcctgtatcttccagtcatcattcatggtcctctgcaactgggtcagtttcatggaacaatacagtggacaaacttagccaagatacagtttattatgatccacaaagggatgtatcggtttcaggagggaatcaaaatgtaggaagcagtgcgcctcatgttgcccaggcgagtatggggataacagacgcagctcattcccatgtaccttactctagttcagatcaacatggctataaccctgtagaatatgccaattattattatagctacccacaagcggcaaatgattcttctgtccagcaaggagcaaaccaacatccagactgtgccaggatatggaagcagcagctactattttcagaacaacacatggaatggtggaagcacagggaataattttgctcaatcataccagaactactcaccatctgatacaaatgcacaacagagctctacttcagtgcctgccaattctttaccgtatcagcagcagtataaccagtggccgtactattacaatcaatctgtgccaagtgcttctagcaatccagttgctgggaacagtactacagataacttagctgttaacaccccttctagctactcctatcctaatagccagccacctccaccaggaacaacatcatggaaaagtaattcaagtgcttctgttgcgcctcctatgcaggtaccaggtgttttggaacatcaaaatcaatatggcaaccaggcggaaggtcattataaccagggaccaggtgtccaatggtctcaaaaccattacgcctaccagacacagccataccctcagaagattaattccaattattcgcaactaagcaaccctgaagatcaactgaggactgtagattctaacggtccaagcacaaatctttcgtctaaccatgtttctgaaaattttaaaccaaacttgctggattctgtgacaatgaacacttccagcgaaagcaaaatacaagttcctataaatcctcgaattgcccaaggtttctctatggtgataccaaagaatgagaagaaaagttctggacttgatttatcaaggaaacctgcctatgttagtgtgtccatgccggcgaacgatgctaaagcaagtcaagttggtcctgatgctagatcgatacccttttcactccgtaactatgctatgaggaacctcaatcgttgcaagaatgatacccagagggcagcctgccgaagcataatggaggagatcacaaaaaaagcttttgctgagggaacccttcttactaagaactgggacactgaaccactatttcctttgcctgaaagtgttgtgggcatggctggagcaagtgatttaagtcccttcttgtcagtatctaccccaaggaaacgtgtgaaaagtagatgggagcctgttgtggatgaaaatgttaccaataaggtggaacaaatagcaaaaggattgatcagcagtaatgtccacagtactttggaccctaaaaatagaattccaaatcctgtgcggggtagcagttgggatcgtgggaagtttctccagtcttgtcaagcatcatcaaataaagtcaatcagaggcctgccaagaagcaaaaaatggctagtaatttgagtcaaatacagaatggaagtgcttcaagtgacagtgagaaggaacatgatctaaccaaacattatgccagtgcaactgcactagcaaactcgcctgaggaaaagaaacgtagggagcatagatccaagcgttttgaaaagagtaaagattcatcattaaaatcaagaaatgcttctgcaaataacgatggtatggctagttttcgtgcaagaagggcaatttcgtctcttcgtactagaacctatgaagaaggcactttggctgtggaggatatggattgggatgcactgacagtcaaaggaacatgtcaggaaattgagaaacgctatctacgacttacagaagcacctgatcctgccaaagtaaggccagaagatgttctggagaaggcccttgcaatggttgaaacatcagaaaagaattacctttacaagtgtgatcaactaaaatctatccggcaagatcttacagttcagagaatccagaatgaactgactgtaaaggtttatgaaacccatgcccgattagctatgcaagctggcgatttacccgaatttaaccagtgccagtcacaactgaagaggctatatgcacaaggaatcaagggttgctattttgaattttctgcttacaatttgttgtgtgtcatgctacactctaataataaacgagacttgctgtcatcaatggcaagcttgtcaaaagaagccaaacaagatgcagctgttaagcattcccttgcagttcatgcttctgttttatcttgcaattacgttcaatttttcaaactatacaagaaggcacccaatttgaactcatgcctcatggatctatatgtggagcggatgcgctttgaagctatgaaatgcatgtctaggtcatatcgcccaactgtacctgtgggatatgttgcacagattttggggttcttgagaacagatacaggctgtgcaaccaatggggatgatggattagaaggatgcgaaaaatggttgaaagcgcatgggacagttctttcagaagatagcagtggggaattgcagatagatacgaaggcctcttcttctacactctacatgccagagccagagaacgccgttgcacatggtgatgcatcacttgctgttgatgacttttttgcacggactgacggacaacttaaaaggggcagcagcgatggaccaacagtggatactccgtagtagtattgggggctgccgtggcagtagtgctgaggtggcttcttccgtagaaattacaacagggggcatgaaatggaactgaccaacgatgccagcggagctacagtcggaacatgggtgctctaactgatccagtcatcgggttctggcatttgcctcaaagtgatctagtcatccagagttgcaccgcgatgagcttcgttgagaaggcagataagaaagcagcattacaagtttttaatgtcttggtggtttactcacccctaactttaagcgtagaaagaactgtgaaaaaacaactacaggtctacagctttgaagcatacacgtatgttttccggggctcctttttttctggctgccccttagtccgtgaagattgtaaaaatatttttaatgcacataaatttgctttcctatcctatcgaataacaacatttatgtacgtactaatactcctatagttatatctctcgctcgctcgagccgaaccgtttactgatactaagtctttcatatatatgatgatgcgatagcccgaaatggcttgtt

SEQ ID NO: 76673 - DNA, 3956 bp, Zea Mays
acgaaatcacgaccatgtacatctgatatgttcctacccttgttcgccaccgtattcgccggctgtctccgcccatctcgcctgagaactaaggcggccgccagtcgcagccctcggtggtcggcacctcctcagcccgtttcccctaacgctcacactctacgccgccgcgtcgtcggcctcgccctccctctcgacgaactaagccatccccggccgagcttccgacgcattcccgggccacttccctcccttccggccttcctactccctccacgcaccgcaactgtgacactccgctccgacgcgggcgccgcaggccgttgacgacacccgaacccaaccggcaacgcgcccgaaaggggcagggactccttttgcttgtccttcgcccctcttctcgctttctgcggagggaaaaactttcccagtcaattaaaaaaaaaatcgacggacggctttacgcacgcgattcgctgctcgcccccaaatttctcctctgcttctggttcctttgacgcatctgatcatttccccctcctctacgcgggtcgaatcgcgagagtgtggcggcggctgtggtggttgactggtgcttagggttggagctccaggaggatggcgagccacggcatcggggcggccgctggatctgacgccccgcacgctgaggtcgtcactatgggacagacaaatccatctccttatcctcctgtatcttccagtcatcattcatggtcctctgcaactgggtcagtttcatggaacaatacagtggacaaacttagccaagatacagtttattatgatccacaaagggatgtatcggtttcaggagggaatcaaaatgtaggaagcagtgcgcctcatgttgcccaggcgagtatggggataacagacgcagctcattcccatgtaccttactctagttcagatcaacatggctataaccctgtagaatatgccaattattattatagctacccacaagcggcaaatgattcttctgtccagcaaggagcaaaccaacatccagactgtgccaggatatggaagcagcagctactattttcagaacaacacatggaatggtggaagcacagggaataattttgctcaatcataccagaactactcaccatctgatacaaatgcacaacagagctctacttcagtgcctgccaattctttaccgtatcagcagcagtataaccagtggccgtactattacaatcaatctgtgccaagtgcttctagcaatccagttgctgggaacagtactacagataacttagctgttaacaccccttctagctactcctatcctaatagccagccacctccaccaggaacaacatcatggaaaagtaattcaagtgcttctgttgcgcctcctatgcaggtaccaggtgttttggaacatcaaaatcaatatggcaaccaggcggaaggtcattataaccagggaccaggtgtccaatggtctcaaaaccattacgcctaccagacacagccataccctcagaagattaattccaattattcgcaactaagcaaccctgaagatcaactgaggactgtagattctaacggtccaagcacaaatctttcgtctaaccatgtttctgaaaattttaaaccaaacttgctggattctgtgacaatgaacacttccagcgaaagcaaaatacaagttcctataaatcctcgaattgcccaaggtttctctatggtgataccaaagaatgagaagaaaagttctggacttgatttatcaaggaaacctgcctatgttagtgtgtccatgccggcgaacgatgctaaagcaagtcaagttggtcctgatgctagatcgatacccttttcactccgtaactatgctatgaggaacctcaatcgttgcaagaatgatacccagagggcagcctgccgaagcataatggaggagatcacaaaaaaagcttttgctgagggaacccttcttactaagaactgggacactgaaccactatttcctttgcctgaaagtgttgtgggcatggctggagcaagcagtgatttaagtcccttcttgtcagtatctaccccaaggaaacgtgtgaaaagtagatgggagcctgttgtggatgaaaatgttaccaataaggtggaacaaatagcaaaaggattgatcagcagtaatgtccacagtactttggaccctaaaaatagaattccaaatcctgtgcggggtagcagttgggatcgtgggaagtttctccagtcttgtcaagcatcatcaaataaagtcaatcagaggcctgccaagaagcaaaaaatggctagtaatttgagtcaaatacagaatggaagtgcttcaagtgacagtgagaaggaacatgatctaaccaaacattatgccagtgcaactgcactagcaaactcgcctgaggaaaagaaacgtagggagcatagatccaagcgttttgaaaagagtaaagattcatcattaaaatcaagaaatgcttctgcaaataacgatggtatggctagttttcgtgcaagaagggcaatttcgtctcttcgtactagaacctatgaagaaggcactttggctgtggaggatatggattgggatgcactgacagtcaaaggaacatgtcaggaaattgagaaacgctatctacgacttacagaagcacctgatcctgccaaagtaaggccagaagatgttctggagaaggcccttgcaatggttgaaacatcagaaaagaattacctttacaagtgtgatcaactaaaatctatccggcaagatcttacagttcagagaatccagaatgaactgactgtaaaggtttatgaaacccatgcccgattagctatgcaagctggcgatttacccgaatttaaccagcttgtcaaaagaagccaaacaagatgcagctgttaagcattcccttgcagttcatgcttctgttttatcttgcaattacgttcaatttttcaaactatacaagaaggcacccaatttgaactcatgcctcatggatctatatgtggagcggatgcgctttgaagctatgaaatgcatgtctaggtcatatcgcccaactgtacctgtgggatatgttgcacagattttggggttcttgagaacagatacaggctgtgcaaccaatggggatgatggattagaaggatgcgaaaaatggttgaaagcgcatgggacagttctttcagaagatagcagtggggaattgcagatagatacgaaggcctcttcttctacactctacatgccagagccagagaacgccgttgcacatggtgatgcatcacttgctgttgatgacttttttgcacggactgacggacaacttaaaaggggcagcagcgatggaccaacagtggatactccgtagtagtattgggggctgccgtggcagtagtgctgaggtggcttcttccgtagaaattacaacagggggcatgaaatggaactgaccaacgatgccagcggagctacagtcggaacatgggtgctctaactgatccagtcatcgggttctggcatttgcctcaaagtgatctagtcatccagagttgcaccgcgatgagcttcgttgagaaggcagataagaaagcagcattacaagtttttaatgtcttggtggtttactcacccctaactttaagcgtagaaagaactgtgaaaaaacaactacaggtctacagctttgaagcatacacgtatgttttccggggctcctttttttctggctgccccttagtccgtgaagattgtaaaaatatttttaatgcacataaatttgctttcctatcctatcgaataacaacatttatgtacgtactaatactcctatagttatatctctcgctcgctcgagccgaaccgtttactgatactaagtctttcatatatatgatgatgcgatagcccgaaatggcttgtt

SEQ ID NO: 76674 - DNA, 4449 bp, Zea Mays
acgaaatcacgaccatgtacatctgatatgttcctacccttgttcgccaccgtattcgccggctgtctccgcccatctcgcctgagaactaaggcggccgccagtcgcagccctcggtggtcggcacctcctcagcccgtttcccctaacgctcacactctacgccgccgcgtcgtcggcctcgccctccctctcgacgaactaagccatccccggccgagcttccgacgcattcccgggccacttccctcccttccggccttcctactccctccacgcaccgcaactgtgacactccgctccgacgcgggcgccgcaggccgttgacgacacccgaacccaaccggcaacgcgcccgaaaggggcagggactccttttgcttgtccttcgcccctcttctcgctttctgcggagggaaaaactttcccagtcaattaaaaaaaaaatcgacggacggctttacgcacgcgattcgctgctcgcccccaaatttctcctctgcttctggttcctttgacgcatctgatcatttccccctcctctacgcgggtcgaatcgcgagagtgtggcggcggctgtggtggttgactggtgcttagggttggagctccaggaggatggcgagccacggcatcggggcggccgctggatctgacgccccgcacgctgaggtcgtcactatgggacagacaaatccatctccttatcctcctgtatcttccagtcatcattcatggtcctctgcaactgggtcagtttcatggaacaatacagtggacaaacttagccaagatacagtttattatgatccacaaagggatgtatcggtttcaggagggaatcaaaatgtaggaagcagtgcgcctcatgttgcccaggcgagtatggggataacagacgcagctcattcccatgtaccttactctagttcagatcaacatggctataaccctgtagaatatgccaattattattatagctacccacaagcggcaaatgattcttctgtccagcaaggagcaaaccaacatccaggtgcagcttatcagcctcttacttcatttcaaaattcagggtcttacattgatcctacaagtaacacatattacaatgctggggatcatcagactgtgccaggatatggaagcagcagctactattttcagaacaacacatggaatggtggaagcacagggaataattttgctcaatcataccagaactactcaccatctgatacaaatgcacaacagagctctacttcagtgcctgccaattctttaccgtatcagcagcagtataaccagtggccgtactattacaatcaatctgtgccaagtgcttctagcaatccagttgctgggaacagtactacagataacttagctgttaacaccccttctagctactcctatcctaatagccagccacctccaccaggaacaacatcatggaaaagtaattcaagtgcttctgttgcgcctcctatgcaggtaccaggtgttttggaacatcaaaatcaatatggcaaccaggcggaaggtcattataaccagggaccaggtgtccaatggtctcaaaaccattacgcctaccagacacagccataccctcagaagattaattccaattattcgcaactaagcaaccctgaagatcaactgaggactgtagattctaacggtccaagcacaaatctttcgtctaaccatgtttctgaaaattttaaaccaaacttgctggattctgtgacaatgaacacttccagcgaaagcaaaatacaagttcctataaatcctcgaattgcccaaggtttctctatggtgataccaaagaatgagaagaaaagttctggacttgatttatcaaggaaacctgcctatgttagtgtgtccatgccggcgaacgatgctaaagcaagtcaagttggtcctgatgctgtaatattcttctctcttctcgacataggaattgacactacatgaagtaatgagatttaagaaaagctggaattacatcttggttgactatcatcctggttttcatgattataaatttctatagtgtctgtaagaataaatcacttaattctttggtaaataatgataagaaaatgcagctgtgtttatgtctataactaaacattctaggcaaacaagatgggtcggtacttgcatattaaccatgcatttttcatttctcctgtttagagatcgatacccttttcactccgtaactatgctatgaggaacctcaatcgttgcaagaatgatacccagagggcagcctgccgaagcataatggaggagatcacaaaaaaagcttttgctgagggaacccttcttactaagaactgggacactgaaccactatttcctttgcctgaaagtgttgtgggcatggctggagcaagcagtgatttaagtcccttcttgtcagtatctaccccaaggaaacgtgtgaaaagtagatgggagcctgttgtggatgaaaatgttaccaataaggtggaacaaatagcaaaaggattgatcagcagtaatgtccacagtactttggaccctaaaaatagaattccaaatcctgtgcggggtagcagttgggatcgtgggaagtttctccagtcttgtcaagcatcatcaaataaagtcaatcagaggcctgccaagaagcaaaaaatggctagtaatttgagtcaaatacagaatggaagtgcttcaagtgacagtgagaaggaacatgatctaaccaaacattatgccagtgcaactgcactagcaaactcgcctgaggaaaagaaacgtagggagcatagatccaagcgttttgaaaagagtaaagattcatcattaaaatcaagaaatgcttctgcaaataacgatggtatggctagttttcgtgcaagaagggcaatttcgtctcttcgtactagaacctatgaagaaggcactttggctgtggaggatatggattgggatgcactgacagtcaaaggaacatgtcaggaaattgagaaacgctatctacgacttacagaagcacctgatcctgccaaagtaaggccagaagatgttctggagaaggcccttgcaatggttgaaacatcagaaaagaattacctttacaagtgtgatcaactaaaatctatccggcaagatcttacagttcagagaatccagaatgaactgactgtaaaggtttatgaaacccatgcccgattagctatgcaagctggcgatttacccgaatttaaccagtgccagtcacaactgaagaggctatatgcacaaggaatcaagggttgctattttgaattttctgcttacaatttgttgtgtgtcatgctacactctaataataaacgagacttgctgtcatcaatggcaagcttgtcaaaagaagccaaacaagatgcagctgttaagcattcccttgcagttcatgcttctgttttatcttgcaattacgttcaatttttcaaactatacaagaaggcacccaatttgaactcatgcctcatggatctatatgtggagcggatgcgctttgaagctatgaaatgcatgtctaggtcatatcgcccaactgtacctgtgggatatgttgcacagattttggggttcttgagaacagatacaggctgtgcaaccaatggggatgatggattagaaggatgcgaaaaatggttgaaagcgcatgggacagttctttcagaagatagcagtggggaattgcagatagatacgaaggcctcttcttctacactctacatgccagagccagagaacgccgttgcacatggtgatgcatcacttgctgttgatgacttttttgcacggactgacggacaacttaaaaggggcagcagcgatggaccaacagtggatactccgtagtagtattgggggctgccgtggcagtagtgctgaggtggcttcttccgtagaaattacaacagggggcatgaaatggaactgaccaacgatgccagcggagctacagtcggaacatgggtgctctaactgatccagtcatcgggttctggcatttgcctcaaagtgatctagtcatccagagttgcaccgcgatgagcttcgttgagaaggcagataagaaagcagcattacaagtttttaatgtcttggtggtttactcacccctaactttaagcgtagaaagaactgtgaaaaaacaactacaggtctacagctttgaagcatacacgtatgttttccggggctcctttttttctggctgccccttagtccgtgaagattgtaaaaatatttttaatgcacataaatttgctttcctatcctatcgaataacaacatttatgtacgtactaatactcctatagttatatctctcgctcgctcgagccgaaccgtttactgatactaagtctttcatatatatgatgatgcgatagcccgaaatggcttgtt

SEQ ID NO: 76675 - DNA, 815 bp, Zea Mays
gaaaatatcccagcctgaaaaccacaccggaagggcacgcgacggcggtggcacggatacgaaattcttcaatccggcgtcgatctgctccggcgaccgccttctcactggacgtcgcagaagtcaacgcggtcttcttgatgtcccgtgcctccgcctctcgtccctgcttctggtgccgaagcactctccgctacgtggccgactggctgatctgctcccggttcagtttcgtgtggatgtctggttttgcttgcttgcttgcgctctcctcctttgtaaccagacgacagagaaagggcagtagtaccaacgcctggattgttattaagctgcttgctgatcatgtatatgtgtccactcaattcaaccagggctggcggcaaggaaatctttgtccactctgtcaagtgtggtacgctttgcttaagccaatttgattatttttttgagttgggtggtcattcaatgttgcccaatatgcaacgcagcagtggtcatttcgaattgaatgttcttacattctactctctgagtggaaagaatgcaactccaagttcagtcaccttttttgtctctaatgaaattctttcagggacctttacaactaattttaacaactaatttatcaaaataaatgagtaatacatttagcttctgttcttgatgtgtgagtctagtttgagagtttaaactgaatcttagaatgctatagagattcaaaaaaaattattatttctttatttcaaatatgtctgaaacatacaatactgttgtttttcgaaaccagttggaggatcagtagtgcagtccag

SEQ ID NO: 76676 - DNA, 914 bp, Zea Mays
ccggtaaccacgccctgtccttccggggtggaaaatatcccagcctgaaaaccacaccggaagggcacgcgacggcggtggcacggatacgaaattcttcaatccggcgtcgatctgctccggcgaccgccttctcactggacgtcgcagaagtcaacgcggtcttcttgatgtcccgtgcctccgcctctcgtccctgcttctggtgccgaagcactctccgctacgtggccgactggctgatctgctcccggttcagtttcgtgtggatgtctggttttgcttgcttgcttgcgctctcctcctttgtaaccaggtgtgatacagatacaaccatgtggtgcaaggtcgtggcggctgggtgacgccgccatgctgcaaccagacgacagagaaagggcagtagtaccaacgcctggattgttattaagctgcttgctgatcatgtatatgtgtccactcaattcaaccagggctggcggcaaggaaatctttgtccactctgtcaagtgtggtacgctttgcttaagccaatttgattatttttttgagttgggtggtcattcaatgttgcccaatatgcaacgcagcagtggtcatttcgaattgaatgttcttacattctactctctgagtggaaagaatgcaactccaagttcagtcaccttttttgtctctaatgaaattctttcagggacctttacaactaattttaacaactaatttatcaaaataaatgagtaatacatttagcttctgttcttgatgtgtgagtctagtttgagagtttaaactgaatcttagaatgctatagagattcaaaaaaaattattatttctttatttcaaatatgtctgaaacatacaatactgttgtttttcgaaaccagttggaggatcagtagtgcagtccag

SEQ ID NO: 76677 - DNA, 550 bp, Zea Mays
gtcgttccaggccggtaaccacgccctgtccttccggggtggaaaatatcccagcctgaaaaccacaccggaagggcacgcgacggcggtggcacggatacgaaattcttcaatccggcgtcgatctgctccggcgaccgccttctcactggacgtcgcagaagtcaacgcggtcttcttgatgtcccgtgcctccgcctctcgtccctgcttctggtgccgaagcactctccgctacgtggccgactggctgatctgctcccggttcagtttcgtgtggatgtctggttttgcttgcttgcttgcgctctcctcctttgtaaccaggtgtgatacagatacaaccatgtggtgcaaggtcgtggcggctgggtgacgccgccatgctgcaaccagacgacagagaaagggcagtagtaccaacgcctggattgttattaagctgcttgctgatcatgtatatgtgtccactcaattcaaccagggctggcggcaaggaaatctttgtccactctgtcaagtgtgttggaggatcagtagtgcagtccag

SEQ ID NO: 76678 - DNA, 2130 bp, Zea Mays
gtccgtgccctcacacgtcgtctctctcgccgcgcaccttgtctctgtcctctcccatccatctccctccgcacactccgccgcctcaccttctccccctctctctccccgccgccgtggtccccgccgccacgctgtggcccttcttcgacgccgtctgctccgacaccgccgtcaccttcggctcgctcgtcgcgctccacgagtacctttgagaattcgtcggtagtaccattgtatcattgcactggattaaatcgatgctattcagtcctatatccccgaaggagacgccttgaagttgatagccggacagttcatcaggtagacaagtcaaatcagtgctgcataatatacttgcctcttctgaagtaagcaaaatattttagtataagacaggataattatcgatcataaatacatatgcatgcttataatataattttagctgatagtagcgattgtttgcaatagattttatcgaaaaacagaccattcagtagttatagattctctaatatgtcagccaaatgaactaagaattctgtccagatgaaaataaaagattaaagatgttctcaaagacaaataaaatatgttcgttgggtaattcactgaaaagttttctgctcccgaagccagctatggtgtgacaaaaaatatagcaagtaaatagactccactatgcagcgctataaaatcagaagacaagatgatacgacccaacatgtaatcttgtttgttgcaggtctttactatgactgcaactttgaagtttggtattcatataatcaataggctcaacagtatgtcccttgtaaatgttcttgtttcttacaagtggtgatggtggtagtggtctggtctctgtgtgagcattggtctagaggatcgtgaagctatgcggctcttctttcatgttcaagatgaagttcatgaagcttggatcgaatctggatacctttaatgatgatggcaatgaagtcagaggttataatcactcctgagcacaacgaagaagggatttacacgatcagattctacattcagatgcaggctatctcctgctaatgttgctgccgaagaaatgaacttcttacttttatgtagaggcaacacttactaatatgatgctcgaatttgcaatgaatgatgtgtgtgtgtgctatttttggaccactggtatttaaaactgacaaccatgaagttttggtacacatgaatcccaagcaatttgtgtaaaatatggctaaacaaaacattgatgcctgatttatgatccagctgattttgatgtcaatttattatacatgtatatatctttacaataacttcttatgtatatggttatattgcaaatactattgtctctttactgtctcccgatggggcgtccgaatggatgcctcctcttctagtaaattaaactcgcccggcctctttcgagattcccatgcatgacatgattactgactagtgcgtcgatcgcacgtccactccagaattaggcaccgtactactacgtggccgagaagcagtcaattaatttgttccttcaaagaacgacggtaaatataatatatacaccaccccacccgactttttttggataaaaaaaataaacgcacaccagaccgatgatcgatagtacgtaataataataatcaacagcacgcgcggcacggcaaatcagcgacgcatacgcatagcctctcttcgcctttataaatacttcgccaccgtctccatcctctacacacacgaaaacagcaccagagagagagaggacggcagtcacagtcaggcagtctgcaggcacatccatggagtactactacgcctaccagcacagcaacagcaacagcagcggcggcttgagctcaaaggagaagaggccgccgctgaagcgggggcagctcaagcggcagatcgtgaggaccatcagcaacctcgtggtgccgaggcacgccgccgtcgctgggtcgagggagaaggcagatcgcggcagcggattcggcggaggacggagctacaactgatgatggatctctcggagaaggcgtgatcagagatacgattcgcagcgccaggttgttatctgtcagtcagaagaaattaccttgttcttat

SEQ ID NO: 76679 - DNA, 903 bp, Zea Mays
cgcgcaccttgtctctgtcctctcccatccatctccctccgcacactccgccgcctcaccttctccccctctctctccccgccgccgtggtccccgccgccacgctgtggcccttcttcgacgccgtctgctccgacaccgccgtcaccttcggctcgctcgtcgcgctccacgagtacctttgagaattcgtcggtagtaccattgtatcattgcactggattaaatcgatgctattcagtcctatatccccgaaggagacgccttgaagttgatagccggacagttcatcagttcttgtttcttacaagtggtgatggtggtagtggtctggtctctgtgtgagcattggtctagaggatcgtgaagctatgcggctcttctttcatgttcaagatgaagttcatgaagcttggatcgaatctggatacctttaatgatgatggcaatgaagtcagaggttataatcactcctgagcacaacgaagaagggatttacacgatcagattctacattcagcgaagatgcaggctatctcctgctaatgttgctgccgaagaaatgaacttcttacttttatgtagaggcaacacttactaatatgatgctcgaatttgcaatgaatgatgtgtgtgtgtgctatttttggaccactggtatttaaaactgacaaccatgaagttttggtacacatgaatcccaagcaatttgtgtaaaatatggctaaacaaaacattgatgcctgatttatgatccagctgattttgatgtcaatttattatacatgtatatatctttacaataacttcttatgtatatggttatattgcaaatactattgtctctttactgtctcccgatggggcgtccgaatggatgcctcctcttctagtaaattaaac

SEQ ID NO: 76680 - DNA, 1031 bp, Zea Mays
ctctctcgccgcgcaccttgtctctgtcctctcccatccatctccctccgcacactccgccgcctcaccttctccccctctctctccccgccgccgtggtccccgccgccacgctgtggcccttcttcgacgccgtctgctccgacaccgccgtcaccttcggctcgctcgtcgcgctccacgagtacctttgagaattcgtcgtccaggtagtaccattgtatcattgcactggattaaatcgatgctattcagtcctatatccccgaaggagacgccttgaagttgatagccggacagttcatcaggtctttactatgactgcaactttgaagtttggtattcatataatcaataggctcaacagtatgtcccttgtaaatgttcttgtttcttacaagtggtgatggtggtagtggtctggtctctgtgtgagcattggtctagaggatcgtgaagctatgcggctcttctttcatgttcaagatgaagttcatgaagcttggatcgaatctggatacctttaatgatgatggcaatgaagtcagaggttataatcactcctgagcacaacgaagaagggatttacacgatcagattctacattcagcgaagctttctttcttaacatgttgctattgtgtccagcgaagatgcaggctatctcctgctaatgttgctgccgaagaaatgaacttcttacttttatgtagaggcaacacttactaatatgatgctcgaatttgcaatgaatgatgtgtgtgtgtgctatttttggaccactggtatttaaaactgacaaccatgaagttttggtacacatgaatcccaagcaatttgtgtaaaatatggctaaacaaaacattgatgcctgatttatgatccagctgattttgatgtcaatttattatacatgtatatatctttacaataacttcttatgtatatggttatattgcaaatactattgtctctttactgtctcccgatggggcgtccgaatggatgcctcctcttctagtaaattaaac

SEQ ID NO: 76681 - DNA, 851 bp, Zea Mays
ctctctcgccgcgcaccttgtctctgtcctctcccatccatctccctccgcacactccgccgcctcaccttctccccctctctctccccgccgccgtggtccccgccgccacgctgtggcccttcttcgacgccgtctgctccgacaccgccgtcaccttcggctcgctcgtcgcgctccacgagtacctttgagaattcgtcgttcttgtttcttacaagtggtgatggtggtagtggtctggtctctgtgtgagcattggtctagaggatcgtgaagctatgcggctcttctttcatgttcaagatgaagttcatgaagcttggatcgaatctggatacctttaatgatgatggcaatgaagtcagaggttataatcactcctgagcacaacgaagaagggatttacacgatcagattctacattcagcgaagctttctttcttaacatgttgctattgtgtccagcgaagatgcaggctatctcctgctaatgttgctgccgaagaaatgaacttcttacttttatgtagaggcaacacttactaatatgatgctcgaatttgcaatgaatgatgtgtgtgtgtgctatttttggaccactggtatttaaaactgacaaccatgaagttttggtacacatgaatcccaagcaatttgtgtaaaatatggctaaacaaaacattgatgcctgatttatgatccagctgattttgatgtcaatttattatacatgtatatatctttacaataacttcttatgtatatggttatattgcaaatactattgtctctttactgtctcccgatggggcgtccgaatggatgcctcctcttctagtaaattaaac

SEQ ID NO: 76682 - DNA, 818 bp, Zea Mays
gtcgtctctctcgccgcgcaccttgtctctgtcctctcccatccatctccctccgcacactccgccgcctcaccttctccccctctctctccccgccgccgtggtccccgccgccacgctgtggcccttcttcgacgccgtctgctccgacaccgccgtcaccttcggctcgctcgtcgcgctccacgagtacctttgagaattcgtcgttcttgtttcttacaagtggtgatggtggtagtggtctggtctctgtgtgagcattggtctagaggatcgtgaagctatgcggctcttctttcatgttcaagatgaagttcatgaagcttggatcgaatctggatacctttaatgatgatggcaatgaagtcagaggttataatcactcctgagcacaacgaagaagggatttacacgatcagattctacattcagcgaagatgcaggctatctcctgctaatgttgctgccgaagaaatgaacttcttacttttatgtagaggcaacacttactaatatgatgctcgaatttgcaatgaatgatgtgtgtgtgtgctatttttggaccactggtatttaaaactgacaaccatgaagttttggtacacatgaatcccaagcaatttgtgtaaaatatggctaaacaaaacattgatgcctgatttatgatccagctgattttgatgtcaatttattatacatgtatatatctttacaataacttcttatgtatatggttatattgcaaatactattgtctctttactgtctcccgatggggcgtccgaatggatgcctcctcttctagtaaattaaac

SEQ ID NO: 76683 - DNA, 996 bp, Zea Mays
cacgtcgtctctctcgccgcgcaccttgtctctgtcctctcccatccatctccctccgcacactccgccgcctcaccttctccccctctctctccccgccgccgtggtccccgccgccacgctgtggcccttcttcgacgccgtctgctccgacaccgccgtcaccttcggctcgctcgtcgcgctccacgagtacctttgagaattcgtcggtagtaccattgtatcattgcactggattaaatcgatgctattcagtcctatatccccgaaggagacgccttgaagttgatagccggacagttcatcaggtctttactatgactgcaactttgaagtttggtattcatataatcaataggctcaacagtatgtcccttgtaaatgttcttgtttcttacaagtggtgatggtggtagtggtctggtctctgtgtgagcattggtctagaggatcgtgaagctatgcggctcttctttcatgttcaagatgaagttcatgaagcttggatcgaatctggatacctttaatgatgatggcaatgaagtcagaggttataatcactcctgagcacaacgaagaagggatttacacgatcagattctacattcagcgaagatgcaggctatctcctgctaatgttgctgccgaagaaatgaacttcttacttttatgtagaggcaacacttactaatatgatgctcgaatttgcaatgaatgatgtgtgtgtgtgctatttttggaccactggtatttaaaactgacaaccatgaagttttggtacacatgaatcccaagcaatttgtgtaaaatatggctaaacaaaacattgatgcctgatttatgatccagctgattttgatgtcaatttattatacatgtatatatctttacaataacttcttatgtatatggttatattgcaaatactattgtctctttactgtctcccgatggggcgtccgaatggatgcctcctcttctagtaaattaaac

SEQ ID NO: 76684 - DNA, 818 bp, Zea Mays
cacacgtcgtctctctcgccgcgcaccttgtctctgtcctctcccatccatctccctccgcacactccgccgcctcaccttctccccctctctctccccgccgccgtggtccccgccgccacgctgtggcccttcttcgacgccgtctgctccgacaccgccgtcaccttcggctcgctcgtcgcgctccacgagtacctttgagaattcgtcgttcttgtttcttacaagtggtgatggtggtagtggtctggtctctgtgtgagcattggtctagaggatcgtgaagctatgcggctcttctttcatgttcaagatgaagttcatgaagcttggatcgaatctggatacctttaatgatgatggcaatgaagtcagaggttataatcactcctgagcacaacgaagaagggatttacacgatcagattctacattcagatgcaggctatctcctgctaatgttgctgccgaagaaatgaacttcttacttttatgtagaggcaacacttactaatatgatgctcgaatttgcaatgaatgatgtgtgtgtgtgctatttttggaccactggtatttaaaactgacaaccatgaagttttggtacacatgaatcccaagcaatttgtgtaaaatatggctaaacaaaacattgatgcctgatttatgatccagctgattttgatgtcaatttattatacatgtatatatctttacaataacttcttatgtatatggttatattgcaaatactattgtctctttactgtctcccgatggggcgtccgaatggatgcctcctcttctagtaaattaaac

SEQ ID NO: 76685 - DNA, 1430 bp, Zea Mays
cgtgccctcacacgtcgtctctctcgccgcgcaccttgtctctgtcctctcccatccatctccctccgcacactccgccgcctcaccttctccccctctctctccccgccgccgtggtccccgccgccacgctgtggcccttcttcgacgccgtctgctccgacaccgccgtcaccttcggctcgctcgtcgcgctccacgagtacctttgagaattcgtcgtccaggtagtaccattgtatcattgcactggattaaatcgatgctattcagtcctatatccccgaaggagacgccttgaagttgatagccggacagttcatcaggtagacaagtcaaatcagtgctgcataatatacttgcctcttctgaagtaagcaaaatattttagtataagacaggataattatcgatcataaatacatatgcatgcttataatataattttagctgatagtagcgattgtttgcaatagattttatcgaaaaacagaccattcagtagttatagattctctaatatgtcagccaaatgaactaagaattctgtccagatgaaaataaaagattaaagatgttctcaaagacaaataaaatatgttcgttgggtaattcactgaaaagttttctgctcccgaagccagctatggtgtgacaaaaaatatagcaagtaaatagactccactatgcagcgctataaaatcagaagacaagatgatacgacccaacatgtaatcttgtttgttgcaggtctttactatgactgcaactttgaagtttggtattcatataatcaataggctcaacagtatgtcccttgtaaatgttcttgtttcttacaagtggtgatggtggtagtggtctggtctctgtgtgagcattggtctagaggatcgtgaagctatgcggctcttctttcatgttcaagatgaagttcatgaagcttggatcgaatctggatacctttaatgatgatggcaatgaagtcagaggttataatcactcctgagcacaacgaagaagggatttacacgatcagattctacattcagatgcaggctatctcctgctaatgttgctgccgaagaaatgaacttcttacttttatgtagaggcaacacttactaatatgatgctcgaatttgcaatgaatgatgtgtgtgtgtgctatttttggaccactggtatttaaaactgacaaccatgaagttttggtacacatgaatcccaagcaatttgtgtaaaatatggctaaacaaaacattgatgcctgatttatgatccagctgattttgatgtcaatttattatacatgtatatatctttacaataacttcttatgtatatggttatattgcaaatactattgtctctttactgtctcccgatggggcgtccgaatggatgcctcctcttctagtaaattaaac

SEQ ID NO: 76686 - DNA, 1742 bp, Zea Mays
cttcggtgggggattcttctcccttctttgtgatccagggctaggcaaaagccaactcctccaagctgcagcagctgtttccccacgaggaatatatgtatgtgggaatacgacaacaaaggctggcctaactgttgctgtggttaaagattctatgacaaatgattatgcatttgaggctggtgccatggtccttgctgatcgtggaatatgctgtattgatgagtttgataaaatgtttacagagcatcaggctttacttgaagccatggagcagcaatgtgtttctattgcaaaggctggtcttgtagcaagtttgtcagctcgaacttcagtgttggcagctgcaaatcctattggtggccattatgaccgagcaaaaacagtgaacgagaatctaaaaatgagtgctgccctcctttctcgatttgacttggtgtttattctacttgacaagccagatgagtcactagataaaagagtgtcagaccatataatagctctccataccaatgatgttgataatttcagacccaacaagaggaccagaacagggtcacattttgatggtgatccggggcttggagttggtggaaattcagtagcttcaaggctgaggctacacccagagaaagacaaggacttcactccattatctgggcaacttcttcgcaaatatatatcttattcaagagaacatgtcttccccagaatgtcaaaggcagcagctgcaattttgaaagaattttatttgaagctgagaaaccgcagtgcttctgctgatggtacacccatcacagccaggcagttagaaagcctagtcagattagccgaagctcgtgctcgcgtggatctaagagatgaagtgactgaagaagatgctcaggatgttgtcgatatcatgaaagaatctctgtatgacaaatatgttgatgaacatggttttgttgattttactcggagcggtggaatgagccaaccgaagcaggcaaagaagtttctgaatgcattaaacaaggaatctgagttgcagcaaaaggactgcttctcgagaactgaactttacaccatagctgataagatcagcttgcaagttccagacttggacactcttgtagaaaagatgaacattgccggttaccttattcaaaaaagatcagggatgtatcagctggtgactgcgccatattaacaatgcagccaacgaggtcaagatggagagttttcttgaatgaaactagaatttgcacctgctttgtctgtactagtgcctgctctagatctccagacactctggaaggccttaatccatttcaacataattgacatgtacctttcagctcatttccccccgtcccgtgagagatgtatggtttggaagctatgcgtatcgtcatggctgcgcacatacgtgctgcagtgtacaggcgactgaagtgcacgcgtcgcaggatgagcactaactttggtagcttggtgtatgccatggttgcgatatgatatattattgtgaaacaggaacctctagcggttattagtttatagatattcaagtttgccaatgaaacatccagaatagcatatgatgcattttacaccccttacacccgatcactcggaaaacatctagcacgctgtaaattactccctcagcaatagtaattattgctgttactgcgctgcactgcttgggaacactccttttcaaagccacattttataatacactagcacaatgtttg

SEQ ID NO: 76687 - DNA, 1662 bp, Zea Mays
cacaggtcttgttaactgtggaaggctagttgcactggtctagtgtttcccttcggtgggggattcttctcccttctttgtgatccagggctaggcaaaagccaactcctccaagctgcagcagctgtttccccacgaggaatatatgtatgtgggaatacgacaacaaaggctggcctaactgttgctgtggttaaagattctatgacaaatgattatgcatttgaggctggtgccatggtccttgctgatcgtggaatatgctgtattgatgagtttgataaaatgtttacagagcatcaggctttacttgaagccatggagcagcaatgtgtttctattgcaaaggctggtcttgtagcaagtttgtcagctcgaacttcagtgttggcagctgcaaatcctattggtggccattatgactccataccaatgatgttgataatttcagacccaacaagaggaccagaacagggtcacattttgatggtgatccggggcttggagttggtggaaattcagtagcttcaaggctgaggctacacccagagaaagacaaggacttcactccattatctgggcaacttcttcgcaaatatatatcttattcaagagaacatgtcttccccagaatgtcaaaggcagcagctgcaattttgaaagaattttatttgaagctgagaaaccgcagtgcttctgctgatggtacacccatcacagccaggcagttagaaagcctagtcagattagccgaagctcgtgctcgcgtggatctaagagatgaagtgactgaagaagatgctcaggatgttgtcgatatcatgaaagaatctctgtatgacaaatatgttgatgaacatggttttgttgattttactcggagcggtggaatgagccaaccgaagcaggcaaagaagtttctgaatgcattaaacaaggaatctgagttgcagcaaaaggactgcttctcgagaactgaactttacaccatagctgataagatcagcttgcaagttccagacttggacactcttgtagaaaagatgaacattgccggttaccttattcaaaaaagatcagggatgtatcagctggtgactgcgccatattaacaatgcagccaacgaggtcaagatggagagttttcttgaatgaaactagaatttgcacctgctttgtctgtactagtgcctgctctagatctccagacactctggaaggccttaatccatttcaacataattgacatgtacctttcagctcatttccccccgtcccgtgagagatgtatggtttggaagctatgcgtatcgtcatggctgcgcacatacgtgctgcagtgtacaggcgactgaagtgcacgcgtcgcaggatgagcactaactttggtagcttggtgtatgccatggttgcgatatgatatattattgtgaaacaggaacctctagcggttattagtttatagatattcaagtttgccaatgaaacatccagaatagcatatgatgcattttacaccccttacacccgatcactcggaaaacatctagcacgctgtaaattactccctcagcaatagtaattattgctgttactgcgctgcactgcttgggaacactccttttcaaagccacattttataatacactagcacaatgtttg

SEQ ID NO: 76688 - DNA, 2784 bp, Zea Mays
ccggtaaggcgacgaaatgtacggcgacacaatgaagggtcaccaacccaaaggggacaagggcaatagggacgactacaccttcaattcagaaggctcgcggatgtctggccgacatactttcccgaggaggccgaggtcgggctgtcagaatccgaccagaaggtccgcctcaccaccgccctggctgatttcttctccacgcccgagatggcggaagtccttcgctcacgggttgaagatgatggcaacgacatcttgtgtcttccaattgatttccagcagcttcaggagttacgcatgtttattgaagataaactcaatgagtccccaaaagaagccttgctttgcatgggagttgcagctcatctggctctgtgctcggacaaggacaacaaaaggaacaagataaatatcaggctttacaacacgggagcagctattgcattaaagaaactaaaagcagcctttattaagaaacttgtcacagtgcgtggtactgtgctcaaagtcagcactgtaaaacctcttgttttgtggttgaaattccgatgcatgaagtgccgtaaagaaataccccgtgtgttttgtgatggaaaattttctcctccaatgtcctgtaccatccagggatgcaagagcagaagctttatcccagatagatctagtgcacagctgatggattttcaaaaaataagaatacaggagcttgcaagcgctgacaaccatgaagaaggccgagtgccacgcacagtggagtgtgagcttacagaagatctcgttgattgttgcatccctggagaaattgtaacggtaactgcaattgtgaaagtgctcaacaaccatatggatgttggtggagggaagtccagaatcagcagtcaaggtttatactacctgtatctggaggcagtttcagtgagaaagttgaagtcccatgctgtttctgacaaagaaattcaagctagtggaatttgtcattctcagtcttctactgtaaatgatgattttgctgtcaaatataaagaaaaatatggcaccgatgtttttcgcagaatacttcaatccttttgtccctctatctatgggcatgaacttgtaaaagctggtatcacacttgctctttttggcggtgtgcagaagaactcaatggatcaaaacatggtccctgttcgaggagatattcatgttattgtagttggtgatccagggctaggcaaaagccaactcctccaagctgcagcagctgtttccccacgaggaatatatgtatgtgggaatacgacaacaaaggctggcctaactgttgctgtggttaaagattctatgacaaatgattatgcatttgaggctggtgccatggtccttgctgatcgtggaatatgctgtattgatgagtttgataaaatgtttacagagcatcaggctttacttgaagccatggagcagcaatgtgtttctattgcaaaggctggtcttgtagcaagtttgtcagctcgaacttcagtgttggcagctgcaaatcctattggtggccattatgactccataccaatgatgttgataatttcagacccaacaagaggaccagaacagggtcacattttgatggtgatccggggcttggagttggtggaaattcagtagcttcaaggctgaggctacacccagagaaagacaaggacttcactccattatctgggcaacttcttcgcaaatatatatcttattcaagagaacatgtcttccccagaatgtcaaaggcagcagctgcaattttgaaagaattttatttgaagctgagaaaccgcagtgcttctgctgatggtacacccatcacagccaggcagttagaaagcctagtcagattagccgaagctcgtgctcgcgtggatctaagagatgaagtgactgaagaagatgctcaggatgttgtcgatatcatgaaagaatctctgtatgacaaatatgttgatgaacatggttttgttgattttactcggagcggtggaatgagccaaccgaagcaggcaaagaagtttctgaatgcattaaacaaggaatctgagttgcagcaaaaggactgcttctcgagaactgaactttacaccatagctgataagatcagcttgcaagttccagacttggacactcttgtagaaaagatgaacattgccggttaccttattcaaaaaagatcagggatgtatcagctggtgactgcgccatattaacaatgcagccaacgaggtcaagatggagagttttcttgaatgaaactagaatttgcacctgctttgtctgtactagtgcctgctctagatctccagacactctggaaggccttaatccatttcaacataattgacatgtacctttcagctcatttccccccgtcccgtgagagatgtatggtttggaagctatgcgtatcgtcatggctgcgcacatacgtgctgcagtgtacaggcgactgaagtgcacgcgtcgcaggatgagcactaactttggtagcttggtgtatgccatggttgcgatatgatatattattgtgaaacaggaacctctagcggttattagtttatagatattcaagtttgccaatgaaacatccagaatagcatatgatgcattttacaccccttacacccgatcactcggaaaacatctagcacgctgtaaattactccctcagcaatagtaattattgctgttactgcgctgcactgcttgggaacactccttttcaaagccacattttataatacactagcacaatgtttg

SEQ ID NO: 76689 - DNA, 2915 bp, Zea Mays
tccggtaaggcgacgaaatgtacggcgacacaatgaagggtcaccaacccaaaggggacaagggcaatagggacgactacaccttcaattcagaaggctcgcggatgtctggccgacatactttcccgaggaggccgaggtcgggctgtcagaatccgaccagaaggtccgcctcaccaccgccctggctgatttcttctccacgcccgagatggcggaagtccttcgctcacgggttgaagatgatggcaacgacatcttgtgtcttccaattgatttccagcagcttcaggagttacgcatgtttattgaagataaactcaatgagtccccaaaagaagccttgctttgcatgggagttgcagctcatctggctctgtgctcggacaaggacaacaaaaggaacaagataaatatcaggctttacaacacgggagcagctattgcattaaagaaactaaaagcagcctttattaagaaacttgtcacagtgcgtggtactgtgctcaaagtcagcactgtaaaacctcttgttttgtggttgaaattccgatgcatgaagtgccgtaaagaaataccccgtgtgttttgtgatggaaaattttctcctccaatgtcctgtaccatccagggatgcaagagcagaagctttatcccagatagatctagtgcacagctgatggattttcaaaaaataagaatacaggagcttgcaagcgctgacaaccatgaagaaggccgagtgccacgcacagtggagtgtgagcttacagaagatctcgttgattgttgcatccctggagaaattgtaacggtaactgcaattgtgaaagtgctcaacaaccatatggatgttggtggagggaagtccagaatcagcagtcaaggtttatactacctgtatctggaggcagtttcagtgagaaagttgaagtcccatgctgtttctgacaaagaaattcaagctagtggaatttgtcattctcagtcttctactgtaaatgatgattttgctgtcaaatataaagaaaaatatggcaccgatgtttttcgcagaatacttcaatccttttgtccctctatctatgggcatgaacttgtaaaagctggtatcacacttgctctttttggcggtgtgcagaagaactcaatggatcaaaacatggtccctgttcgaggagatattcatgttattgtagttggtgatccagggctaggcaaaagccaactcctccaagctgcagcagctgtttccccacgaggaatatatgtatgtgggaatacgacaacaaaggctggcctaactgttgctgtggttaaagattctatgacaaatgattatgcatttgaggctggtgccatggtccttgctgatcgtggaatatgctgtattgatgagtttgataaaatgtttacagagcatcaggctttacttgaagccatggagcagcaatgtgtttctattgcaaaggctggtcttgtagcaagtttgtcagctcgaacttcagtgttggcagctgcaaatcctattggtggccattatgaccgagcaaaaacagtgaacgagaatctaaaaatgagtgctgccctcctttctcgatttgacttggtgtttattctacttgacaagccagatgagtcactagataaaagagtgtcagaccatataatagctctccataccaatgatgttgataatttcagacccaacaagaggaccagaacagggtcacattttgatggtgatccggggcttggagttggtggaaattcagtagcttcaaggctgaggctacacccagagaaagacaaggacttcactccattatctgggcaacttcttcgcaaatatatatcttattcaagagaacatgtcttccccagaatgtcaaaggcagcagctgcaattttgaaagaattttatttgaagctgagaaaccgcagtgcttctgctgatggtacacccatcacagccaggcagttagaaagcctagtcagattagccgaagctcgtgctcgcgtggatctaagagatgaagtgactgaagaagatgctcaggatgttgtcgatatcatgaaagaatctctgtatgacaaatatgttgatgaacatggttttgttgattttactcggagcggtggaatgagccaaccgaagcaggcaaagaagtttctgaatgcattaaacaaggaatctgagttgcagcaaaaggactgcttctcgagaactgaactttacaccatagctgataagatcagcttgcaagttccagacttggacactcttgtagaaaagatgaacattgccggttaccttattcaaaaaagatcagggatgtatcagctggtgactgcgccatattaacaatgcagccaacgaggtcaagatggagagttttcttgaatgaaactagaatttgcacctgctttgtctgtactagtgcctgctctagatctccagacactctggaaggccttaatccatttcaacataattgacatgtacctttcagctcatttccccccgtcccgtgagagatgtatggtttggaagctatgcgtatcgtcatggctgcgcacatacgtgctgcagtgtacaggcgactgaagtgcacgcgtcgcaggatgagcactaactttggtagcttggtgtatgccatggttgcgatatgatatattattgtgaaacaggaacctctagcggttattagtttatagatattcaagtttgccaatgaaacatccagaatagcatatgatgcattttacaccccttacacccgatcactcggaaaacatctagcacgctgtaaattactccctcagcaatagtaattattgctgttactgcgctgcactgcttgggaacactccttttcaaagccacattttataatacactagcacaatgtttg

SEQ ID NO: 76690 - DNA, 1584 bp, Zea Mays
ccggtaaggcgacgaaatgtacggcgacacaatgaagggtcaccaacccaaaggggacaagggcaatagggacgactacaccttcaattcagaaggctcgcggatgtctggccgacatactttcccgaggaggccgaggtcgggctgtcagaatccgaccagaaggtccgcctcaccaccgccctggctgatttcttctccacgcccgagatggcggaagtccttcgctcacgggttgaagatgatggcaacgacatcttgtgtcttccaattgatttccagcagcttcaggagttacgcatgtttattgaagataaactcaatgagtccccaaaagaagccttgctttgcatgggagttgcagctcatctggctctgtgctcggacaaggacaacaaaaggaacaagataaatatcaggctttacaacacgggagcagctattgcattaaagaaactaaaagcagcctttattaagaaacttgtcacagtgcgtggtactgtgctcaaagtcagcactgtaaaacctcttgttttgtggttgaaattccgatgcatgaagtgccgtaaagaaataccccgtgtgttttgtgatggaaaattttctcctccaatgtcctgtaccatccagggatgcaagagcagaagctttatcccagatagatctagtgcacagctgatggattttcaaaaaataagaatacaggagcttgcaagcgctgacaaccatgaagaaggccgagtgccacgcacagtggagtgtgagcttacagaagatctcgttgattgttgcatccctggagaaattgtaacggtaactgcaattgtgaaagtgctcaacaaccatatggatgttggtggagggaagtccagaatcagcagtcaaggtttatactacctgtatctggaggcagtttcagtgagaaagttgaagtcccatgctgtttctgacaaagaaattcaagctagtggaatttgtcattctcagtcttctactgtaaatgatgattttgctgtcaaatataaagaaaaatatggcaccgatgtttttcgcagaatacttcaatccttttgtccctctatctatgggcatgaacttgtaaaagctggtatcacacttgctctttttggcggtgtgcagaagaactcaatggatcaaaacatggtccctgttcgaggagatattcatgttattgtagttggtgatccagggctaggcaaaagccaactcctccaagctgcagcagctgtttccccacgaggaatatatgtatgtgggaatacgacaacaaaggctggcctaactgttgctgtggttaaagattctatgacaaatgattatgcatttgaggctggtgccatggtccttgctgatcgtggaatatgctgtattgatgagtttgataaaatgtttacagagcatcaggctttacttgaagccatggagcagcaatgtgtttctattgcaaaggctggtcttgtagcaagtttgtcagctcgaacttcagtgttggcagctgcaaatcctattggtggccattatgagtgcttggctggttaaggccgggccgacggcggcggttgc

SEQ ID NO: 76691 - DNA, 242 bp, Zea Mays
ccggtaaggcgacgaaatgtacggcgacacaatgaagggtcaccaacccaaaggggacaagggcaatagggacgactacaccttcaattcagaaggctcgcggatgtctggccgacatactttcccgaggaggccgaggtcgggctgtcagaatccgaccagaaggtccgcctcaccaccgccctggctgatttcttctccacgcccgagatggcggaagtccttcgctcacgggttgacga

SEQ ID NO: 76692 - DNA, 2710 bp, Zea Mays
ccccacgccgtctccaccccccatcaggcaccccccccgccccgccccgctcgtcgccatagagtttcatcgcctcgctcgcgtcgccaactacatccgctcgaaccgcgtccttacatgccatgcccaccatcctcgctcgctccaaccatgtatctacatgtcgcctccgacatccacgcccatgcttcgtgtagtgcttgacgcgcccgctccaaccgcgtctatgcatgccgtgactgccatcctcgccacccgcatgcctcatctgcatcctccgtttatcgtacttatccgcgatgatatgctagagcgtcagcaaggcggactctccaaacctccagagagggagggaggcagcagccaatgcccagcacgtaccaatctgcgtggcgggaggtgcccggactgcgtacccacgggcgagcaggattttgacgatccacgacccgatgaagtcgccggcgtcggtgacgcacaaggcggcagtggccatcgtgcgctgacgcccagtcccttcctctcgcgagcgaaacggggggcggtggtgccgccgggcgaatggattcgtccgagagcgagcaaataggggtaagcatttatcaagcggaagtgggaagaaatggtacagtgaagtggaggaaatgacacagaacacgagcgaagctggcatctcaaggcggtcgcactcgcacggttagcagtgcactcccctaatttctgccctttttatggtttcacgattatctgaatatggagttcaaggattgatcttttctgagttctttgttgccatatttttctgtccatgtaataaggttgtgggtaaaatattgtgtcaatcgggcttgtgtgttgcagttctattcttgtgtagtgcagctccgaagtcgctgctaccaggtgcccccgtgctggggcataggtgcagtcgccgctgcgcccagcctacacaaaggcagctaccgttgcgacaacgagagggagctcccaaggcaccaatgttgttgctgccagttcttcaaagagttattgatggttcacaaaagaccactgttgctctgccaattcacaaagccttgatgattgttatgatggaaccaatgttgaggcctacaacaatgatgtcattgttcccatgggacctcaatctccaaaaaaccaagaggccgtgggaagaggaatgtgacaatgagaaggttcagttaaagactattggtacattttatcgaatattttatttttatttcagcatatgctcgcttgttgctctcatgttttaaaccatgttataacttcactgcttgccttggaaaattttaatttgcagcaataatttctaggtaatttgtactacatgtaacttctaagttatagtagaattgtcccgaaaaacttgtcgctacaaatatgtctgttttcttttgagtgtgtgctcggattaacaatatacattgcatctctctgtgttcatgcatgccaatgggcattaatggtccatgcaaattaattgggttgggcctaaatcagctaacttcacatatcaatcttcatatatcctgtcagcaaggggtaaatagaatgtccaagtgtgtatgaaaaatacacgaaaggaaagaaaaatagaatgagtatgaaaaatacacaaaaggaaagaaaaatagaatgatcactcagtcaacaaaaaggatgtttttttgtgcacacgcgatatgttattcccttattctccagatatggtaatggtaaactcaatcaagcaggaaaagatgtcgccctaaccgttgggcaaacacctggatgacatcatcttctctgctaaaggcaccatattctcttcaaggatccaaacaattaccccacttgggaagaggaatgtgacggagttagcactacctccacataatgggaaggttgggttaaagcctattggtacctgaggacgccgttgcgggttcaagagttgctgtgtagcccctacgcgagctataggactaggggaggggaggccaagagtgaaccgttgcaaccagtcttattacgaataaccccatatatagttccaatttccaactgatccttggccctccaaatgtccaaactaccaaagtcaccatcatttcgcgtgcccagcaggccgaaggcatggaggtccgtaccatgagccgccgaagcggcggaggcgacgcgtcagcaggcgcctcgggtgggagctgcacgaaggccagctcaggcgacgcggtaactgggaggagccggtggcgcaggcgcacgaaggagagaagctgcgcccaggaggagcggatgatccggagcaggatctggaagagcagaccgaggccgagccaccccgccgccgccggatggctcggttgctgaactggcgcaacctccgtcgccgccgacatctgtctctggaggcggagacttagccgcgattgggagaacggaacggggaggaagcaccgaagcaatcatagagtcgtggtcgctgctctatctttcatttgtgtcggcaggttccctcaattccctcttaagggctggtttgacagtatcccgtgtatagctagagcccagggagataattgcatatttgggactcgaaacattgcgcttcgcacaaatgccattcaaaagattttcttcgtaaaaaagggactataaatatgttctaattgattatactaccatttaacgtgtattatac

SEQ ID NO: 76693 - DNA, 3120 bp, Zea Mays
ccccacgccgtctccaccccccatcaggcaccccccccgccccgccccgctcgtcgccatagagtttcatcgcctcgctcgcgtcgccaactacatccgctcgaaccgcgtccttacatgccatgcccaccatcctcgctcgctccaaccatgtatctacatgtcgcctccgacatccacgcccatgcttcgtgtagtgcttgacgcgcccgctccaaccgcgtctatgcatgccgtgactgccatcctcgccacccgcatgcctcatctgcatcctccgtttatcgtacttatccgcggtataccttccctcatcgttcagtccgcgctcactctgccccacgatccgcttctcccccgcgcccctcggcaagctcgcagtccaggatccgattctcgcgtcgccctcccgccgcgcccctcggcaagctcgcaatccaggatccgattctcgcgtcgccctcccgccgcgcccctcggcatctcaactacctcgtgatgcctcccccacccccgatctataaaccagccgctcgccactcctcccgtactctcgcccccgacctcatggaaggatccgcctctcgcgcgcccccgccgacgcacgcaactcgcagacggcgcccccccagatccacttctcgctggccgctcagatcctccatatcctgacctctccctcctcttgctgcagatgatatgctagagcgtcagcaaggcggactctccaaacctccagagagggagggaggcagcagccaatgcccagcacgtaccaatctgcgtggcgggaggtgcccggactgcgtacccacgggcgagcaggattttgacgatccacgacccgatgaagtcgccggcgtcggtgacgcacaaggcggcagtggccatcgtgcgctgacgcccagtcccttcctctcgcgagcgaaacggggggcggtggtgccgccgggcgaatggattcgtccgagagcgagcaaataggggtaagcatttatcaagcggaagtgggaagaaatggtacagtgaagtggaggaaatgacacagaacacgagcgaagctggcatctcaaggcggtcgcactcgcacgttctattcttgtgtagtgcagctccgaagtcgctgctaccaggtgcccccgtgctggggcataggtgcagtcgccgctgcgcccagcctacacaaaggcagctaccgttgcgacaacgagagggagctcccaaggcaccaatgttgttgctgccagttcttcaaagagttattgatggttcacaaaagaccactgttgctctgccaattcacaaagccttgatgattgttatgatggaaccaatgttgaggcctacaacaatgatgtcattgttcccatgggacctcaatctccaaaaaaccaagaggccgtgggaagaggaatgtgacaatgagaaggttcagttaaagactattggtacattttatcgaatattttatttttatttcagcatatgctcgcttgttgctctcatgttttaaaccatgttataacttcactgcttgccttggaaaattttaatttgcagcaataatttctaggtaatttgtactacatgtaacttctaagttatagtagaattgtcccgaaaaacttgtcgctacaaatatgtctgttttcttttgagtgtgtgctcggattaacaatatacattgcatctctctgtgttcatgcatgccaatgggcattaatggtccatgcaaattaattgggttgggcctaaatcagctaacttcacatatcaatcttcatatatcctgtcagcaaggggtaaatagaatgtccaagtgtgtatgaaaaatacacgaaaggaaagaaaaatagaatgagtatgaaaaatacacaaaaggaaagaaaaatagaatgatcactcagtcaacaaaaaggatgtttttttgtgcacacgcgatatgttattcccttattctccagatatggtaatggtaaactcaatcaagcaggaaaagatgtcgccctaaccgttgggcaaacacctggatgacatcatcttctctgctaaaggcaccatattctcttcaaggatccaaacaattaccccacttgggaagaggaatgtgacggagttagcactacctccacataatgggaaggttgggttaaagcctattggtacctgctccggcaccgttgctgttctggtctcggccgtggagatggaactatgattaaaagaaaagagaacactacggaaggaacctactgatgctcagtgtactgcgactttcccacgatgctcatgatgtcgaagtctgcagttgctagactggcccgagtaattgctaagttttgtagaaaatgtttaggcccatttttgaacgcatgaatttcgtataggctgtatttcacacgaaatacacaggaacaaacatttttcctgccttccaaacaggtcgttaggattagttgaagttccagtttgatcataggcacctaggtcgatgctctttagtaagatgtaagtaatatgtcttctggccaggttgagcaaggcttagctgcagtgtatcagtgtggtacagctgatgtatttatactgttacaatctaatgagactatatggattagagctatcagaacctgcacagatatttcacaataaactcttaggttatatattgctcgagacttgtgaatactttgttattgcttcctggttcaaagccatgatgcaaggtacacgcgcgtacttatgacttctcatacaagacgagacgtcaagactccggtcttgacatcataatctattcgtttagctttaatccgttctggtttgtactaattatacaatgctttatcctaatcgtatccgtcaagaccgtgacaatttattttgttcagaaaaccgtagcgaggcacgggcatttgactagtatccctttaatcagcagtcagttattagactattagcagcggtgttctctaaatttttcctcctaaatattactatgcagccacgtcagcaagattctctcccctatattcactcatcacgcaactgtttcccctataaattctcttatatatccctctacacattaaatatatatttctacataactaacataac

SEQ ID NO: 76694 - DNA, 2827 bp, Zea Mays
tttacaaaacatccctccatccccgccgacccacgcgccattcccgccgaccccgcagcccgaccccgcatccgccatccccgccgaccccgcagccgccatccccacgccgtctccaccccccatcaggcaccccccccgccccgccccgctcgtcgccatagagtttcatcgcctcgctcgcgtcgccaactacatccgctcgaaccgcgtccttacatgccatgcccaccatcctcgctcgctccaaccatgtatctacatgtcgcctccgacatccacgcccatgcttcgtgtagtgcttgacgcgcccgctccaaccgcgtctatgcatgccgtgactgccatcctcgccacccgcatgcctcatctgcatcctccgtttatcgtacttatccgcgatgatatgctagagcgtcagcaaggcggactctccaaacctccagagagggagggaggcagcagccaatgcccagcacgtaccaatctgcgtggcgggaggtgcccggactgcgtacccacgggcgagcaggattttgacgatccacgacccgatgaagtcgccggcgtcggtgacgcacaaggcggcagtggccatcgtgcgctgacgcccagtcccttcctctcgcgagcgaaacggggggcggtggtgccgccgggcgaatggattcgtccgagagcgagcaaataggggtaagcatttatcaagcggaagtgggaagaaatggtacagtgaagtggaggaaatgacacagaacacgagcgaagctggcatctcaaggcggtcgcactcgcacgttctattcttgtgtagtgcagctccgaagtcgctgctaccaggtgcccccgtgctggggcataggtgcagtcgccgctgcgcccagcctacacaaaggcagctaccgttgcgacaacgagagggagctcccaaggcaccaatgttgttgctgccagttcttcaaagagttattgatggttcacaaaagaccactgttgctctgccaattcacaaagccttgatgattgttatgatggaaccaatgttgaggcctacaacaatgatgtcattgttcccatgggacctcaatctccaaaaaaccaagaggccgtgggaagaggaatgtgacaatgagaaggttcagttaaagactattggtacattttatcgaatattttatttttatttcagcatatgctcgcttgttgctctcatgttttaaaccatgttataacttcactgcttgccttggaaaattttaatttgcagcaataatttctaggtaatttgtactacatgtaacttctaagttatagtagaattgtcccgaaaaacttgtcgctacaaatatgtctgttttcttttgagtgtgtgctcggattaacaatatacattgcatctctctgtgttcatgcatgccaatgggcattaatggtccatgcaaattaattgggttgggcctaaatcagctaacttcacatatcaatcttcatatatcctgtcagcaaggggtaaatagaatgtccaagtgtgtatgaaaaatacacgaaaggaaagaaaaatagaatgagtatgaaaaatacacaaaaggaaagaaaaatagaatgatcactcagtcaacaaaaaggatgtttttttgtgcacacgcgatatgttattcccttattctccagatatggtaatggtaaactcaatcaagcaggaaaagatgtcgccctaaccgttgggcaaacacctggatgacatcatcttctctgctaaaggcaccatattctcttcaaggatccaaacaattaccccacttgggaagaggaatgtgacggagttagcactacctccacataatgggaaggttgggttaaagcctattggtacctgctccggcaccgttgctgttctggtctcggccgtggagatggaactatgattaaaagaaaagagaacactacggaaggaacctactgatgctcagtgtactgcgactttcccacgatgctcatgatgtcgaagtctgcagttgctagactggcccgagtaattgctaagttttgtagaaaatgtttaggcccatttttgaacgcatgaatttcgtataggctgtatttcacacgaaatacacaggaacaaacatttttcctgccttccaaacaggtcgttaggattagttgaagttccagtttgatcataggcacctaggtcgatgctctttagtaagatgtaagtaatatgtcttctggccaggttgagcaaggcttagctgcagtgtatcagtgtggtacagctgatgtatttatactgttacaatctaatgagactatatggattagagctatcagaacctgcacagatatttcacaataaactcttaggttatatattgctcgagacttgtgaatactttgttattgcttcctggttcaaagccatgatgcaaggtacacgcgcgtacttatgacttctcatacaagacgagacgtcaagactccggtcttgacatcataatctattcgtttagctttaatccgttctggtttgtactaattatacaatgctttatcctaatcgtatccgtcaagaccgtgacaatttattttgttcagaaaaccgtagcgaggcacgggcatttgactagtatccctttaatcagcagtcagttattagactattagcagcggtgttctctaaatttttcctcctaaatattactatgcagccacgtcagcaagattctctcccctatattcactcatcacgcaactgtttcccctataaattctcttatatatccctctacacattaaatatatatttctacataactaacataac

SEQ ID NO: 76695 - DNA, 1419 bp, Zea Mays
ccccacgccgtctccaccccccatcaggcaccccccccgccccgccccgctcgtcgccatagagtttcatcgcctcgctcgcgtcgccaactacatccgctcgaaccgcgtccttacatgccatgcccaccatcctcgctcgctccaaccatgtatctacatgtcgcctccgacatccacgcccatgcttcgtgtagtgcttgacgcgcccgctccaaccgcgtctatgcatgccgtgactgccatcctcgccacccgcatgcctcatctgcatcctccgtttatcgtacttatccgcggtataccttccctcatcgttcagtccgcgctcactctgccccacgatccgcttctcccccgcgcccctcggcaagctcgcagtccaggatccgattctcgcgtcgccctcccgccgcgcccctcgatgatatgctagagcgtcagcaaggcggactctccaaacctccagagagggagggaggcagcagccaatgcccagcacgtaccaatctgcgtggcgggaggtgcccggactgcgtacccacgggcgagcaggattttgacgatccacgacccgatgaagtcgccggcgtcggtgacgcacaaggcggcagtggccatcgtgcgctgacgcccagtcccttcctctcgcgagcgaaacggggggcggtggtgccgccgggcgaatggattcgtccgagagcgagcaaataggggtaagcatttatcaagcggaagtgggaagaaatggtacagtgaagtggaggaaatgacacagaacacgagcgaagctggcatctcaaggcggtcgcactcgcacgttctattcttgtgtagtgcagctccgaagtcgctgctaccaggtgcccccgtgctggggcataggtgcagtcgccgctgcgcccagcctacacaaaggcagctaccgttgcgacaacgagagggagctcccaaggcaccaatgttgttgctgccagttcttcaaagagttattgatggttcacaaaagaccactgttgctctgccaattcacaaagccttgatgattgttatgatggaaccaatgttgaggcctacaacaatgatgtcattgttcccatgggacctcaatctccaaaaaaccaagaggccgtgggaagaggaatgtgacaatgagaaggttcagttaaagactattggtacattttatcgaatattttatttttatttcagcatatgctcgcttgttgctctcatgttttaaaccatgttataacttcactgcttgccttggaaaattttaatttgcagcaataatttctaggtaatttgtactacatgtaacttctaagttatagtagaattgtcccgaaaaacttgtcgctacaaatatgtctgttttcttttgagtgtgtgctcggattaacaatatacattgca

SEQ ID NO: 76696 - DNA, 2618 bp, Zea Mays
ccaacatttggggctccggttggctggctgtcacggtgtactcacggggacgccgccggccccttggcaggcgcagataatccccacttctcccagcgaagcagcgcaaagaggacggcgtccaggtatgctgcgggtccctgcgccagccaccgacaataatggcggcaatccacatcggagtccactccccacctccccgaccacccaccgcatcgccagtcgccacgcgacagcgacgccccgcatccccgcggacgccgacggctgggcctaccgcctgcgcctctgggggcggcgggtccagacgccacgcgcactctagaagagttgttgtgcggcgccgggcgcggcggccgttggatcccgtgccgtgccgccgccttcgccccgcccgtcctcggcgcgtcagcgaccccctcattgtggctgcgtgcctgcgtcggccagcccgcttgctttgcccctcgcttcgcttcaaatggtagagccgctgcaggctgagcgaccgcgagcttgacccgggcgcaagtcggctcgcacccagccatgtcggcgcctggattcgatgacccccagcttccgccgctgaggctccgcgcctcgtgcggcggcgcgatcgccagcccacgctcctgctcctcctctgataccttcgtcagcatgccttccacgccctcaggtatgctgaatccgtgcggtctatggtcaccaccacctcgcgcaccgtcggaggcgtcctcgtcggagatggagttcgggacggcccgcgagtacgacaccactgatgcgttcttcactgacaactggctctacgacaaccacctgttacacagcacggagagcgatggcagcgaaggggaggacaagttcattgttggtcctgacgtcagcttgcagcggactgagacgccggagcttggcgatggctgcggtctcagacacgtacatagagactgcaatgcggactctcatgggtgcacacaggcgaagaatgcttgctcttcgccaccttgtggttgttgctataatgaggagttgttgagagattcttgctccgctgtttctgtttatgggaggtatcataccatggaggaccacacggaggggcttgatgagtgtgttgcagaagctttcttgttcagactgaattcgttagttgatgctagcgaacagttagtggatttcaagaaaggagaggacgacggcttgaatcttagtgctctggagaaggaacttcaaatgcttactccgtacttggctgatgaagatgctcttgagagtactggacttgaagatgacgtcagaggaaataccaacctagatgtatgtatggtaacaaacgaggaaaatgctaatggcaaagaatttctaaaagatagctactgcatacttccttctcctgagagtgcagtcccttttgatgtttatggggtggaagacttcaagacagaagatacagatcttcaaaaccctaccgctcgcaaatttcaggaagatccaaaaattgatcctgcactctctaagtttcagcaggagtatgaagtatttgacctgaaaatattccaccggaagaacaggactggctttgaggaaaacaaagaattccctattgtcatggattccgttatagctggaagatatcgtatcaatgagtatcttggttctgctgcattcagcaaggttgtacgggcacacgaccttcgcactggagttgatgtatgccttaaaataattaaaaatgacaaggatttctttgaccagagtttggatgagataaagctcctcaagtttgtcaataagtatgatccagatgatgatcatcatatattgcgtctctatgattatttttactatcaggaacatctctttattgtcactgagttactacgggcaaatctttatgagtttcagaaatataaccaggagtctggtgacgaggtgtacttttcactgcccagaatacaggctatagctcgacaatgcttggaggctttggtgtacttgcatcatttaaacatagttcactgtgatctgaaaccagagaatatccttctgaagagctacagcagatgtgaaatcaaagttattgatcttggaagcagctgcttcttgtcagataacttaaacttatatgtccaatcacgttcttaccgatctcctgaggtcatcttgggtttaccatatgatcagaaaattgacatttggtctcttggctgcatcttatctgaactgtacactggtgaagtactctttcctaatgaatcaatgccaatcattcttgctcgtatgattgggataattggtccaattgatatggaaatgcttgcatcaggacaggagacccagaagtacttcacagatgactatgaccttttccacacgaacgaggagacagatcagttggagtatttgatcccagagaaatcctctttgcggcgccacttgcagtgcccagacaagaaatttgttgactttttgtcttacctgctgcaaataaatcccagaaacagaccaacggccagcgaagcgttgcaacaccgatggctttcgttcaaatatagttcaacggccaatcagactcgttcctgacaagccatgcacggatgaagatgaag

SEQ ID NO: 76697 - DNA, 2888 bp, Zea Mays
ccaacatttggggctccggttggctggctgtcacggtgtactcacggggacgccgccggccccttggcaggcgcagataatccccacttctcccagcgaagcagcgcaaagaggacggcgtccaggtatgctgcgggtccctgcgccagccaccgacaataatggcggcaatccacatcggagtccactccccacctccccgaccacccaccgcatcgccagtcgccacgcgacagcgacgccccgcatccccgcggacgccgacggctgggcctaccgcctgcgcctctgggggcggcgggtccagacgccacgcgcactctagaagagttgttgtgcggcgccgggcgcggcggccgttggatcccgtgccgtgccgccgccttcgccccgcccgtcctcggcgcgtcagcgaccccctcattgtggctgcgtgcctgcgtcggccagcccgcttgctttgcccctcgcttcgcttcaaatggtagagccgctgcaggctgagcgaccgcgagcttgacccgggcgcaagtcggctcgcacccagccatgtcggcgcctggattcgatgacccccagcttccgccgctgaggctccgcgcctcgtgcggcggcgcgatcgccagcccacgctcctgctcctcctctgataccttcgtcagcatgccttccacgccctcaggtatgctgaatccgtgcggtctatggtcaccaccacctcgcgcaccgtcggaggcgtcctcgtcggagatggagttcgggacggcccgcgagtacgacaccactgatgcgttcttcactgacaactggctctacgacaaccacctgttacacagcacggagagcgatggcagcgaaggggaggacaagttcattgttggtcctgacgtcagcttgcagcggactgagacgccggagcttggcgatggctgcggtctcagacacgtacatagagactgcaatgcggactctcatgggtgcacacaggcgaagaatgcttgctcttcgccaccttgtggttgttgctataatgaggagttgttgagagattcttgctccgctgtttctgtttatgggaggtatcataccatggaggaccacacggaggggcttgatgagtgtgttgcagaagctttcttgttcagactgaattcgttagttgatgctagcgaacagttagtggatttcaagaaaggagaggacgacggcttgaatcttagtgctctggagaaggaacttcaaatgcttactccgtacttggctgatgaagatgctcttgagagtactggacttgaagatgacgtcagaggaaataccaacctagatgtatgtatggtaacaaacgaggaaaatgctaatggcaaagaatttctaaaagatagctactgcatacttccttctcctgagagtgcagtcccttttgatgtttatggggtggaagacttcaagacagaagatacagatcttcaaaaccctaccgctcgcaaatttcaggaagatccaaaaattgatcctgcactctctaagtttcagcaggagtatgaagtatttgacctgaaaatattccaccggaagaacaggactggctttgaggaaaacaaagaattccctattgtcatggattccgttatagctggaagatatcgtatcaatgagtatcttggttctgctgcattcagcaagagtttggatgagataaagctcctcaagtttgtcaataagtatgatccagatgatgatcatcatatattgcgtctctatgattatttttactatcaggaacatctctttattgtcactgagttactacgggcaaatctttatgagtttcagaaatataaccaggagtctggtgacgaggtgtacttttcactgcccagaatacaggctatagctcgacaatgcttggaggctttggtgtacttgcatcatttaaacatagttcactgtgatctgaaaccagagaatatccttctgaagagctacagcagatgtgaaatcaaagttattgatcttggaagcagctgcttcttgtcagataacttaaacttatatgtccaatcacgttcttaccgatctcctgaggtcatcttgggtttaccatatgatcagaaaattgacatttggtctcttggctgcatcttatctgaactgtacactggtgaagtactctttcctaatgaatcaatgccaatcattcttgctcgtatgattgggataattggtccaattgatatggaaatgcttgcatcaggacaggagacccagaagtacttcacagatgactatgaccttttccacacgaacgaggtaattattggattatatgcaagattaccaacataactttgtttcagtatgcactatagttgacaacaaatcagtgatgttgttcgtgttgattttgaatgatgacctgaaaaccacatgactggagacagatcagttggagtatttgatcccagagaaatcctctttgcggcgccacttgcagtgcccagacaagaaatttgttgactttttgtcttacctgctgcaaataaatcccagaaacagaccaacggccagcgaagcgttgcaacaccgatggctttcgttcaaatatagttcaacggccaatcagactcgttcctgacaagtaggcaacactttctgaagctactggctcctgaaacaacatgtttccttttgcagtaggatttggcttcgtggtttttttaggtcaacacttggcgttgaaaaacctgttttgcaaggtgaatcgatcgtgtatatgcgctggttcatgcatgtaaatatgagaaaagtggttcctttttttttctgtacagttgccatgtactacagtgttgatccaactcatggtatagcaaaatggaattcataga

SEQ ID NO: 76698 - DNA, 2858 bp, Zea Mays
ccaacatttggggctccggttggctggctgtcacggtgtactcacggggacgccgccggccccttggcaggcgcagataatccccacttctcccagcgaagcagcgcaaagaggacggcgtccaggtatgctgcgggtccctgcgccagccaccgacaataatggcggcaatccacatcggagtccactccccacctccccgaccacccaccgcatcgccagtcgccacgcgacagcgacgccccgcatccccgcggacgccgacggctgggcctaccgcctgcgcctctgggggcggcgggtccagacgccacgcgcactctagaagagttgttgtgcggcgccgggcgcggcggccgttggatcccgtgccgtgccgccgccttcgccccgcccgtcctcggcgcgtcagcgaccccctcattgtggctgcgtgcctgcgtcggccagcccgcttgctttgcccctcgcttcgcttcaaatggtagagccgctgcaggctgagcgaccgcgagcttgacccgggcgcaagtcggctcgcacccagccatgtcggcgcctggattcgatgacccccagcttccgccgctgaggctccgcgcctcgtgcggcggcgcgatcgccagcccacgctcctgctcctcctctgataccttcgtcagcatgccttccacgccctcaggtatgctgaatccgtgcggtctatggtcaccaccacctcgcgcaccgtcggaggcgtcctcgtcggagatggagttcgggacggcccgcgagtacgacaccactgatgcgttcttcactgacaactggctctacgacaaccacctgttacacagcacggagagcgatggcagcgaaggggaggacaagttcattgttggtcctgacgtcagcttgcagcggactgagacgccggagcttggcgatggctgcggtctcagacacgtacatagagactgcaatgcggactctcatgggtgcacacaggcgaagaatgcttgctcttcgccaccttgtggttgttgctataatgaggagttgttgagagattcttgctccgctgtttctgtttatgggaggtatcataccatggaggaccacacggaggggcttgatgagtgtgttgcagaagctttcttgttcagactgaattcgttagttgatgctagcgaacagttagtggatttcaagaaaggagaggacgacggcttgaatcttagtgctctggagaaggaacttcaaatgcttactccgtacttggctgatgaagatgctcttgagattatctttttcaggtactggacttgaagatgacgtcagaggaaataccaacctagatgtatgtatggtaacaaacgaggaaaatgctaatggcaaagaatttctaaaagatagctactgcatacttccttctcctgagagtgcagtcccttttgatgtttatggggtggaagacttcaagacagaagatacagatcttcaaaaccctaccgctcgcaaatttcaggaagatccaaaaattgatcctgcactctctaagtttcagcaggagtatgaagtatttgacctgaaaatattccaccggaagaacaggactggctttgaggaaaacaaagaattccctattgtcatggattccgttatagctggaagatatcgtatcaatgagtatcttggttctgctgcattcagcaaggttgtacgggcacacgaccttcgcactggagttgatgtatgccttaaaataattaaaaatgacaaggatttctttgaccagagtttggatgagataaagctcctcaagtttgtcaataagtatgatccagatgatgatcatcatatattgcgtctctatgattatttttactatcaggaacatctctttattgtcactgagttactacgggcaaatctttatgagtttcagaaatataaccaggagtctggtgacgaggtgtacttttcactgcccagaatacaggctatagctcgacaatgcttggaggctttggtgtacttgcatcatttaaacatagttcactgtgatctgaaaccagagaatatccttctgaagagctacagcagatgtgaaatcaaagttattgatcttggaagcagctgcttcttgtcagataacttaaacttatatgtccaatcacgttcttaccgatctcctgaggtcatcttgggtttaccatatgatcagaaaattgacatttggtctcttggctgcatcttatctgaactgtacactggtgaagtactctttcctaatgaatcaatgccaatcattcttgctcgtatgattgggataattggtccaattgatatggaaatgcttgcatcaggacaggagacccagaagtacttcacagatgactatgaccttttccacacgaacgaggagacagatcagttggagtatttgatcccagagaaatcctctttgcggcgccacttgcagtgcccagacaagaaatttgttgactttttgtcttacctgctgcaaataaatcccagaaacagaccaacggccagcgaagcgttgcaacaccgatggctttcgttcaaatatagttcaacggccaatcagactcgttcctgacaagtaggcaacactttctgaagctactggctcctgaaacaacatgtttccttttgcagtaggatttggcttcgtggtttttttaggtcaacacttggcgttgaaaaacctgttttgcaaggtgaatcgatcgtgtatatgcgctggttcatgcatgtaaatatgagaaaagtggttcctttttttttctgtacagttgccatgtactacagtgttgatccaactcatggtatagcaaaatggaattcataga

SEQ ID NO: 76699 - DNA, 1412 bp, Zea Mays
caacttccgttaagacttagctgtcttagcagcactcacaggtgaaaagttttcggaaattgtgggaagtccatactacatggctcctgaagtcttgaagaggaactatggacctgaaatagacatatggagcgctggtgttatcttgtatattttgttatgtggtgttcctccgttttgggctgagactgaacaaggagttgcacaagctattcttcggggaaatatagattttaagcgagaaccctggcccaatgtttctgacaatgctaaagatcttgttcggcagatgcttcaacctgatccaaaactcaggctaacagcaaagcaagttcttgagcatccctggcttcaaaatgctaagaaagctccaaatgttcctcttggagacattgtaaagtcaaggctgaaacagttttcaaggatgaacagattcaaaagaaaagctctaaggctgaagaggttgaggacataaaggatatgttcaaggtgatggatactgataatgatggcatagtttcttatgaagagttaaagagtgggattgcaaaatttggttctcatcttgcagaatcagaagtgcaaatgcttattgaagctgtggatacaaatggtagaggagcactagattatggtgaatttttggccgtctcacttcatttacaaaggatggcaaacgatgagcaccttcggcgggccttcctatttttcgacaaggatggcaatggtttcattgagcctgaggagcttcaggaagccctgatggaggacgggggagctgataccatggacgtggtcaatgacatattgcaagaagttgacacagataaggatggtaaaattagctacgaagaatttgtagcgatgatgaagactggaacagattggaggaaggcgtcgcggcattattcaagagggcgcttcaatagccttagcataaagcttataaaagatgggtctgtaaaactgggtagcgagtgaggttgtagcttgctgccgatgctcttctccacgcattgtagtctgcctctcgggcccgctaagcagaaacccccttccgtttgctaatgattattttgtctgggatttaggtagttggagcctccctgattggtttactcgtgtaattagtagcccttttcagtatcgctgaggagcatctgctgtaggatgcacgcctgcctccgtctgtctgctcatctcctccggtgtacccgtcgctcaaatggaagtgttgtaaaatgttttggtgttgacctcaaatgcaatttgctggtttcgtgtactgacacccaagattcatttgcgcctataaggctaactgtgaaaatttacgtcatttgatgaggaaatgatgaagcgctagctgatttgtcttgtattctgtttatgcggtgtaaagctagtttgag

SEQ ID NO: 76700 - DNA, 2266 bp, Zea Mays
cccccctcgcctcgtccttaccgttataccccgagtccccgacacaggtctcgctcgctggtcgcctccctcgtccctcgcatcttctccctctttctctctccagcccagtagcctgtagccccccccccctcctctctctctctcttcctcccccactcgcacagtgcccaatgccgcacaaaccctagtgcccccactcccaatctcgcgcggcggccatgggaaactgctgccgctcgccggccgccgcggcgcgggaagacgtcaagtcgtcgcacttcccggcctccgccggcgggaagaagaagccccaccagcaggcgcggaacggcggccccggctccggggagaagaagcgtctgtcggtgctcggggaggaggggtgcgacgtgggcgccggcgggatcgaggagaagtacgcgctggaccgggagctggggcgcggcgagttcggggtgacgtacctgtgcatggaccggggcacgcgggagctgctggcctgcaagtccatctccaagcggaagctgcggacccccgtcgacgtggaggacgtgcgccgggaggtggccatcatgcggcacctgcccaggagccccagcatcgtgtccctgcgggaggcgtgcgaggacgacggcgccgtgcacctcgtcatggagctctgcgagggcggggagctcttcgaccgcatcgtcgccaggggccactacacggagcgcgcggcggccgcggtcacgcgcaccatcgtcgaggtcgtccagctctgccaccgccacggcgtcatgcaccgggacctcaagcccgagaacttcctcttcgccaacaagaaggagaactcgccgctcaaggccatcgactttggtctctccatcttcttcaagcccggtgaaaagttttcggaaattgtgggaagtccatactacatggctcctgaagtcttgaagaggaactatggacctgaaatagacatatggagcgctggtgttatcttgtatattttgttatgtggtgttcctccgttttgggctggagttgcacaagctattcttcggggaaatatagattttaagcgagaaccctggcccaatgtttctgacaatgctaaagatcttgttcggcagatgcttcaacctgatccaaaactcaggctaacagcaaagcaagttcttgagcatccctggcttcaaaatgctaagaaagctccaaatgttcctcttggagacattgtaaagtcaaggctgaaacagttttcaaggatgaacagattcaaaagaaaagctctaagggttattgctgatcacttgtcagctgaagaggttgaggacataaaggatatgttcaaggtgatggatactgataatgatggcatagtttcttatgaagagttaaagagtgggattgcaaaatttggttctcatcttgcagaatcagaagtgcaaatgcttattgaagctgtggatacaaatggtagaggagcactagattatggtgaatttttggccgtctcacttcatttacaaaggatggcaaacgatgagcaccttcggcgggccttcctatttttcgacaaggatggcaatggtttcattgagcctgaggagcttcaggaagccctgatggaggacgggggagctgataccatggacgtggtcaatgacatattgcaagaagttgacacagataaggatggtaaaattagctacgaagaatttgtagcgatgatgaagactggaacagattggaggaaggcgtcgcggcattattcaagagggcgcttcaatagccttagcataaagcttataaaagatgggtctgtaaaactgggtagcgagtgaggttgtagcttgctgccgatgctcttctccacgcattgtagtctgcctctcgggcccgctaagcagaaacccccttccgtttgctaatgattattttgtctgggatttaggtagttggagcctccctgattggtttactcgtgtaattagtagcccttttcagtatcgctgaggagcatctgctgtaggatgcacgcctgcctccgtctgtctgctcatctcctccggtgtacccgtcgctcaaatggaagtgttgtaaaatgttttggtgttgacctcaaatgcaatttgctggtttcgtgtactgacacccaagattcatttgcgcctataaggctaactgtgaaaatttacgtcatttgatgaggaaatgatgaagcgctagctgatttgtcttgtattctgtttatgcggtgtaaagctagtttgag

SEQ ID NO: 76701 - DNA, 2277 bp, Zea Mays
cccccctcgcctcgtccttaccgttataccccgagtccccgacacaggtctcgctcgctggtcgcctccctcgtccctcgcatcttctccctctttctctctccagcccagtagcctgtagccccccccccctcctctctctctctcttcctcccccactcgcacagtgcccaatgccgcacaaaccctagtgcccccactcccaatctcgcgcggcggccatgggaaactgctgccgctcgccggccgccgcggcgcgggaagacgtcaagtcgtcgcacttcccggcctccgccggcgggaagaagaagccccaccagcaggcgcggaacggcggccccggctccggggagaagaagcgtctgtcggtgctcggggaggaggggtgcgacgtgggcgccggcgggatcgaggagaagtacgcgctggaccgggagctggggcgcggcgagttcggggtgacgtacctgtgcatggaccggggcacgcgggagctgctggcctgcaagtccatctccaagcggaagctgcggacccccgtcgacgtggaggacgtgcgccgggaggtggccatcatgcggcacctgcccaggagccccagcatcgtgtccctgcgggaggcgtgcgaggacgacggcgccgtgcacctcgtcatggagctctgcgagggcggggagctcttcgaccgcatcgtcgccaggggccactacacggagcgcgcggcggccgcggtcacgcgcaccatcgtcgaggtcgtccagctctgccaccgccacggcgtcatgcaccgggacctcaagcccgagaacttcctcttcgccaacaagaaggagaactcgccgctcaaggccatcgactttggtctctccatcttcttcaagcccggtgaaaagttttcggaaattgtgggaagtccatactacatggctcctgaagtcttgaagaggaactatggacctgaaatagacatatggagcgctggtgttatcttgtatattttgttatgtggtgttcctccgttttgggctgagactgaacaaggagttgcacaagctattcttcggggaaatatagattttaagcgagaaccctggcccaatgtttctgacaatgctaaagatcttgttcggcagatgcttcaacctgatccaaaactcaggctaacagcaaagcaagttcttagcatccctggcttcaaaatgctaagaaagctccaaatgttcctcttggagacattgtaaagtcaaggctgaaacagttttcaaggatgaacagattcaaaagaaaagctctaagggttattgctgatcacttgtcagctgaagaggttgaggacataaaggatatgttcaaggtgatggatactgataatgatggcatagtttcttatgaagagttaaagagtgggattgcaaaatttggttctcatcttgcagaatcagaagtgcaaatgcttattgaagctgtggatacaaatggtagaggagcactagattatggtgaatttttggccgtctcacttcatttacaaaggatggcaaacgatgagcaccttcggcgggccttcctatttttcgacaaggatggcaatggtttcattgagcctgaggagcttcaggaagccctgatggaggacgggggagctgataccatggacgtggtcaatgacatattgcaagaagttgacacagataaggatggtaaaattagctacgaagaatttgtagcgatgatgaagactggaacagattggaggaaggcgtcgcggcattattcaagagggcgcttcaatagccttagcataaagcttataaaagatgggtctgtaaaactgggtagcgagtgaggttgtagcttgctgccgatgctcttctccacgcattgtagtctgcctctcgggcccgctaagcagaaacccccttccgtttgctaatgattattttgtctgggatttaggtagttggagcctccctgattggtttactcgtgtaattagtagcccttttcagtatcgctgaggagcatctgctgtaggatgcacgcctgcctccgtctgtctgctcatctcctccggtgtacccgtcgctcaaatggaagtgttgtaaaatgttttggtgttgacctcaaatgcaatttgctggtttcgtgtactgacacccaagattcatttgcgcctataaggctaactgtgaaaatttacgtcatttgatgaggaaatgatgaagcgctagctgatttgtcttgtattctgtttatgcggtgtaaagctagtttgag

SEQ ID NO: 76702 - DNA, 296 bp, Zea Mays
actagtacgtagaaatccaacactcgggacgaaattaaaagagacgagacgacgccgcatccagttcaagctctacgcgctcgacgacgaggtgcacctcggcaacaagggataagctcatggaggcgatcgacgggcacgtgctggaagaagccgagctgatcgccgtgttccagggagtcgtcgccaacaactaacacacacactcagagatatctttgttggcgtgctttgtatttgcttgtgtggctaccatgtaattttgatcgaataaaagggaacttcacatgtgctta

SEQ ID NO: 76703 - DNA, 696 bp, Zea Mays
gaacaactgactagaactagtacgtagaaatccaacactcgggacgaaattaaaagagacgagacgacgcatcatccggcatggcggcgcaggagggcggcatgaggctggtgtcgcacccgatcgcggcgcacgacgggcggctgccgcggcagtacacggcggaggggcagggcgccaagaaggacatgtcgccgccgctggaatggtacggcgtgcccgagggcgcgcggtcgctggcgctgctggtgcaggacatcgacgccgaccccatcgtgccgtggacgcactgggtggtggccaacatcccgcccgccaccaggggcctccccgaggggttctccggcgccgcgggggcggggccggggcgcgaccagctcggcggactgcaggagggggtcaacgactggaagcagcccggctggcgcgggcccgtgccgccctcccacggccaccgcatccagttcaagctctacgcgctcgacgacgaggtgcacctcggcaacaagggataagctcatggaggcgatcgacgggcacgtgctggaagaagccgagctgatcgccgtgttccagggagtcgtcgccaacaactaacacacacactcagagatatctttgttggcgtgctttgtatttgcttgtgtggctaccatgtaattttgatcgaataaaagggaacttcacatgtgctta

SEQ ID NO: 76704 - DNA, 1695 bp, Zea Mays
gaaccgggcagcacggcttgctaaacacgcagaaaagaaaagccgttctccctccgtttccccaaaccccaaggtccccaaccatggcagccgccgccgattctgcctccgaccaaaaccctaaggacgccgagcggcacgtgctcaccgccgaatccgacgccgatttctccgaggaggactacgacgaggatggggaggaggaatacgaggaggaggaggagctggacgggccggcggcggcggcggcggagcgggagcggatgcagtccgtgttacggaggctgtcatccgaccccgtgggcatccgcgtccacgacgtgatcatcaagggcaacaccaagacgcaggacgagctcatcgaggcggaggtcgccgagctgctccgcgccgcccccaccgtgcaggacctgctccgcgccgccagtgtcgccactgcgcggctgcacgatctcgacatcttcgacgccgtcaagatcacgctcgacgccgggccgcccgagctgcctggcaccaccaacgtcgtcatcgaggtcgtcgaggtggccaaccccctcactggcaccgccggcgtctattcgaagcccgaagcaagatcttggtcgctggaagggtcacttaagttgaagaacttgtttggctatggtgacatctgggatgcatcaggatcctttggttgggaccaaacaacagaggttggtgttggagtctgcctaccgaggtttaaatcaataccaacaccattgatggctcgggcatctttgtcatcacaagattggctgaagttttcatcatacaaggagcgcctacttggcctttcatttggtttgctgtcaacaaggaaccatgacttgtcatacaaccttgcgtggcgtaccttaactgatccatcacgtgtctcatcaaaggccataaggaggcagttagggcataaccttctttctgcattgaagtacacatacaagattgataagagggattcacatcttaggccaacgaaaggatatgcgtttcagtcaacttctcaagttggtggtctatggaatagcaaaggattgagatatttccggcaggagttcgatgtacgtggtgctgtgcctttgggattttatagtgctgctctcaacgttggtgtaggagcgggtgtcattttaccgcttgcagggggattcatgaattcgacttcatcagtgccagagaggttttatcttggagatattcagagacgctggaatccatggccacgcattccttactgctggaaaccttgcgaaactgtcggagggtgagtacaagaacttttcggcttctgaatttcggcaaacgttccggagctctgctggcgttgggattattttgcctaccaaacttttccgggtagaggtgaactattgccgcatcctaaagcaagctgagcatgacagcgcgaagactggaatccagttcagcttttcctcgcccatgtaggaacttgccatggcagccgaaacagctgcactttcctctgtagacttgcatttcttcccgttcttttcatgctgaagcaattgaagaggttatttacgtgctcccttttcttgtgacgcttgttcattgacacgaggagctgctccttttttttgggcaaaaatatgtatgatttcggtggaatcagaagctatccacaaataagccctggtgtccgctcatgtgtta

SEQ ID NO: 76705 - DNA, 1787 bp, Zea Mays
gctaaacacgcagaaaagaaaagccgttctccctccgtttccccaaaccccaaggtccccaaccatggcagccgccgccgattctgcctccgaccaaaaccctaaggacgccgagcggcacgtgctcaccgccgaatccgacgccgatttctccgaggaggactacgacgaggatggggaggaggaatacgaggaggaggaggagctggacgggccggcggcggcggcggcggagcgggagcggatgcagtccgtgttacggaggctgtcatccgaccccgtgggcatccgcgtccacgacgtgatcatcaagggcaacaccaagacgcaggacgagctcatcgaggcggaggtcgccgagctgctccgcgccgcccccaccgtgcaggacctgctccgcgccgccagtgtcgccactgcgcggctgcacgatctcgacatcttcgacgccgtcaagatcacgctcgacgccgggccgcccgagctgcctggcaccaccaacgtcgtcatcgaggtcgtcgaggtggccaaccccctcactggcaccgccggcgtctattcgaagcccgaagcaagatcttggtcgctggaagggtcacttaagttgaagaacttgtttggctatggtgacatctgggatgcatcaggatcctttggttgggaccaaacaacagaggttggtgttggagtctgcctaccgaggtttaaatcaataccaacaccattgatggctcgggcatctttgtcatcacaagattggctgaagttttcatcatacaaggagcgcctacttggcctttcatttggtttgctgtcaacaaggaaccatgacttgtcatacaaccttgcgtggcgtaccttaactgatccatcacgtgtctcatcaaaggccataaggaggcagttagggcataaccttctttctgcattgaagtacacatacaagattgataagagggattcacatcttaggccaacgaaaggatatgcgtttcagtcaacttctcaagttggtggtctatggaatagcaaaggattgagatatttccggcagtgtgcagcttgggcggaccgtcatctctgctgggtttcagattaaggggagttggcccaacagaggcgcggaggcatgtccttaataactcggagagtggctcggctgaccctggaagggattacttgggaggtgatctggccgtgtctgccttcgctgacctttcttttgatctgcccctcaagatattcagagacgctggaatccatggccacgcattccttactgctggaaaccttgcgaaactgtcggagggtgagtacaagaacttttcggcttctgaatttcggcaaacgttccggagctctgctggcgttgggattattttgcctaccaaacttttccgggtagaggtgaactattgccgcatcctaaagcaagctgagcatgacagcgcgaagactggaatccagttcagcttttcctcgcccatgtaggaacttgccatggcagccgaaacagctgcactttcctctgtagacttgcatttcttcccgttcttttcatgctgaagcaattgaagaggttatttacgtgctcccttttcttgtgacgcttgttcattgacacgaggagctgctccttttttttggtgtcttcaggagatgggtttattatttgctgtttttgacctcacgagggatttgtcctcgcacaactcaaataccgatgctgtggctacacaatggtggatagaataatattttggcccataatgttgtataattcatac

SEQ ID NO: 76706 - DNA, 1888 bp, Zea Mays
cacggcttgctaaacacgcagaaaagaaaagccgttctccctccgtttccccaaaccccaaggtccccaaccatggcagccgccgccgattctgcctccgaccaaaaccctaaggacgccgagcggcacgtgctcaccgccgaatccgacgccgatttctccgaggaggactacgacgaggatggggaggaggaatacgaggaggaggaggagctggacgggccggcggcggcggcggcggagcgggagcggatgcagtccgtgttacggaggctgtcatccgaccccgtgggcatccgcgtccacgacgtgatcatcaagggcaacaccaagacgcaggacgagctcatcgaggcggaggtcgccgagctgctccgcgccgcccccaccgtgcaggacctgctccgcgccgccagtgtcgccactgcgcggctgcacgatctcgacatcttcgacgccgtcaagatcacgctcgacgccgggccgcccgagctgcctggcaccaccaacgtcgtcatcgaggtcgtcgaggtggccaaccccctcactggcaccgccggcgtctattcgaagcccgaagcaagatcttggtcgctggaagggtcacttaagttgaagaacttgtttggctatggtgacatctgggatgcatcaggatcctttggttgggaccaaacaacagaggttggtgttggagtctgcctaccgaggtttaaatcaataccaacaccattgatggctcgggcatctttgtcatcacaagattggctgaagttttcatcatacaaggagcgcctacttggcctttcatttggtttgctgtcaacaaggaaccatgacttgtcatacaaccttgcgtggcgtaccttaactgatccatcacgtgtctcatcaaaggccataaggaggcagttagggcataaccttctttctgcattgaagtacacatacaagattgataagagggattcacatcttaggccaacgaaaggatatgcgtttcagtcaacttctcaagttggtggtctatggaatagcaaaggattgagatatttccggcaggagcgggtgtcattttaccgcttgcagggggattcatgaattcgacttcatcagtgccagagaggttttatcttggaggtaattcttctccagtgtgcagcttgggcggaccgtcatctctgctgggtttcagattaaggggagttggcccaacagaggcgcggaggcatgtccttaataactcggagagtggctcggctgaccctggaagggattacttgggaggtgatctggccgtgtctgccttcgctgacctttcttttgatctgcccctcaagatattcagagacgctggaatccatggccacgcattccttactgctggaaaccttgcgaaactgtcggagggtgagtacaagaacttttcggcttctgaatttcggcaaacgttccggagctctgctggcgttgggattattttgcctaccaaacttttccgggtagaggtgaactattgccgcatcctaaagcaagctgagcatgacagcgcgaagactggaatccagttcagcttttcctcgcccatgtaggaacttgccatggcagccgaaacagctgcactttcctctgtagacttgcatttcttcccgttcttttcatgctgaagcaattgaagaggttatttacgtgctcccttttcttgtgacgcttgttcattgacacgaggagctgctccttttttttggtgtcttcaggagatgggtttattatttgctgtttttgacctcacgagggatttgtcctcgcacaactcaaataccgatgctgtggctacacaatggtggatagaataatattttggcccataatgttgtataattcatac

SEQ ID NO: 76707 - DNA, 1707 bp, Zea Mays
agcacggcttgctaaacacgcagaaaagaaaagccgttctccctccgtttccccaaaccccaaggtccccaaccatggcagccgccgccgattctgcctccgaccaaaaccctaaggacgccgagcggcacgtgctcaccgccgaatccgacgccgatttctccgaggaggactacgacgaggatggggaggaggaatacgaggaggaggaggagctggacgggccggcggcggcggcggcggagcgggagcggatgcagtccgtgttacggaggctgtcatccgaccccgtgggcatccgcgtccacgacgtgatcatcaagggcaacaccaagacgcaggacgagctcatcgaggcggaggtcgccgagctgctccgcgccgcccccaccgtgcaggacctgctccgcgccgccagtgtcgccactgcgcggctgcacgatctcgacatcttcgacgccgtcaagatcacgctcgacgccgggccgcccgagctgcctggcaccaccaacgtcgtcatcgaggtcgtcgaggtggccaaccccctcactggcaccgccggcgtctattcgaagcccgaagcaagatcttggtcgctggaagggtcacttaagttgaagaacttgtttggctatggtgacatctgggatgcatcaggatcctttggttgggaccaaacaacagaggttggtgttggagtctgcctaccgaggtttaaatcaataccaacaccattgatggctcgggcatctttgtcatcacaagattggctgaagttttcatcatacaaggagcgcctacttggcctttcatttggtttgctgtcaacaaggaaccatgacttgtcatacaaccttgcgtggcgtaccttaactgatccatcacgtgtctcatcaaaggccataaggaggcagttagggcataaccttctttctgcattgaagtacacatacaagattgataagagggattcacatcttaggccaacgaaaggatatgcgtttcagtcaacttctcaagttggtggtctatggaatagcaaaggattgagatatttccggcaggagttcgatgtacgtggtgctgtgcctttgggattttatagtgctgctctcaacgttggtgtaggagcgggtgtcattttaccgcttgcagggggattcatgaattcgacttcatcagtgccagagaggttttatcttggagaggcgcggaggcatgtccttaataactcggagagtggctcggctgaccctggaagggattacttgggaggtgatctggccgtgtctgccttcgctgacctttcttttgatctgcccctcaagatattcagagacgctggaatccatggccacgcattccttactgctggaaaccttgcgaaactgtcggagggtgagtacaagaacttttcggcttctgaatttcggcaaacgttccggagctctgctggcgttgggattattttgcctaccaaacttttccgggtagaggtgaactattgccgcatcctaaagcaagctgagcatgacagcgcgaagactggaatccagttcagcttttcctcgcccatgagatgggtttattatttgctgtttttgacctcacgagggatttgtcctcgcacaactcaaataccgatgctgtggctacacaatggtggatagaataatattttggcccataatgttgtataattcatac

SEQ ID NO: 76708 - DNA, 1957 bp, Zea Mays
gaaccgggcagcacggcttgctaaacacgcagaaaagaaaagccgttctccctccgtttccccaaaccccaaggtccccaaccatggcagccgccgccgattctgcctccgaccaaaaccctaaggacgccgagcggcacgtgctcaccgccgaatccgacgccgatttctccgaggaggactacgacgaggatggggaggaggaatacgaggaggaggaggagctggacgggccggcggcggcggcggcggagcgggagcggatgcagtccgtgttacggaggctgtcatccgaccccgtgggcatccgcgtccacgacgtgatcatcaagggcaacaccaagacgcaggacgagctcatcgaggcggaggtcgccgagctgctccgcgccgcccccaccgtgcaggacctgctccgcgccgccagtgtcgccactgcgcggctgcacgatctcgacatcttcgacgccgtcaagatcacgctcgacgccgggccgcccgagctgcctggcaccaccaacgtcgtcatcgaggtcgtcgaggtggccaaccccctcactggcaccgccggcgtctattcgaagcccgaagcaagatcttggtcgctggaagggtcacttaagttgaagaacttgtttggctatggtgacatctgggatgcatcaggatcctttggttgggaccaaacaacagaggttggtgttggagtctgcctaccgaggtttaaatcaataccaacaccattgatggctcgggcatctttgtcatcacaagattggctgaagttttcatcatacaaggagcgcctacttggcctttcatttggtttgctgtcaacaaggaaccatgacttgtcatacaaccttgcgtggcgtaccttaactgatccatcacgtgtctcatcaaaggccataaggaggcagttagggcataaccttctttctgcattgaagtacacatacaagattgataagagggattcacatcttaggccaacgaaaggatatgcgtttcagtcaacttctcaagttggtggtctatggaatagcaaaggattgagatatttccggcaggagttcgatgtacgtggtgctgtgcctttgggattttatagtgctgctctcaacgttggtgtaggagcgggtgtcattttaccgcttgcagggggattcatgaattcgacttcatcagtgccagagaggttttatcttggaggtaattcttctccagtgtgcagcttgggcggaccgtcatctctgctgggtttcagattaaggggagttggcccaacagaggcgcggaggcatgtccttaataactcggagagtggctcggctgaccctggaagggattacttgggaggtgatctggccgtgtctgccttcgctgacctttcttttgatctgcccctcaagatattcagagacgctggaatccatggccacgcattccttactgctggaaaccttgcgaaactgtcggagggtgagtacaagaacttttcggcttctgaatttcggcaaacgttccggagctctgctggcgttgggattattttgcctaccaaacttttccgggtgaactattgccgcatcctaaagcaagctgagcatgacagcgcgaagactggaatccagttcagcttttcctcgcccatgtaggaacttgccatggcagccgaaacagctgcactttcctctgtagacttgcatttcttcccgttcttttcatgctgaagcaattgaagaggttatttacgtgctcccttttcttgtgacgcttgttcattgacacgaggagctgctccttttttttggtgtcttcaggagatgggtttattatttgctgtttttgacctcacgagggatttgtcctcgcacaactcaaataccgatgctgtggctacacaatggtggatagaataatattttggcccataatgttgtataattcatac

SEQ ID NO: 76709 - DNA, 1597 bp, Zea Mays
gaaccgggcagcacggcttgctaaacacgcagaaaagaaaagccgttctccctccgtttccccaaaccccaaggtccccaaccatggcagccgccgccgattctgcctccgaccaaaaccctaaggacgccgagcggcacgtgctcaccgccgaatccgacgccgatttctccgaggaggactacgacgaggatggggaggaggaatacgaggaggaggaggagctggacgggccggcggcggcggcggcggagcgggagcggatgcagtccgtgttacggaggctgtcatccgaccccgtgggcatccgcgtccacgacgtgatcatcaagggcaacaccaagacgcaggacgagctcatcgaggcggaggtcgccgagctgctccgcgccgcccccaccgtgcaggacctgctccgcgccgccagtgtcgccactgcgcggctgcacgatctcgacatcttcgacgccgtcaagatcacgctcgacgccgggccgcccgagctgcctggcaccaccaacgtcgtcatcgaggtcgtcgaggtggccaaccccctcactggcaccgccggcgtctattcgaagcccgaagcaagatcttggtcgctggaagggtcacttaagttgaagaacttgtttggctatggtgacatctgggatgcatcaggatcctttggttgggaccaaacaacagaggttggtgttggagtctgcctaccgaggtttaaatcaataccaacaccattgatggctcgggcatctttgtcatcacaagattggctgaagttttcatcatacaaggagcgcctacttggcctttcatttggtttgctgtcaacaaggaaccatgacttgtcatacaaccttgcgtggcgtaccttaactgatccatcacgtgtctcatcaaaggccataaggaggcagttagggcataaccttctttctgcattgaagtacacatacaagattgataagagggattcacatcttaggccaacgaaaggatatgcgtttcagtcaacttctcaagttggtggtctatggaatagcaaaggattgagatatttccggcaggagttcgatgtacgtggtgctgtgcctttgggattttatagtgctgctctcaacgttggtgtaggagcgggtgtcattttaccgcttgcagggggattcatgaattcgacttcatcagtgccagagaggttttatcttggagatattcagagacgctggaatccatggccacgcattccttactgctggaaaccttgcgaaactgtcggagggtgagtacaagaacttttcggcttctgaatttcggcaaacgttccggagctctgctggcgttgggattattttgcctaccaaacttttccgggtagaggtgaactattgccgcatcctaaagcaagctgagcatgacagcgcgaagactggaatccagttcagcttttcctcgcccatcaggagatgggtttattatttgctgtttttgacctcacgagggatttgtcctcgcacaactcaaataccgatgctgtggctacacaatggtggatagaataatattttggcccataatgttgtataattcatac

SEQ ID NO: 76710 - DNA, 1734 bp, Zea Mays
cggcacgcccgcacgggaaccgggcagcacggcttgctaaacacgcagaaaagaaaagccgttctccctccgtttccccaaaccccaaggtccccaaccatggcagccgccgccgattctgcctccgaccaaaaccctaaggacgccgagcggcacgtgctcaccgccgaatccgacgccgatttctccgaggaggactacgacgaggatggggaggaggaatacgaggaggaggaggagctggacgggccggcggcggcggcggcggagcgggagcggatgcagtccgtgttacggaggctgtcatccgaccccgtgggcatccgcgtccacgacgtgatcatcaagggcaacaccaagacgcaggacgagctcatcgaggcggaggtcgccgagctgctccgcgccgcccccaccgtgcaggacctgctccgcgccgccagtgtcgccactgcgcggctgcacgatctcgacatcttcgacgccgtcaagatcacgctcgacgccgggccgcccgagctgcctggcaccaccaacgtcgtcatcgaggtcgtcgaggtggccaaccccctcactggcaccgccggcgtctattcgaagcccgaagcaagatcttggtcgctggaagggtcacttaagttgaagaacttgtttggctatggtgacatctgggatgcatcaggatcctttggttgggaccaaacaacagaggttggtgttggagtctgcctaccgaggtttaaatcaataccaacaccattgatggctcgggcatctttgtcatcacaagattggctgaagttttcatcatacaaggagcgcctacttggcctttcatttggtttgctgtcaacaaggaaccatgacttgtcatacaaccttgcgtggcgtaccttaactgatccatcacgtgtctcatcaaaggccataaggaggcagttagggcataaccttctttctgcattgaagtacacatacaagattgataagagggattcacatcttaggccaacgaaaggatatgcgtttcagtcaacttctcaagttggtggtctatggaatagcaaaggattgagatatttccggcaggagttcgatgtacgtggtgctgtgcctttgggattttatagtgctgctctcaacgttggtgtaggagcgggtgtcattttaccgcttgcagggggattcatgaattcgacttcatcagtgccagagaggttttatcttggagagaggcgcggaggcatgtccttaataactcggagagtggctcggctgaccctggaagggattacttgggaggtgatctggccgtgtctgccttcgctgacctttcttttgatctgcccctcaagatattcagagacgctggaatccatggccacgcattccttactgctggaaaccttgcgaaactgtcggagggtgagtacaagaacttttcggcttctgaatttcggcaaacgttccggagctctgctggcgttgggattattttgcctaccaaacttttccgggtagaggtgaactattgccgcatcctaaagcaagctgagcatgacagcgcgaagactggaatccagttcagcttttcctcgcccatgagatgggtttattatttgctgtttttgacctcacgagggatttgtcctcgcacaactcaaataccgatgctgtggctacacaatggtggatagaataatattttggcccataatgttgtataattcatac

SEQ ID NO: 76711 - DNA, 1610 bp, Zea Mays
cggcacgcccgcacgggaaccgggcagcacggcttgctaaacacgcagaaaagaaaagccgttctccctccgtttccccaaaccccaaggtccccaaccatggcagccgccgccgattctgcctccgaccaaaaccctaaggacgccgagcggcacgtgctcaccgccgaatccgacgccgatttctccgaggaggactacgacgaggatggggaggaggaatacgaggaggaggaggagctggacgggccggcggcggcggcggcggagcgggagcggatgcagtccgtgttacggaggctgtcatccgaccccgtgggcatccgcgtccacgacgtgatcatcaagggcaacaccaagacgcaggacgagctcatcgaggcggaggtcgccgagctgctccgcgccgcccccaccgtgcaggacctgctccgcgccgccagtgtcgccactgcgcggctgcacgatctcgacatcttcgacgccgtcaagatcacgctcgacgccgggccgcccgagctgcctggcaccaccaacgtcgtcatcgaggtcgtcgaggtggccaaccccctcactggcaccgccggcgtctattcgaagcccgaagcaagatcttggtcgctggaagggtcacttaagttgaagaacttgtttggctatggtgacatctgggatgcatcaggatcctttggttgggaccaaacaacagaggttggtgttggagtctgcctaccgaggtttaaatcaataccaacaccattgatggctcgggcatctttgtcatcacaagattggctgaagttttcatcatacaaggagcgcctacttggcctttcatttggtttgctgtcaacaaggaaccatgacttgtcatacaaccttgcgtggcgtaccttaactgatccatcacgtgtctcatcaaaggccataaggaggcagttagggcataaccttctttctgcattgaagtacacatacaagattgataagagggattcacatcttaggccaacgaaaggatatgcgtttcagtcaacttctcaagttggtggtctatggaatagcaaaggattgagatatttccggcaggagttcgatgtacgtggtgctgtgcctttgggattttatagtgctgctctcaacgttggtgtaggagcgggtgtcattttaccgcttgcagggggattcatgaattcgacttcatcagtgccagagaggttttatcttggagatattcagagacgctggaatccatggccacgcattccttactgctggaaaccttgcgaaactgtcggagggtgagtacaagaacttttcggcttctgaatttcggcaaacgttccggagctctgctggcgttgggattattttgcctaccaaacttttccgggtagaggtgaactattgccgcatcctaaagcaagctgagcatgacagcgcgaagactggaatccagttcagcttttcctcgcccatgagatgggtttattatttgctgtttttgacctcacgagggatttgtcctcgcacaactcaaataccgatgctgtggctacacaatggtggatagaataatattttggcccataatgttgtataattcatac

SEQ ID NO: 76712 - DNA, 1609 bp, Zea Mays
agattatgccaaccatacaatggggaaggcgcacaagaactgtcttggatgttggatgtggtgttgccagctttggtggatacctgcttgacaggaatgccattactatgtcatttgccccaaaagacgagcatgaggctcagatacagtttgccctagagcgtggaattccagcatttctagcagtaattggaacacaaaagcttccgtttcctgataatgtgttcgatgttgtacactgtgcaaggtgcagggtccattggtggaaaaccattgttggagcttaatagagtactgaggcctggaggatatttcatttggtctgcaacccctgtctaccgtcaagagcaaagagaccaagatgactggaatgcaatggttactctgactaaatcaatctgctggagaacagtggtaaagtctcaagatgtcaatggaattggagttgttatatatcaaaagccagcatcgaattcttgctatgctgaaagaaagaccaatgagccccctctatgctccgagagagatggatcacgctttccttggtatgctcctcttgatagttgccttttcacaactgccattaccacttcagatgaaagatataattggcctgttccatggcctgaaagacttgatgttagctatgcaagtgtacctgatgattctgcttctaacaaagagaagtttgaagctgatacaaagtattggaaacagctcatttcagaagtatatttcaatgacttcccacttaattggtcaagcattcgcaatgtaatggacatgaatgctgggtttggagggtttgccgcagcactcattgatcaacctttatgggttatgaatgctgtgccaattggtcaaccagataccttgccacttattttcaacagaggtttgattggggcatatcatgactggtgcgaatctttcagcacctaccctcgtacctatgatcttctccacatgagtaatctcattggaaatcttacaaacaggtgtgacctcatcgacgtggtggttgaaatcgacagaatactgagacctggaagatggtttgtgttgaaagacacgttagagatgataaagaagatacgcccaatcctgaagtctctgcactatgaaattgtcgtcgtgaaacagcaatttcttgtggctacaaagagtttctggcgtcctggcaaaccagcttccacatcagggtgacatatagatcgtactttcaagggagtcttcaacaaccaacgattctattgattctttgagacctgatcaaactaattctttctacaacacagtctatgtagattattacctgtataagtatagaaaatacatatggtaagttgaggtaataccccttttttttgccaaagcataataacaaggatgttatagacttatgcagtagtaggcaagttttgacaaatacatacaaagggaagggatcatgaaacgtgttgtgtatacttgctcgttgataacttttgtaaaaggagtttgaaataaccttgtactcagtactcatcatggttctgcaatgccagtgcattctgacgttcagctcccaggagctatttttatacctctgcacatagtcagaatccga

SEQ ID NO: 76713 - DNA, 1772 bp, Zea Mays
ggaaaactaataatatccatctgccttatctactcgatcagctcgagccagctgtgcgcgcgtcccccctggccgcacgttcctctgctcggcgtacgtccctggccctgcgcctcctagtgtagacttgtccccacatgacattgctggtcagattatgccaaccatacaatggggaaggcgcacaagaactgtcttggatgttggatgtggtgttgccagctttggtggatacctgcttgacaggaatgccattactatgtcatttgccccaaaagacgagcatgaggctcagatacagtttgccctagagcgtggaattccagcatttctagcagtaattggaacacaaaagcttccgtttcctgataatgtgttcgatgttgtacactgtgcaaggtgcagggtccattggtatgcaaatggtggaaaaccattgttggagcttaatagagtactgaggcctggaggatatttcatttggtctgcaacccctgtctaccgtcaagagcaaagagaccaagatgactggaatgcaatggttactctgactaaatcaatctgctggagaacagtggtaaagtctcaagatgtcaatggaattggagttgttatatatcaaaagccagcatcgaattcttgctatgctgaaagaaagaccaatgagccccctctatgctccgagagagatggatcacgctttccttggtatgctcctcttgatagttgccttttcacaactgccattaccacttcagatgaaagatataattggcctgttccatggcctgaaagacttgatgttagctatgcaagtgtacctgatgattctgcttctaacaaagagaagtttgaagctgatacaaagtattggaaacagctcatttcagaagtatatttcaatgacttcccacttaattggtcaagcattcgcaatgtaatggacatgaatgctgggtttggagggtttgccgcagcactcattgatcaacctttatgggttatgaatgctgtgccaattggtcaaccagataccttgccacttattttcaacagaggtttgattggggcatatcatgactggtgcgaatctttcagcacctaccctcgtacctatgatcttctccacatgagtaatctcattggaaatcttacaaacaggtgtgacctcatcgacgtggtggttgaaatcgacagaatactgagacctggaagatggtttgtgttgaaagacacgttagagatgataaagaagatacgcccaatcctgaagtctctgcactatgaaattgtcgtcgtgaaacagcaatttcttgtggctacaaagagtttctggcgtcctggcaaaccagcttccacatcagggtgacatatagatcgtactttcaagggagtcttcaacaaccaacgattctattgattctttgagacctgatcaaactaattctttctacaacacagtctatgtagattattacctgtataagtatagaaaatacatatggtaagttgaggtaataccccttttttttgccaaagcataataacaaggatgttatagacttatgcagtagtaggcaagttttgacaaatacatacaaagggaagggatcatgaaacgtgttgtgtatacttgctcgttgataacttttgtaaaaggagtttgaaataaccttgtactcagtactcatcatggttctgcaatgccagtgcattctgacgttcagctcccaggagctatttttatacctctgcacatagtcagaatccga

SEQ ID NO: 76714 - DNA, 2493 bp, Zea Mays
aaaattaaataagacgagtcggtctaatttagtctataaagtcaaacgaattaagacgaaggagtactgaggattgttcaaagtttcatactatgccaccatccgaaaaggaccagcaccggctgccaaggtgccaacgcagcaggcgtgatcgcgcgacggtccgcttccattccaaacccacccactcatccacccgcctaaccccaccacccgtcattgctgcggctgcctcatacttccacaatttcaccgctccggcctccggctggttccactccgcaccgcggcgcggaggcgatggccgtcccttcctccgaccgcgcgagacgccccttccccctctcgccctcgctctcgctcttcctcctcatctccgccatcctcgtcctcctcttcctcttcctcgacccctcgcccggatcgctcgcgttcctcccctcccgtctctccgcatcagccccttccctcgcacctcctctaaccccccagcaacaaagccgcgccccgcgaagcagaagcccacctcactcgagaccagacggctcgagcgccaccgagaaagcggaggagggcactactgccaccgcatcgcaacccgtcacaaaagccgatgccaacggtagcgcatcgggaccatccgcaaaggaatccagcggtggcagcggctcaggcggtaacagcggcgccaggggagtcggggcggacggggagacgggtacaagcgtcgtcgccccggtggagaaaggtggggacgacgaggaggaggcgccggtgagcgtgaggtggcagacgtgcagcaggctggggaggggcgtgtcgtcgacggactacatcccgtgcctggacaacgtgcgggcgatcaaggcgctgcggtcgaggcggcacatggagcaccgcgagcggcactgccccctgccgccccggctcaggtgcctggtgccgctgcctgcagggtaccggacgcctgtgccgtggccgcggagccgtgacatgatttggtacaacaacgtccctcacccaaagctggtggagtataagaaagatcagaactgggttacaagatctggtgattatcttgtttttcctggaggtggaactcaattcaaagatggcgtgggaagatacattcagtttgttgaacaggtggaaaaccattgttggagcttaatagagtactgaggcctggaggatatttcatttggtctgcaacccctgtctaccgtcaagagcaaagagaccaagatgactggaatgcaatggttactctgactaaatcaatctgctggagaacagtggtaaagtctcaagatgtcaatggaattggagttgttatatatcaaaagccagcatcgaattcttgctatgctgaaagaaagaccaatgagccccctctatgctccgagagagatggatcacgctttccttggtatgctcctcttgatagttgccttttcacaactgccattaccacttcagatgaaagatataattggcctgttccatggcctgaaagacttgatgttagctatgcaagtgtacctgatgattctgcttctaacaaagagaagtttgaagctgatacaaagtattggaaacagctcatttcagaagtatatttcaatgacttcccacttaattggtcaagcattcgcaatgtaatggacatgaatgctgggtttggagggtttgccgcagcactcattgatcaacctttatgggttatgaatgctgtgccaattggtcaaccagataccttgccacttattttcaacagaggtttgattggggcatatcatgactggtgcgaatctttcagcacctaccctcgtacctatgatcttctccacatgagtaatctcattggaaatcttacaaacaggtgtgacctcatcgacgtggtggttgaaatcgacagaatactgagacctggaagatggtttgtgttgaaagacacgttagagatgataaagaagatacgcccaatcctgaagtctctgcactatgaaattgtcgtcgtgaaacagcaatttcttgtggctacaaagagtttctggcgtcctggcaaaccagcttccacatcagggtgacatatagatcgtactttcaagggagtcttcaacaaccaacgattctattgattctttgagacctgatcaaactaattctttctacaacacagtctatgtagattattacctgtataagtatagaaaatacatatggtaagttgaggtaataccccttttttttgccaaagcataataacaaggatgttatagacttatgcagtagtaggcaagttttgacaaatacatacaaagggaagggatcatgaaacgtgttgtgtatacttgctcgttgataacttttgtaaaaggagtttgaaataaccttgtactcagtactcatcatggttctgcaatgccagtgcattctgacgttcagctcccaggagctatttttatacctctgcacatagtcagaatccga

SEQ ID NO: 76715 - DNA, 1224 bp, Zea Mays
aaaattaaataagacgagtcggtctaatttagtctataaagtcaaacgaattaagacgaaggagtactgaggattgttcaaagtttcatactatgccaccatccgaaaaggaccagcaccggctgccaaggtgccaacgcagcaggcgtgatcgcgcgacggtccgcttccattccaaacccacccactcatccacccgcctaaccccaccacccgtcattgctgcggctgcctcatacttccacaatttcaccgctccggcctccggctggttccactccgcaccgcggcgcggaggcgatggccgtcccttcctccgaccgcgcgagacgccccttccccctctcgccctcgctctcgctcttcctcctcatctccgccatcctcgtcctcctcttcctcttcctcgacccctcgcccggatcgctcgcgttcctcccctcccgtctctccgcatcagccccttccctcgcacctcctctaaccccccagcaacaaagccgcgccccgcgaagcagaagcccacctcactcgagaccagacggctcgagcgccaccgagaaagcggaggagggcactactgccaccgcatcgcaacccgtcacaaaagccgatgccaacggtagcgcatcgggaccatccgcaaaggaatccagcggtggcagcggctcaggcggtaacagcggcgccaggggagtcggggcggacggggagacgggtacaagcgtcgtcgccccggtggagaaaggtggggacgacgaggaggaggcgccggtgagcgtgaggtggcagacgtgcagcaggctggggaggggcgtgtcgtcgacggactacatcccgtgcctggacaacgtgcgggcgatcaaggcgctgcggtcgaggcggcacatggagcaccgcgagcggcactgccccctgccgccccggctcaggtgcctggtgccgctgcctgcagggtaccggacgcctgtgccgtggccgcggagccgtgacatgatttggtacaacaacgtccctcacccaaagctggtggagtataagaaagatcagaactgggttacaagatctggtgattatcttgtttttcctggaggtggaactcaattcaaagatggcgtgggaagatacattcagtttgttgaacagctcgagccagctgtgcgcgcgtcccccctggccgcacgttcctctgctcggcgtacgtccctggccctgtgcctccta

SEQ ID NO: 76716 - DNA, 173 bp, Zea Mays
ctgaaaccctgtagaagttgattttaaaaacaaaaattcattctaaactatgtttagacatcactagcttccaataatgcatcaaggagtgttcagaaacctcaactaatcaaattgataggagagatgactgaggagtaaagtgaaaatggtggaataatcttacttgaaat

SEQ ID NO: 76717 - DNA, 4563 bp, Zea Mays
tcaacccattgctgcagtaaaaagaataggtagtgagaacaggacagagaaaatacactgccacgtggtagcactactaagctgtgtaaagtattgagattgcaaatgttttcaaatcgtctgattgatcctagtcacgaatcatcatagtgcgtctgatcgatcctagtcacgaatcatcatagtgcgtaactgatcgccatgttactgataagccagactagttatgactaattatgattagttggatgacttgataacctttgcatagaaacactttccatattaaggaagtatgataaaacatgaattgaaattttctcaaaaggtgtaaatttgattacaatgagctgactacaattgccttgtaaaatatcagaaaatgttccagagaaaattgagctagcaggaggattactttcaaaatatttgccagatcgtttaattttctactaaaatcacatcttaattaagtagtaagtgttagaaatatatgcatatggtgaacaggaactgcataaaaaattagagcaccaactatttgttctatgtgcacgaagttaaaatgataagcaaaccagcaaaagtacatgaatcataatgcaggaagatttaacaacctcactgtttgcaagtttctcatatcttaaaaatcatgattgtttactacaagaaacttgaaagaaatactaaaacatactcaacagagaacaaagtaaacgggaaaaagtccaacctgtgttccccagtatgagttcagtgtcctagccacgaatgacaacaaaccagcaataaggggttggttgtagtatgtcaccaggctctctcctagtcgatactccactagaccagcaataatcttcaacacacagttagcaaagtaaattcagacaaactgtgaaaacaaaactactataacatataatttgcaagcaaaatttattcccatgatctggagagtggaaacagatcaaattttcatggtgtgcccttttgacctgttcctagatatatggatagttgaactgcaaacaaatcaagaatatgtaagagagattgcatttttttaaaagatgaagtcttgaaccatggcctcaacagcacaatcttgtaaatcaaagttttaaaaaatgaggagcagcatccaaaaggagacgggaccacatgaatttagcaaaaatctgggtcttgtttaacatgctgaacatgacatgcttctaaggaataaatttaaaggtgttaaacagtaaatttacttgcattaagtgttagagattgtatctgggcatatcttttagatttgtaattgtcatgtgctctaggccatattggcttgccttgtactccaagccatattggccatattggctacggggattcagccctccttcgcgcttcacgggcgctgacgcccgcgtgtgccgacgcgtggcagggagccacccctcccccgcgcttctcctcgcgctcgctgtcgacattcgtacctactccgggccttccaaagggtagcgctgcgatggccgacccgagcgcctctgccgacttcgctgcgcaccagcacctcgcgcagccgtcgctgatgggcacagcagagctctgcccggatctcgctgcctctccgccccagctcgcaagctgccatcgacagccaccgccatgggcacggccaacggccaaaagccggtagagggtgcttcctttgacaagctccgccacgtcgagtccatgtcggagctgccctccggcgccggcaagatctcgcggatcaacgtcatcatgctcagagttgctcgccgtcgaggagagcaacctcatcttccccagctccgacttctctgtcgatgctctcgtatatataagggtcacccccacgtaaggttagtttttccacctacatttctatatggtatcaacagtctagtttcttctcctgctgccctagcccaccaaacgttgatccccctctctggcgttgcctcccctgtgcgctgattctcccctccctcgagtgcctcctcctctgtgcccccaaacccgtcggcacttcagccctgatcccggactgcatcatgtcatccatcacctccaccaccttggcaactagtccatcgtagaccagcggtagttttcttgctctctagccctgcaccattatctacgtaaactcctatgttcctagccctacatcaatgctataaattcttctgcctctaccggaccatcaaactaccatagtgtgctcgccgggccacattggcgggctgttatgactgatgagtaccatgcactaatcagcaacgacatgcgacgccttgtccctcaacatcctggcaccaatgtggttacgggcaagtggaacttgaagcccaagtcccactaggatggtacacttgctcatcacaagacacgttgggtggtctggggcttctcacagcagcacaacgtcgactataatgagaccttcagcctggtggtcgaacctgccaccattcatgtgatcatgtcatcctcagcactgcgacctctcgtgcctggcccatctaacagttgaacgtcaagaatgtgttccttcatggccacctcgaggagatggtctattgtcagcagctgtctggctttattgactcctttggtcctaatcatgtttgtcagttgcagaattccctctatgaaccgaagcaggctcttgggaatggttccagtgctttgacacatacatacaccgcttcgagttcatcgcttcagcctccgacacgtccctctttgtttacaaagatggagacaatgttgcctacatgcttctctatgttgatgacatcgtcctgatcgcatactcgacacggctgttgtagcacttcaccatgcatctccacatcgagttagacatgacggacctaggtgctctcatcacttccttggcatcttcgtcacacgctccactaacgacatcttcctttcctagcggtagtatgccattgacctcctacagcgggtaggtatggccgagtgtcacactacatcaactcttgttgacactcctatcgatctctcttccactgacgacacgcctgctgctgatccgatcacataccggagcctcgtcggcgctttacagtatcttatgctcactcatcccgacttggcatatgttgtatagcaagtacgtctctttatgtatgatccccgtgagccccatctcatgttgatcaagcatatcccccgatatgccaagagcacactgtcctataaccttcacattggtactggcccgattcaatccttgactgcttatagagatgcagattgggctggctatcctgattcccggtattctaccttcgaccactgtatctacctaggagataatattctcttagtcctcaaaacgctagacgactgtctctcgctctagtgtcaaagcaaagtactgtgtcatcacccatgccatcgccgagtatgctggttacaacaactgctacaagaacttcacatctccgtttcttcggcgaccattatgtattgtgataatgtgagtgttgtatggtcaacccaacgcatcaccgtcgcacaaaggatattgagattgacatacacttcgtctgcaagaaggtcgcattgggccaagtctgggtgctccacgagttgtcctctcaccagtttgccaacatcacgacaaggacttacctattcagttgtttattgatttctgatccagcctttgagttcctgattctcccgctgcaactgtgggctggtgttaagattgtatctaggtatatcttttagatttgtaattaccttatactccaagccatattatcttgccttgtactccaagccatattggccctatatatatgatggtcgcccccacctaaggatgtagtgtttcccaattatctttgtacattaaatttctagaatcattgcaaatacaacaacaacaacaacaacaacaacaacaacaaagcctttttgtcccaagcacgttggggtaggctagagatgaaaccccgtatgaaaacctcagagctcaacccccaaagaacagaaaagggaaacaaaggcaaaggagaaccgaaaacaacgaaacggggaaacacataaaagagataaaacccacaaggaccagcaagatctaaaatggacacaagaaaaggtcaaacgattaaggaggaaaaacgaaactatcaatcagggttctggcacgtgaattgcacacttccaccccttcctatctgcggcgagctctttgtcaatattccactccttcaggtctctcttcacagcctctgtccacgtcaaagttggtcgacctctacctctcttcacattttcgggacgcctaattattccgatatgcactggtgcctcttcaggtcttcgttggatatgtccaaaccatctcaagcgatgttgcataagcttctcctcaattggcgccactcctactctctctcgtatatcatcattccggactcgatctctccttgtgtggccacatatccagcgcaacatacgcatctctgccacacttagttgttggacatgtcgtctttt

SEQ ID NO: 76718 - DNA, 2184 bp, Zea Mays
gttgactctagcggcgctggcgagtccaaccctgttcgcaaaaggcgtcccaaaacaaatgccactatgcggctgctagagcgtcgtctcctttcctcccccaatccgccctttggcttcgctggcggcggcggcggctggggaaggcaggaatcccggcctttgcttgcgcgccactccgggcaccggctgcagctcgcagctgaacaaaatggcctccaatggtaatggaaatctcaaagctgatattcaacaagtagagtcaacagcttcagataatgttcaaggcgcaacaggcgtcaacactcttgccactcagggtgtttcacgaaatgaaaagcggtggagcgggtttagggatttctggaatcgcctttgtactggccccaagttaaagaagcttggtccctccacttcgttcaagtttcaacagatcgcacttcaacgtgatgagttctcacgttcgatccattcggacaaccatgttagccacgagcatttccagtttatccggaagattaattgggaacaactgtgggtgatggctaggaactggataaaagagcctatgaatatggccctttttgtttggattgcttgtgttgctgtatccggtgcaattctcttccttgttatgactggaatgctgaatcgtgttttgcctagcaaatcaaaaagagacacctggtttgaagtgaacaaccagatcctgaacgcattattcacgctcatgtgcctctatcaacatcctcaacggatctacaactttgtgcttctttgtcgatgggagcagcaggacatcttaaggcttaggaagatatattgcaaaaatggaacatataaacctaacgagtggatgcacatgatggtggttgtgatcctccttaatctgaactgctttgctcagtatgccctgtgtggtctaaacgtagggtaccgcagatctgaacgccccgctatcggtgttggtctcactatttctgttgcaattggggctgcagcattcgctggtctgtacaatatcatcagccctcttgggaaggattacgacacagaacatccagatatcgaccaagaagcacagatccatgccacctcaaccgagagcggcagaccaacttcacggcttcagtcattcgagaggagatactctttcatccagagcgacgaacgccgttttgtggagagaaggcctcagtgggttggcgggctaatggatttctgggaccagatatccattgcgtatttgtcacttttctgcagctgctgtgtctttggctggaacatgcagaggcttgggttcggtaacatgtacgtccacatcgcaacgtttctgctcttctgcctggcgccattcttcatcttcgtcctcgcagccggcaacgttgacaacggatccgttcaggtggcgttggtgctcaccggacttttcctgtgctttttcggtctactgtatggcggcttctggaggatccagatgaggaagagattcaacctccccgaaaacagcttctgctgccacaacccggacgcgtcggactgtttccactggttattctgctgctcgtgctcgcttgcccaggaagtcagaactgcggattactacgatatcacagaggacaggtcgcacacagggcaggtagttggtgaaagccaccgcataatgtccccgttgcagcgcgaagacggtctgcctcttttcaagtcgagcccaagctcgccgtacaggagcggcaacgttagtccgtcgatcttcatcctggagagcccgtcaccgtcggccccacgtaggtcgtctggttcgtcgcctcagggtggtggttcaccgacgatgggccatagggcgatgaaggcgccagttccatctgttcttcaaagagagagtggaccagatcatgcacaggggtgatccaatgaagcagctaccgcttgccagcccaatgagatatgtatatttttgtaaaggagatacatcgtcggcagatattttttttctgtgctgtctttcttgttcgtaagaaatgtatagaccttcgagttctgttgtgcatttgagctccgtcatgcatggttgcttcttatgtgaggcacgattattgaagagacctctcgtttgctgctcggtatctgccgatgtgttcatgataacagaagtgtgctggtgctgatagtcttactcaacaa

SEQ ID NO: 76719 - DNA, 1769 bp, Zea Mays
ttctcttgaatagtatacatattcaggttgaatagatgctgagagctacttgagtgactgaatcagccaaattaatttagggtcatatatgaagggccatgtgtttcaaaattacctttactttagagcgtaacatatttcatggtttcccatcctcacctcacgtgttcatttggggcctgtacctatagtagtagggtatttactgttagagagtaactgttagggtttcccgtatattgttagggtttccctgtttgcccctattgtaatgggctttggcccacttaacctctctattaatacatgtccaacccaggattagggttttctcccactccaatatttacttttgagttgttggactgggtagattgcctgtgcattccttttgagattgagaagctacatgtgacctttgagactaaccagaatactggcctttgactttgagcatacaagctgagtctattccttacatatctgatgcaaccgagctgcttttatttctcatgtttgaagagggtgaaatgcatggttgtctaaatataatactccctctgttccccaaattatagttcgctttagttttgtcaaaacttaaacttctctctaactttgaccaattttttggtaaaaatatattatcatctgcaagctgaaataaattcactatcaagagatttcatggagaattcaatgaaactaatttgatgtcatagtcttgtagatattggtgtatttttctataaattttctataaacttggtcgaagttagagaagtttgacttaggataaagctaaagtgaactactctactatttggaacagagggataaattactattccaagtttttgtttgaaattttattatatgtgctgtcattttgattctgttgtcctctaatttttttggttcaatttttataaccagatgaacataacatataccacttcagatgctgggaatattactttaagtgatggaaagtttgcaaagagaaaaggcaatgatggtgtcccgtaccaacagcttgagatgggaggtcaggcaccaaactcttcgggggtggacaacaccgcaagcacaacagatggctgggaagacggctgggacgatgactgggatgatgaagaagcaccggcaggacctgtggataaaaagcctacgggcagtgtctcagcaaatggcctttcgttgagatcacagacaaatagcaaagatggttgggatgtggattgggatgactaagctcctaagaacttggagtgtagctgtcaaatgagggaggaagatacttccatctgtctgacctgcaggaaagacatctacagttcgaaatgatggaacttagtcttgaccaagtgacccttatcctgaggtgaaggattgcctcacgccctcacttcatacggtttgtacaatattgttccaccccccgtctgagttgatacacgaactgttagcggtactgatttagttcttttcggtttgtaatggtacagaagaattgtcagtatatatatatataaaaccaaagcacacatttttattctttggttgaggtaattattctttattctgcacacactcctgagtcccataccattatttgtatcatcattcatgtttatactgacacatttcggataaggtatgtgcagtgcaacagacagtttgctgggtacctttttctgaatacattagttgttgtgtaccaatgactctgatcagtcgcgcattgttttacatctgtgctgctgttg

SEQ ID NO: 76720 - DNA, 770 bp, Zea Mays
tcagatgctgggaatattactttaagtgatggaaagcttgagatgggaggtcaggcaccaaactcttcgggggtggacaacaccgcaagcacaacagatggctgggaagacggctgggacgatgactgggatgatgaagaagcaccggcaggacctgtggataaaaagcctacgggcagtgtctcagcaaatggcctttcgttgagatcacagacaaatagcaaagatggttgggatgtggattgggatgactaagctcctaagaacttggagtgtagctgtcaaatgagggaggaagatacttccatctgtctgacctgcaggaaagacatctacagttcgaaatgatggaacttagtcttgaccaagtgacccttatcctgaggtgaaggattgcctcacgccctcacttcatacggtttgtacaatattgttccaccccccgtctgagttgatacacgaactgttagcggtactgatttagttcttttcggtttgtaatggtacagaagaattgtcagtatatatatatataaaaccaaagcacacatttttattctttggttgaggtaattattctttattctgcacacactcctgagtcccataccattatttgtatcatcattcatgtttatactgacacatttcggataaggtatgtgcagtgcaacagacagtttgctgggtacctttttctgaatacattagttgttgtgtaccaatgactctgatcagtcgcgcattgttttacatctgtgctgctgttg

SEQ ID NO: 76721 - DNA, 909 bp, Zea Mays
cgaagagtgccccccttcgtttgtcgacgcgctccgactccatgccgctgtcgccgccgccgccctcctccagcccgaggcaagcagcgatccaggagctcaggaggggtacccagctggcggagctgctcaggcagcaggtagagctcatcccggagcctaaccgccgccacgctgcagcggtcaacgtgggcgagatatccatggctatggagtcgtcgctctccatcctccagtctcagatggagcaccccttctctgagcctgaggtcatggcggctgcgctcactgcccactccgacggaggcaccagcggggaaagaaatggcggtcccgtggcccgtacaaggaaggtgagggtgcggcaccggccaggcagaggcaggcctgcagctggagatgaactgccgatgttatactacaagtgcgggtacagcgacgaccacaagtgcccagcgaagaaatacgtgcagcagcaaagcaacagctaccctccgattttcttggtcaccctgatcaacgagcacacgtgcgacgccttgttccgagacgacgagcccatcatcagctcaagcagcagtggctcgtcgcaggtcctcgacttcacgaaggcgtcgctttcttctcctctccattgatgttggcggcggcgcggctgcaggggttggaagaaatagagatgcatggaagaagacagatttcgtgttcggatgatgagtactactagctagctaagctagtcgtcttcaattcgttgcccacgatgatgtcggcagatgagctccgcgcactcagcagcagggattattatcattatacattccgagtttccaagcagcagccaggcagattctcgcggcaataattaagagttttagtagccctggcatgcatgcatgttgcatttga

SEQ ID NO: 76722 - DNA, 2082 bp, Zea Mays
cttccctttgaaaaccaacttggagactggtaattggcacgcaacaaatgtgtatacagttattacttgcatggacgaagtatggggtatggctgaaaagagtgaaatatatttaggagaaccctattgttggggaggcttctaactcctcctgggaccccacgtgttcctgcactggagtttgctgaggaaacaccatcctcaaatatattactgaagcgcactgcaactagatcgtcctcaactactagagcatctaggcttccagtatctcaaacagagaatgggcattcgatggttcccactagaccaacaagaagtaacagccgaccatctatccaatcggctctcatgaatggcaacaacaggacatcagttccgaacacaagcatttcttcagtgacttcaagacctacaacccctagtaggcgaagcagcacagttgtcgcaccaaaacaatcagttccagctgcacgtacagtgcctgcaagatcctctacacctgttaaaactcgtctatctacaccagcaaaaacccgcccatctactcctacaagtactcgcccaacagcaccaaactcttcaactgattcgtctgctgccaagaccacatccacacataatgtgaggccatcgactccaaattcccgaccccgtattgttcccaattcatcttcaggtgcagctcatacaataagccgcccgagcgcctcctcgagtacaacaagcagatcagggtcttcctcaggtaatgttcctgggataagccgtgccacctcgttgtcctcaagttcgattccttccatgagccattccagctcacgatcatctacacctacacgccaacctgcaattcgttcatcggctccagctattggtcgttctccttctgttggacggagttctagcatcaacagctttacatctgtgtcccagtctgcagccagtagtggtcggaactcagcaccttcatcagctccatcatctcgtccaagttctccgaatccacgaccccgagctccagtgcgaccacttaatatccctgatttcccaaatgaagctccaccaaatctaaggacaaaattacctgaaagaccactatctgctggcagatcacggcctggaatggctttaggcataagatcaaccccaaatactgaaccttcagccgcctcagctcctatgaagaaggtctctgtgtctgctgttagtcgaagtaaattttctgatgcatcatcaaagacctctactcccacaaatgggcaccaaaatcgacaggctgaaaggtccactgttgacagccaagctaatagaccctcaagacctgtcacaggcacagataatggatttgggaggtcgatatcaaagaggtcacttgacatggctatcaggcacatggacattcggcagaacttgggtggcattcgaggcgcatccctgtttccccagagcacccgctcggctgctgccaaggtccgtccagctcggacatcagacccagggcatggcatctcaaaaggcgaccagcaccgcactgacaatggaaacagcttgaacgggcacctctatgtctctggggactcgaacggagctctctcacgcaatggtggcagctcaaccggttcgccagacagggagagcatcaggaccaaggagaccctgatcgagctggacatctatggtagctcgcgctatgaagcaatgctgctgagcgaggacttgcggaacacaagctggctgcatggattcgacgacaagcccgaccaaagcccgctgtttgaccaccggttcgagccgctgccggagcccttcagcccgttatgacagccgctgcttgtaaagtacagtatgatcaccactagctagctcttcgttctgtgctccttttgtgctgcaaaatgtgtatgatttggtctgttttatgtcttataaattatacgtgattggttggttctgcactccctccgatcccatttcagaaaccgaagatctattgatttgtccctgggcattagctttccacgaattgatgtacagaaagaaagaaagtttggtgcgggtttaatccgactgcggtttata

SEQ ID NO: 76723 - DNA, 2257 bp, Zea Mays
acatcacagcgcagcggcgcagagcttcacgctctcccacgcagccctcctccagacctccaccactaccgctaccagcggcagcagcgtcgcccccctccgcctctccgcttccttctagccctctcatcggcatctctagcgcggcgcatctgtagcggaggaggaagagcggagcgtcgtctcgccccgcccgcggcattggctgcgggaactgggaaaggaggaattgaatagtttgggggcaacatagcttgctcgagagatggaggacctgttgggttcggagatcgggaagaacgactacgattggcttctaactcctcctgggaccccacgtgttcctgcactggagtttgctgaggaaacaccatcctcaaatatattactgaagcgcactgcaactagatcgtcctcaactactagagcatctaggcttccagtatctcaaacagagaatgggcattcgatggttcccactagaccaacaagaagtaacagccgaccatctatccaatcggctctcatgaatggcaacaacaggacatcagttccgaacacaagcatttcttcagtgacttcaagacctacaacccctagtaggcgaagcagcacagttgtcgcaccaaaacaatcagttccagctgcacgtacagtgcctgcaagatcctctacacctgttaaaactcgtctatctacaccagcaaaaacccgcccatctactcctacaagtactcgcccaacagcaccaaactcttcaactgattcgtctgctgccaagaccacatccacacataatgtgaggccatcgactccaaattcccgaccccgtattgttcccaattcatcttcaggtgcagctcatacaataagccgcccgagcgcctcctcgagtacaacaagcagatcagggtcttcctcaggtaatgttcctgggataagccgtgccacctcgttgtcctcaagttcgattccttccatgagccattccagctcacgatcatctacacctacacgccaacctgcaattcgttcatcggctccagctattggtcgttctccttctgttggacggagttctagcatcaacagctttacatctgtgtcccagtctgcagccagtagtggtcggaactcagcaccttcatcagctccatcatctcgtccaagttctccgaatccacgaccccgagctccagtgcgaccacttaatatccctgatttcccaaatgaagctccaccaaatctaaggacaaaattacctgaaagaccactatctgctggcagatcacggcctggaatggctttaggcataagatcaaccccaaatactgaaccttcagccgcctcagctcctatgaagaaggtctctgtgtctgctgttagtcgaagtaaattttctgatgcatcatcaaagacctctactcccacaaatgggcaccaaaatcgacaggctgaaaggtccactgttgacagccaagctaatagaccctcaagacctgtcacaggcacagataatggatttgggaggtcgatatcaaagaggtcacttgacatggctatcaggcacatggacattcggcagaacttgggtggcattcgaggcgcatccctgtttccccagagcacccgctcggctgctgccaaggtccgtccagctcggacatcagacccagggcatggcatctcaaaaggcgaccagcaccgcactgacaatggaaacagcttgaacgggcacctctatgtctctggggactcgaacggagctctctcacgcaatggtggcagctcaaccggttcgccagacagggagagcatcaggaccaaggagaccctgatcgagctggacatctatggtagctcgcgctatgaagcaatgctgctgagcgaggacttgcggaacacaagctggctgcatggattcgacgacaagcccgaccaaagcccgctgtttgaccaccggttcgagccgctgccggagcccttcagcccgttatgacagccgctgcttgtaaagtacagtatgatcaccactagctagctcttcgttctgtgctccttttgtgctgcaaaatgtgtatgatttggtctgttttatgtcttataaattatacgtgattggttggttctgcactccctccgatcccatttcagaaaccgaagatctattgatttgtccctgggcattagctttccacgaattgatgtacagaaagaaagaaagtttggtgcgggtttaatccgactgcggtttata

SEQ ID NO: 76724 - DNA, 216 bp, Zea Mays
cacagtttttccaaactgcagtttttcaaatactaaagtatactttagtcatgacattactacagtttacaatgcttcagttttcgaatacaaaagtatccaatacatcaatgtgtttgggaaaaactttggttgagaccaatcaaccagagcgggacccagctggcgctctctttacagagaaaaactttggctgagaccaaagtttccaaaact

SEQ ID NO: 76725 - DNA, 491 bp, Zea Mays
ttgcaggctctgttgtgaccagtgcagacagtgtgcaagcagtccatttgaaacattcagcaaatgtgcaagtagtccatttgaatcagatagtgctagcagtccatttgaaacattcagcaaatgtgcaaaagcagtccatttgaatcagatagcacccatatttcataagggtaaagaagcaaatatagctcctcatagagagcaccttgcctgctcgcgagccttcgatgagcttcaaaattcggctacaagagaacatttttgtgctacatgctagtacacttgacaaaggagatttactatgcctccaaggaaaaaaagagaggagcaagcagatcactcgacgaccagttgttaagcattattttggcagagagacaaccgagttccaagtttgacgaaccgcttccgatttatttcagaaagcaatcgatcagagaatagcaaaaaattaaaagatattaggatacttggtagctgaagagttt

SEQ ID NO: 76726 - DNA, 1491 bp, Zea Mays
aggtatgccagccgcgacgtcgtgccgggcggagggttttgccgagattttcccaaaaaagggcattgccacccgcaccgagaaaagaaaacgatacacgccgcgatagaaacactcagacacaccctctccatccgcccctcctcttcctcctcccggtcgcggcttcccccgattggcatccggggcgggcccatcccccacccggccgccgcgcgcgtccatggacggcctgcacggtacggacgcctgcttctcccccgcgagggccgtctcgccgcaggtgaggctcccggggccgccggacgtgggcagtcagtacctggcggagctactgcaggagcaccagaagctgggacccttcatgcaggtgctcccaatctgcagcaggctgctgaatcaagaaataatgcgggtgttgaatatacggcgccagcatggtgctgctgtggactttgagaagtttgcagccgcaagccccaaccagatacatccgtcaccccccatgccgaacttttgtggaaacggttttagtccatggaatgggatgcattcagagagagtaggtgttccgcaaggagctatgggttggcaaggacccccacagagccctgcttcttatatcgtcaagaagattttgcggttggaagtaccgacagaaacataccctaatttcaattttatcggtcgtcttcttggaccaaggggaaattctttaaagaggattgaagcctgtacaggctgtcgtgtattcatcagagggaaaggctcaattaaagattctggcaaggaggaacaactcaagggaagacctggctatgaacacttgagtgaacccctccatatcttgattgaagctgagttacctgctaatgtgattgatgcaagacttgcaaaggcacaagagatccttgaagagttgttgaaaccagtggacgagtcacaagactactacaagagacagcaactccgagaacttgccatgttgaattcgccactccgagaggagagtccacgttcaggcggtgctcctccaagtcccttcagtaagactgtctccgttcaacatatttgcactgaggacaagggttgttggcacgacgatcatcgtgggaggaagggagctttgccataggagcgactaccgtggccatgaccatgggaggaaggaccatgacgacccatgtagttggtagagacattgtattgtaaatacaatttggccacgtgttggagttggtaagcctcaagcacaactaggtttgcgaatatgtagtcgaggggagtggctcggtcttagtcgtcgtggaggtgatgaatgggtcatagtcaatcgagagccttgctaggagataggcgagaacctcgtcatcacggagagggcattggtgtcgacaagctccgtaaccttgcgaaagatgtcgatgagtcccatgaccttgcgaaatatgacagacatatcatgtttctttgatgcagcgagatccacag

SEQ ID NO: 76727 - DNA, 1321 bp, Zea Mays
aggtatgccagccgcgacgtcgtgccgggcggagggttttgccgagattttcccaaaaaagggcattgccacccgcaccgagaaaagaaaacgatacacgccgcgatagaaacactcagacacaccctctccatccgcccctcctcttcctcctcccggtcgcggcttcccccgattggcatccggggcgggcccatcccccacccggccgccgcgcgcgtccatggacggcctgcacggtacggacgcctgcttctcccccgcgagggccgtctcgccgcaggtgaggctcccggggccgccggacgtgggcagtcagtacctggcggagctactgcaggagcaccagaagctgggacccttcatgcaggtgctcccaatctgcagcaggctgctgaatcaagagagtaggtgttccgcaaggagctatgggttggcaaggacccccacagagccctgcttcttatatcgtcaagaagattttgcggttggaagtaccgacagaaacataccctaatttcaattttatcggtcgtcttcttggaccaaggggaaattctttaaagaggattgaagcctgtacaggctgtcgtgtattcatcagagggaaaggctcaattaaagattctggcaaggaggaacaactcaagggaagacctggctatgaacacttgagtgaacccctccatatcttgattgaagctgagttacctgctaatgtgattgatgcaagacttgcaaaggcacaagagatccttgaagagttgttgaaaccagtggacgagtcacaagactactacaagagacagcaactccgagaacttgccatgttgaattcgccactccgagaggagagtccacgttcaggcggtgctcctccaagtcccttcattcaacatatttgcactgaggacaagggttgttggcacgacgatcatcgtgggaggaagggagctttgccataggagcgactaccgtggccatgaccatgggaggaaggaccatgacgacccatgtagttggtagagacattgtattgtaaatacaatttggccacgtgttggagttggtaagcctcaagcacaactaggtttgcgaatatgtagtcgaggggagtggctcggtcttagtcgtcgtggaggtgatgaatgggtcatagtcaatcgagagccttgctaggagataggcgagaacctcgtcatcacggagagggcattggtgtcgacaagctccgtaaccttgcgaaagatgtcgatgagtcccatgaccttgcgaaatatgacagacatatcatgtttctttgatgcagcgagatccacag

SEQ ID NO: 76728 - DNA, 1743 bp, Zea Mays
aggtatgccagccgcgacgtcgtgccgggcggagggttttgccgagattttcccaaaaaagggcattgccacccgcaccgagaaaagaaaacgatacacgccgcgatagaaacactcagacacaccctctccatccgcccctcctcttcctcctcccggtcgcggcttcccccgattggcatccggggcgggcccatcccccacccggccgccgcgcgcgtccatggacggcctgcacggtacggacgcctgcttctcccccgcgagggccgtctcgccgcaggtgaggctcccggggccgccggacgtgggcagtcagtacctggcggagctactgcaggagcaccagaagctgggacccttcatgcaggtgctcccaatctgcagcaggctgctgaatcaagaaataatgcgggtgttgaatatacggcgccagcatggtgctgctgtggactttgagaagtttgcagccgcaagccccaaccagatacatccgtcaccccccatgccgaacttttgtggaaacggttttagtccatggaatgggatgcattcagagagagtaggtgttccgcaaggagctatgggttggcaaggacccccacagagccctgcttcttatatcgtcaagaagattttgcggttggaagtaccgacagaaacataccctaatttcaattttatcggtcgtcttcttggaccaaggggaaattctttaaagaggattgaagcctgtacaggctgtcgtgtattcatcagagggaaaggctcaattaaagattctggcaaggaggaacaactcaagggaagacctggctatgaacacttgagtgaacccctccatatcttgattgaagctgagttacctgctaatgtgattgatgcaagacttgcaaaggcacaagagatccttgaagagttgttgaaaccagtggacgagtcacaagactactacaagagacagcaactccgagaacttgccatgttgaattcgccactccgagaggagagtccacgttcaggcggtgctcctccaagtcccttcagtaagactgtctccggtaggccgaataaaacaggggacacagaattgtagatgacactgtttaccactgtttgaagagagaagtttgaaataggatctactggagatagcctaacggcggcatgaaaagagtgaaacaatgacacccattcctccatcttgatcctccggcaaccccacttagtccatgccttcacatcctattttccatgagcaaagctttcatgatggtgttggtagtgtgtgacatcctttaatgtactagcagttcaacatatttgcactgaggacaagggttgttggcacgacgatcatcgtgggaggaagggagctttgccataggagcgactaccgtggccatgaccatgggaggaaggaccatgacgacccatgtagttggtagagacattgtattgtaaatacaatttggccacgtgttggagttggtaagcctcaagcacaactaggtttgcgaatatgtagtcgaggggagtggctcggtcttagtcgtcgtggaggtgatgaatgggtcatagtcaatcgagagccttgctaggagataggcgagaacctcgtcatcacggagagggcattggtgtcgacaagctccgtaaccttgcgaaagatgtcgatgagtcccatgaccttgcgaaatatgacagacatatcatgtttctttgatgcagcgagatccacag

SEQ ID NO: 76729 - DNA, 1775 bp, Zea Mays
aggtatgccagccgcgacgtcgtgccgggcggagggttttgccgagattttcccaaaaaagggcattgccacccgcaccgagaaaagaaaacgatacacgccgcgatagaaacactcagacacaccctctccatccgcccctcctcttcctcctcccggtcgcggcttcccccgattggcatccggggcgggcccatcccccacccggccgccgcgcgcgtccatggacggcctgcacggtacggacgcctgcttctcccccgcgagggccgtctcgccgcaggtgaggctcccggggccgccggacgtgggcagtcagtacctggcggagctactgcaggagcaccagaagctgggacccttcatgcaggtgctcccaatctgcagcaggctgctgaatcaaggtgttccgcaaggagctatgggttggcaaggacccccacagagccctgcttcttatatcgtcaagaagattttgcggttggaagtaccgacagaaacataccctaatttcaattttatcggtcgtcttcttggaccaaggggaaattctttaaagaggattgaagcctgtacaggctgtcgtgtattcatcagagggaaaggctcaattaaagattctggcaaggaggaacaactcaagggaagacctggctatgaacacttgagtgaacccctccatatcttgattgaagctgagttacctgctaatgtgattgatgcaagacttgcaaaggcacaagagatccttgaagagttgttgaaaccagtggacgagtcacaagactactacaagagacagcaactccgagaacttgccatgttgaattcgccactccgagaggagagtccacgttcaggcggtgctcctccaagtcccttcagtaagactgtctccggtaggccgaataaaacaggggacacagaattgtagatgacactgtttaccactgtttgaagagagaagtttgaaataggatctactggagatagcctaacggcggcatgaaaagagtgaaacaatgacacccattcctccatcttgatcctccggcaaccccacttagtccatgccttcacatcctattttccatgagcaaagctttcatgatggtgttggtagtgtgtgacatcctttaatgtactagcaggtgaattttgatctcccatcccatgtgacattaaccttgagtgacagatgactatgcgtagtgtatcctctatgactgtataattagaacatttgatttatttgttactggtaatgctgagagatagtactgtgcagaattcggagttacagtgtagtgtgccaatatttatctcaaacctgtttgattttcagttcaacatatttgcactgaggacaagggttgttggcacgacgatcatcgtgggaggaagggagctttgccataggagcgactaccgtggccatgaccatgggaggaaggaccatgacgacccatgtagttggtagagacattgtattgtaaatacaatttggccacgtgttggagttggtaagcctcaagcacaactaggtttgcgaatatgtagtcgaggggagtggctcggtcttagtcgtcgtggaggtgatgaatgggtcatagtcaatcgagagccttgctaggagataggcgagaacctcgtcatcacggagagggcattggtgtcgacaagctccgtaaccttgcgaaagatgtcgatgagtcccatgaccttgcgaaatatgacagacatatcatgtttctttgatgcagcgagatccacag

SEQ ID NO: 76730 - DNA, 1588 bp, Zea Mays
aggtatgccagccgcgacgtcgtgccgggcggagggttttgccgagattttcccaaaaaagggcattgccacccgcaccgagaaaagaaaacgatacacgccgcgatagaaacactcagacacaccctctccatccgcccctcctcttcctcctcccggtcgcggcttcccccgattggcatccggggcgggcccatcccccacccggccgccgcgcgcgtccatggacggcctgcacggtacggacgcctgcttctcccccgcgagggccgtctcgccgcaggtgaggctcccggggccgccggacgtgggcagtcagtacctggcggagctactgcaggagcaccagaagctgggacccttcatgcaggtgctcccaatctgcagcaggctgctgaatcaagagagtaggtgttccgcaaggagctatgggttggcaaggacccccacagagccctgcttcttatatcgtcaagaagattttgcggttggaagtaccgacagaaacataccctaatttcaattttatcggtcgtcttcttggaccaaggggaaattctttaaagaggattgaagcctgtacaggctgtcgtgtattcatcagagggaaaggctcaattaaagattctggcaaggaggaacaactcaagggaagacctggctatgaacacttgagtgaacccctccatatcttgattgaagctgagttacctgctaatgtgattgatgcaagacttgcaaaggcacaagagatccttgaagagttgttgaaaccagtggacgagtcacaagactactacaagagacagcaactccgagaacttgccatgttgaattcgccactccgagaggagagtccacgttcaggcggtgctcctccaagtcccttcagtaagactgtctccggtaggccgaataaaacaggggacacagaattgtagatgacactgtttaccactgtttgaagagagaagtttgaaataggatctactggagatagcctaacggcggcatgaaaagagtgaaacaatgacacccattcctccatcttgatcctccggcaaccccacttagtccatgccttcacatcctattttccatgagcaaagctttcatgatggtgttggtagtgtgtgacatcctttaatgtactagcagttcaacatatttgcactgaggacaagggttgttggcacgacgatcatcgtgggaggaagggagctttgccataggagcgactaccgtggccatgaccatgggaggaaggaccatgacgacccatgtagttggtagagacattgtattgtaaatacaatttggccacgtgttggagttggtaagcctcaagcacaactaggtttgcgaatatgtagtcgaggggagtggctcggtcttagtcgtcgtggaggtgatgaatgggtcatagtcaatcgagagccttgctaggagataggcgagaacctcgtcatcacggagagggcattggtgtcgacaagctccgtaaccttgcgaaagatgtcgatgagtcccatgaccttgcgaaatatgacagacatatcatgtttctttgatgcagcgagatccacag

SEQ ID NO: 76731 - DNA, 1930 bp, Zea Mays
aggtatgccagccgcgacgtcgtgccgggcggagggttttgccgagattttcccaaaaaagggcattgccacccgcaccgagaaaagaaaacgatacacgccgcgatagaaacactcagacacaccctctccatccgcccctcctcttcctcctcccggtcgcggcttcccccgattggcatccggggcgggcccatcccccacccggccgccgcgcgcgtccatggacggcctgcacggtacggacgcctgcttctcccccgcgagggccgtctcgccgcaggtgaggctcccggggccgccggacgtgggcagtcagtacctggcggagctactgcaggagcaccagaagctgggacccttcatgcaggtgctcccaatctgcagcaggctgctgaatcaagaaataatgcgggtgttgaatatacggcgccagcatggtgctgctgtggactttgagaagtttgcagccgcaagccccaaccagatacatccgtcaccccccatgccgaacttttgtggaaacggttttagtccatggaatgggatgcattcagaggtgttccgcaaggagctatgggttggcaaggacccccacagagccctgcttcttatatcgtcaagaagattttgcggttggaagtaccgacagaaacataccctaatttcaattttatcggtcgtcttcttggaccaaggggaaattctttaaagaggattgaagcctgtacaggctgtcgtgtattcatcagagggaaaggctcaattaaagattctggcaaggaggaacaactcaagggaagacctggctatgaacacttgagtgaacccctccatatcttgattgaagctgagttacctgctaatgtgattgatgcaagacttgcaaaggcacaagagatccttgaagagttgttgaaaccagtggacgagtcacaagactactacaagagacagcaactccgagaacttgccatgttgaattcgccactccgagaggagagtccacgttcaggcggtgctcctccaagtcccttcagtaagactgtctccggtaggccgaataaaacaggggacacagaattgtagatgacactgtttaccactgtttgaagagagaagtttgaaataggatctactggagatagcctaacggcggcatgaaaagagtgaaacaatgacacccattcctccatcttgatcctccggcaaccccacttagtccatgccttcacatcctattttccatgagcaaagctttcatgatggtgttggtagtgtgtgacatcctttaatgtactagcaggtgaattttgatctcccatcccatgtgacattaaccttgagtgacagatgactatgcgtagtgtatcctctatgactgtataattagaacatttgatttatttgttactggtaatgctgagagatagtactgtgcagaattcggagttacagtgtagtgtgccaatatttatctcaaacctgtttgattttcagttcaacatatttgcactgaggacaagggttgttggcacgacgatcatcgtgggaggaagggagctttgccataggagcgactaccgtggccatgaccatgggaggaaggaccatgacgacccatgtagttggtagagacattgtattgtaaatacaatttggccacgtgttggagttggtaagcctcaagcacaactaggtttgcgaatatgtagtcgaggggagtggctcggtcttagtcgtcgtggaggtgatgaatgggtcatagtcaatcgagagccttgctaggagataggcgagaacctcgtcatcacggagagggcattggtgtcgacaagctccgtaaccttgcgaaagatgtcgatgagtcccatgaccttgcgaaatatgacagacatatcatgtttctttgatgcagcgagatccacag

SEQ ID NO: 76732 - DNA, 756 bp, Zea Mays
acgaactgatataagaaaccctagcggagccactaacacagtcgcctccttcctgcgccgccgccgccgccgccgccgctaccaccgcctcgcggccgcctgcggctccgcgtttccgcacggaagttggtgaaggtttcttgaggctgagaacatggtgctgaagacggaactttgccgcttcagcggccagaagatttatcctgggaaaggcattagatttatccgtgctgattctcaggtcttcctttttgccaactcgaaatgcaagcgctacttccacaaccgcctgaagcctgcaaagcttacctggacagcaatgtacaggaagcagcacaagaaggatatccatgctgaagcggtaaagaagaggcgccgcgccaccaagaagccatactccagatcaaggagcgcatcaagaagaccaaggatgagaagaaagcgaagaaggcggaggtgagcaagtcccagaagacgcagacaaagggtgcggtccagaagggttccaagggccccaagttgggcggcggtggtgggaagcgctgaaagaacttagtgtcgtttctcgacattgcagtcgttccttagccaaagccactttcgtagaacctgtgttgaatttgcaagacttattcaagcgttgcttgtgcgtgctaaataccatggcaagagaacggatttatatttatgcctgaaaaaaaatgaccgttcatattcttaactcatcttggataagggcttgttttgtttctccag

SEQ ID NO: 76733 - DNA, 743 bp, Zea Mays
gtggtccaactataaaacccgcggcgtcatccatccccattgcagcttcagagttcctgactcctcgttcgttctgcgtttcgcgactgagatagccaaccctgcgactgcgtgcgtgcgggcgagcgagcaggcagaatggagcgccacgcccagaagcaggcgccgctagtcctcgcgctgtcctgcctcctcccctggggggccagcagcagcacccgccggctctgaagctcacttcttctcaggaggcggcgatcgcggcggcgatgaacatgggcaggccgacggcgagggtggccgtggaggtgaacgactaccaaccgtccggccccaacaaccgccacgacccacccaagggcccctgaagagcttgttgaacggcgctcggctggacgtggacgacccaataatgcttctccttcgttgttgtcatctttaccagcagtatatatagagtgctttgctagtgctcttgtattctaccccaccagtagagattaaggatttaaggtagacacaaagttacctagttatatttgtacactggccgataggaacttggaagcacatcggtagtttgtgttgttcttaggttgccgttcgtcagaactgcatgcagatcgatttcatctcctgctgcagctgcaggtgtcgatacagcacctgcagcagatcgagattgttcagcttaattattctgttcctccgatcttgtcactgatgacacatatatcatgtcc

SEQ ID NO: 76734 - DNA, 5029 bp, Zea Mays
ggtgcctcctcgctgcctgtgaactgcaagagcatcacataaccactagactagactagttgctaaaagagcatccccgaacagtaaccatcactaagcgtaagatagtcgccgccgcgatagtttatttttattgtctggcagcatatgttctgtgaaagccacagaaagcttatttgctgcacaacaaaggaatattgagattcggatgccggcaatgcgaataagaaaaaaagatttaggtggattgatgagaaatgcatattgatgaaaagcatagctcaccggaaatatgcaggcaacttgaggatgaatacatgccaaggacacctagaaaaagaatcaatgccaaggcgatagtttggaattgagaatctgtgtgttcatggtgtctggacaaagactccattcaacaaatgagtagcttgtgcaattggattgccctattcatgactgattttaattggttggtactctgccttttatcgctctgatgaccaggattggacgagaaactaattgagtattggtgtacccatgacaatggacaaggtttctagacccaaactgtatgatcctgttatggttgtgtgagaccattttgagcagccaatgtcataccaactcctagtaaacactgttcagaattgtacagtcatatgacaaagctactaaactacagaaggccaaacttgggtcatcagaaatcaagcagtctgggtttagctccccaaacgctacttaccaaacatgctgatggtgaggtggttcctaacacatataatggaccatgataagttgacacacaggcagggtgtctggaaattaggcgctagggggacggatgaacctataggccaggtatcaactagggggctgtcctgaatagataactgggtgtataacttgtacatccacacattcttctatttccttccccccagtgatcaaccagatagtatcacttctttagttttgctgataattatgtgtttttacagttctttgcagctctaaagatgagtgccaagttatctacaagtacagatctttcacataggaaataataacttaatctaatgataggatgctaaagtttataagattaagaccatataactgtttgcattttgtttagtattaactcgattgtgctacatggttcctacaggcaggaataacaataatatattcttgtgacaagccatttatatatcagataatttaaatgcataatacatgcaagatagactagtatttactaataatctatcaggttagggaccagttaacactcttatatccttcctttcttctgaccatctacatgagatatcttgccatataaaaaaatagccattgaataaaaattaatacacgtagtatgctggttcctataatgtaacatgcttaactttcttgtttacaaaaaggaaaaaaaacgatgcataaatattttttttcctaagaaaacagtttttgaataacaattagcaagtacactatgctggccatgattccttagttcaagcagccctggcactagcctgccactgaacccatgaggctctacgcttacagagattagtagaggcaactcatgtaaaagaagtccgtagaaactagagcagaaagcttcatgctatatgtaacttacaattctagaactgctatcaaaaccaatctttactgctgaatatgccccccccccccaacacacacacacacacgtacatgatgatgctttagattcttctatcgaagacttctttatatgctgatagctagacagcccaccctccatttcaaatagcatgcactatctgataagtatacgttgctagagaagtagaaatgcagtgcgtggaaaaataaaataaattatcagatgagtacaaaaaatatactccagcaagaatcatcagttaaattgattgtaagaatttattaaagaccacactgataacatatggtgacattcaagaatggtagtaagaatttttgctggtagtaatacagtgaatttatatatttatacttcaaccaaccaaatattgtacggagcgatggagtagaaacacagcgaatcatcagttaaattgagtacatgaaacaaaaagtccccagttctcatgatatttacggaaaagacttcctcttattccttatatatctcaaaaacatatcaatagaaataaaaatttctgacatgtggaaaactcagacatgcttcgctttggtttaaagaagataatggaacatgtctagaaaagctacagacagttctcttacagaacatgaattgatagaatttgtattgatgttactgttttttaaaattaaaaatggggagggactagactggccaacattgactacaagtgtcccagttccttagtccttggttagataaaaaaacatgattgtaatggttatctatggtaccaaaagtctgaaagagtagtgatgtgtaacatatagagaaacataaacacagtacataagtactcttgctttgactagcgatcattacaatcaaagtggtcttgttcaaaaggagcttatccaacgtaaagagcataaatttcatggcagaaactttcctggactggaatgtgaatatgtaccaatcgtaggaaaggacattgatggaacttattcttgttcatattccacgcacattaaagtagtacaatggacagaataaaattgatagaacaactatgtttctgcaagtagaatagcgtccccaaaaagtataatgacaagtgtcaacgtgtagcttaaactaaattaacccaaactgcatctgattccactataaacaataataattaaatcatgtagtcatgtactgaagtgcagcaagactgaaccattcgtaaataccagcaaaactacccttagctggcattatagagaagctactcagatatttttctctgttcattcattaggcataaattcagaagtgcatatttcataaactgaacagatcagatagcagaatcatattccagaaagctacataaaagtataatttgctttatctctactcatgccacacacacttcatgacttcaacagttttaaatcagtagaatacacctagaaaagtaaggtgctataatacatacaagtcacaggttgaaattcaaagtgcaaattttgattttgattattttgattccaaaattactaaagctaccatcttctcttagtagacttaaagattgttcttttgatgtttgttccaagatgctagattctatgttttcccatataaaaaccacctcatgaggcactccttatcaacctgagaaggccaaaagggtatcaaaagacttaaggtcagacaagagggtgtttgagtttgtcaacaggaagcattccaacacaagttcaggctttgggaacagagtaaagaggccactggaaaacacaggccacaaagcagcagatgtatcaccaacatcagggtccgagtgagctcttcaccacgaggacatcctttccaatggagcagcatccgtttttgcgtggaggaaatgcccaaggagattctgggctggttctctcaactgacgctaaaccaaggctgaaatggacacctgagttacatcagcgatttgtagatgcagtcaatcaattaggtggagaagagaaagctactccaaaaacagtcatgaggctcatgggaattccaggactcaccttgtaccatttgaaaagccatctccagaaatacaggctcagcaagaacctccaagctcaagcaaatgccagtacatcgaagaatgccataggatgtacgcccgttgctgataggattcccggaacaaccgcagcaacaatgagcagtacaaatgttcttcctcaggcagagaagactattcaaattggtgaagcactgcagatgcaaatccaggttcaaagacagttaaatgaacaacttgaggtgcaaaggcatctacaactacgaattgaagcccaagggaaatatcttcaggcagttttggagcaggcacaagagacacttggaaaacagaatttgggccctgcaaacctggaagatgcaaaaataaaaatatcagagttagtttcacaagtatcaaatgaatgcttcagtaatgcaattacagatgtaaaagaaagttcaagtgtgcatagattagagcccatacaaattgagtttgttgaaagttcaacaaatagttatttgtctgttgctgaaggattcatcaaggagcacaaactacagcaccatggagtactaaaagcatatgatgatagttcattattttgcagaaaaagatctcatgaacatgagacacagtttgccctcaacagaagcctaagcgaacataggatggctcatttgcagaatgaggaaggataccataaagcagagtttgggtatgaaagtgacacagagatggcgcatgagtatactgcacctcaaaagaatggtagatgtagtaccaccagttcggcatccggaagcaaagtagatgcagagaagctatatctggaagaacaaaagtgtgcaagacaggcagttgaataccccagagaaagcaagctagtagattttgagcatccgtgttcagtgaacaaacttgatctgaacacccacaatgtcgatgacacaaatcaagcttacagacattttgacctgaatggcttcagctggggctgataatatgtaagatgatagaagtgaagaaatgaagttacaaataatttcttccaacattgatttcaccattgaagtatggatacatgatcaaatggatacacaacgtcgatggggagagtaacgtccgcttctccagagtcgtcgacagctggtaatggaggtgggtctccaagaacggcacccaccatgggtctcgacggcgacgacagggctggagaggaaggaagcaaagtctcaccgcgggccatgatagcagcttaatgacgctcaagtacgcctaatgatacgagatgctgttctgggaaagaaccattgtcagttgtcacaggt

SEQ ID NO: 76735 - DNA, 1572 bp, Zea Mays
ccacaaagcagatgtatcaccaacatcagggtccgagtgagctcttcaccacgaggacatcctttccaatggagcagcatccgtttttgcgtggaggaaatgcccaaggagattctgggctggttctctcaactgacgctaaaccaaggctgaaatggacacctgagttacatcagcgatttgtagatgcagtcaatcaattaggtggagaagagaaagctactccaaaaacagtcatgaggctcatgggaattccaggactcaccttgtaccatttgaaaagccatctccagaaatacaggctcagcaagaacctccaagctcaagcaaatgccagtacatcgaagaatgccataggatgtacgcccgttgctgataggattcccggaacaaccgcagcaacaatgagcagtacaaatgttcttcctcaggcagagaagactattcaaattggtgaagcactgcagatgcaaatccaggttcaaagacagttaaatgaacaacttgaggtgcaaaggcatctacaactacgaattgaagcccaagggaaatatcttcaggcagttttggagcaggcacaagagacacttggaaaacagaatttgggccctgcaaacctggaagatgcaaaaataaaaatatcagagttagtttcacaagtatcaaatgaatgcttcagtaatgcaattacagatgtaaaagaaagttcaagtgtgcatagattagagcccatacaaattgagtttgttgaaagttcaacaaatagttatttgtctgttgctgaaggattcatcaaggagcacaaactacagcaccatggagtactaaaagcatatgatgatagttcattattttgcagaaaaagatctcatgaacatgagacacagtttgccctcaacagaagcctaagcgaacataggatggctcatttgcagaatgaggaaggataccataaagcagagtttgggtatgaaagtgacacagagatggcgcatgagtatactgcacctcaaaagaatggtagatgtagtaccaccagttcggcatccggaagcaaagtagatgcagagaagctatatctggaagaacaaaagtgtgcaagacaggcagttgaataccccagagaaagcaagctagtagattttgagcatccgtgttcagtgaacaaacttgatctgaacacccacaatgtcgatgacacaaatcaagcttacagacattttgacctgaatggcttcagctggggctgataatatgtaagatgatagaagtgaagaaatgaagttacaaataatttcttccaacattgatttcaccattgaagtatggatacatgatcaaatgtacgtcaagaggtatcacttatgtttttagtatagagtacagaaatggtattcactctgggccatcagcagtttactcaaaattaaaggaaaataacaatgcatgaatagtatatgtaagaaacgagacaaatagcatcgaggaaattagagtccataatatatagacactatgataagtagataatagcaacaaagtgaacaatggcatattaagagcgtggttttt

SEQ ID NO: 76736 - DNA, 5012 bp, Zea Mays
ggtgcctcctcgctgcctgtgaactgcaagagcatcacataaccactagactagactagttgctaaaagagcatccccgaacagtaaccatcactaagcgtaagatagtcgccgccgcgatagtttatttttattgtctggcagcatatgttctgtgaaagccacagaaagcttatttgctgcacaacaaaggaatattgagattcggatgccggcaatgcgaataagaaaaaaagatttaggtggattgatgagaaatgcatattgatgaaaagcatagctcaccggaaatatgcaggcaacttgaggatgaatacatgccaaggacacctagaaaaagaatcaatgccaaggcgatagtttggaattgagaatctgtgtgttcatggtgtctggacaaagactccattcaacaaatgagtagcttgtgcaattggattgccctattcatgactgattttaattggttggtactctgccttttatcgctctgatgaccaggattggacgagaaactaattgagtattggtgtacccatgacaatggacaaggtttctagacccaaactgtatgatcctgttatggttgtgtgagaccattttgagcagccaatgtcataccaactcctagtaaacactgttcagaattgtacagtcatatgacaaagctactaaactacagaaggccaaacttgggtcatcagaaatcaagcagtctgggtttagctccccaaacgctacttaccaaacatgctgatggtgaggtggttcctaacacatataatggaccatgataagttgacacacaggcagggtgtctggaaattaggcgctagggggacggatgaacctataggccaggtatcaactagggggctgtcctgaatagataactgggtgtataacttgtacatccacacattcttctatttccttccccccagtgatcaaccagatagtatcacttctttagttttgctgataattatgtgtttttacagttctttgcagctctaaagatgagtgccaagttatctacaagtacagatctttcacataggaaataataacttaatctaatgataggatgctaaagtttataagattaagaccatataactgtttgcattttgtttagtattaactcgattgtgctacatggttcctacaggcaggaataacaataatatattcttgtgacaagccatttatatatcagataatttaaatgcataatacatgcaagatagactagtatttactaataatctatcaggttagggaccagttaacactcttatatccttcctttcttctgaccatctacatgagatatcttgccatataaaaaaatagccattgaataaaaattaatacacgtagtatgctggttcctataatgtaacatgcttaactttcttgtttacaaaaaggaaaaaaaacgatgcataaatattttttttcctaagaaaacagtttttgaataacaattagcaagtacactatgctggccatgattccttagttcaagcagccctggcactagcctgccactgaacccatgaggctctacgcttacagagattagtagaggcaactcatgtaaaagaagtccgtagaaactagagcagaaagcttcatgctatatgtaacttacaattctagaactgctatcaaaaccaatctttactgctgaatatgccccccccccccaacacacacacacacacgtacatgatgatgctttagattcttctatcgaagacttctttatatgctgatagctagacagcccaccctccatttcaaatagcatgcactatctgataagtatacgttgctagagaagtagaaatgcagtgcgtggaaaaataaaataaattatcagatgagtacaaaaaatatactccagcaagaatcatcagttaaattgattgtaagaatttattaaagaccacactgataacatatggtgacattcaagaatggtagtaagaatttttgctggtagtaatacagtgaatttatatatttatacttcaaccaaccaaatattgtacggagcgatggagtagaaacacagcgaatcatcagttaaattgagtacatgaaacaaaaagtccccagttctcatgatatttacggaaaagacttcctcttattccttatatatctcaaaaacatatcaatagaaataaaaatttctgacatgtggaaaactcagacatgcttcgctttggtttaaagaagataatggaacatgtctagaaaagctacagacagttctcttacagaacatgaattgatagaatttgtattgatgttactgttttttaaaattaaaaatggggagggactagactggccaacattgactacaagtgtcccagttccttagtccttggttagataaaaaaacatgattgtaatggttatctatggtaccaaaagtctgaaagagtagtgatgtgtaacatatagagaaacataaacacagtacataagtactcttgctttgactagcgatcattacaatcaaagtggtcttgttcaaaaggagcttatccaacgtaaagagcataaatttcatggcagaaactttcctggactggaatgtgaatatgtaccaatcgtaggaaaggacattgatggaacttattcttgttcatattccacgcacattaaagtagtacaatggacagaataaaattgatagaacaactatgtttctgcaagtagaatagcgtccccaaaaagtataatgacaagtgtcaacgtgtagcttaaactaaattaacccaaactgcatctgattccactataaacaataataattaaatcatgtagtcatgtactgaagtgcagcaagactgaaccattcgtaaataccagcaaaactacccttagctggcattatagagaagctactcagatatttttctctgttcattcattaggcataaattcagaagtgcatatttcataaactgaacagatcagatagcagaatcatattccagaaagctacataaaagtataatttgctttatctctactcatgccacacacacttcatgacttcaacagttttaaatcagtagaatacacctagaaaagtaaggtgctataatacatacaagtcacaggttgaaattcaaagtgcaaattttgattttgattattttgattccaaaattactaaagctaccatcttctcttagtagacttaaagattgttcttttgatgtttgttccaagatgctagattctatgttttcccatataaaaaccacctcatgaggcactccttatcaacctgagaaggccaaaagggtatcaaaagacttaaggtcagacaagagggtgtttgagtttgtcaacaggaagcattccaacacaagttcaggctttgggaacagagtaaagaggccactggaaaacacaggccacaaagcagatgtatcaccaacatcagggtccgagtgagctcttcaccacgaggacatcctttccaatggagcagcatccgtttttgcgtggaggaaatgcccaaggagattctgggctggttctctcaactgacgctaaaccaaggctgaaatggacacctgagttacatcagcgatttgtagatgcagtcaatcaattaggtggagaagagaaagctactccaaaaacagtcatgaggctcatgggaattccaggactcaccttgtaccatttgaaaagccatctccagaaatacaggctcagcaagaacctccaagctcaagcaaatgccagtacatcgaagaatggatgtacgcccgttgctgataggattcccggaacaaccgcagcaacaatgagcagtacaaatgttcttcctcaggcagagaagactattcaaattggtgaagcactgcagatgcaaatccaggttcaaagacagttaaatgaacaacttgaggtgcaaaggcatctacaactacgaattgaagcccaagggaaatatcttcaggcagttttggagcaggcacaagagacacttggaaaacagaatttgggccctgcaaacctggaagatgcaaaaataaaaatatcagagttagtttcacaagtatcaaatgaatgcttcagtaatgcaattacagatgtaaaagaaagttcaagtgtgcatagattagagcccatacaaattgagtttgttgaaagttcaacaaatagttatttgtctgttgctgaaggattcatcaaggagcacaaactacagcaccatggagtactaaaagcatatgatgatagttcattattttgcagaaaaagatctcatgaacatgagacacagtttgccctcaacagaagcctaagcgaacataggatggctcatttgcagaatgaggaaggataccataaagcagagtttgggtatgaaagtgacacagagatggcgcatgagtatactgcacctcaaaagaatggtagatgtagtaccaccagttcggcatccggaagcaaagtagatgcagagaagctatatctggaagaacaaaagtgtgcaagacaggcagttgaataccccagagaaagcaagctagtagattttgagcatccgtgttcagtgaacaaacttgatctgaacacccacaatgtcgatgacacaaatcaagcttacagacattttgacctgaatggcttcagctggggctgataatatgtaagatgatagaagtgaagaaatgaagttacaaataatttcttccaacattgatttcaccattgaagtatggatacatgatcaaatgtacgtcaagaggtatcacttatgtttttagtatagagtacagaaatggtattcactctgggccatcagcagtttactcaaaattaaaggaaaataacaatgcatgaatagtatatgtaagaaacgagacaaatagcatcgaggaaattagagtccataatatatagacactatgataagtagataatagcaacaaagtgaacaatggcatattaagagcgtggttttt

SEQ ID NO: 76737 - DNA, 1831 bp, Zea Mays
gcgcctgctctgagttgtatcctatggaagggtttggaggatgacagaagctgcagttaatacaaggtactggtgccatggatgcgagaaggtcatcgaggaggccatggtgggggaggatatcaagtgcccgttttgcggtggtgggttcatcgaagagatggccggggaggattccgaggggttgcagttagagcgggagtggggaacgccgccaggggacagcgaggacgacgatgacgacgatatagcccatgagttcgagggctttatcaggaggcacggacgggcatcggctctgcgccgggtgctcgacagcatccaggacgaccttagagccgacagggaaagggacaactccgtcctcatcaacgccttcaaccaagccctcgcctcgcaaggctcggcgctgctggatgccgacgaggcccgagacggccgaggtggatccagcaacagcaacgacgatggcttgctggaagagtatgatgtcctgggggctgggctgagcctactgcttcagcatctggccgagaacgacccgaaccggtacggcacccctccggcgaagagagaggcggtcgaagctctgcccactgtccagatagcggaggccgtcagctgttcggtctgcctcgacgatcttgagctggggtccccggcgaagcaaatgccctgtgggcataggttccactcttcttgcatcctgccatggcttgagctccacagctcttgccccgtgtgccggttcgagctgccgtctgaagagacgaaagatctgaacgagcctagcgatgtgcacagaagaacagagagcacccgagagaacgacagcgagagcggtaacagcgcgtggccccttgtcccttggttcttcagcgggctgttctcggtacctgaaccgtcgcacactgacagaggcactctcaccaccgatcaacagagtccttccaccaacccaaatgctggaggaaattgatttcgtcatcctttgtgaataatgctcatacatctgagaatagcaaggagccttgtcagtagatggcttattttttttctgtactgataatccttctcggatgaatcgcaaggtacggagtctgtgtctgctctattgtcaggattctagcgatcgtttcgcctctagttaatctcatagctactgagactgtctgtctgcatcctatgcaaaagatcggttgctttctttgttcttggctcttctgactggatgtctttgagctatttctggaatatgtaaactatcatgccttgtatttattcattgtttagttgaaatatatcttcatatcaagtacgaagtacctgctggctggacatgaggaaattaaccctattgaaatccacctcattcaacaagcctggaacaagtgctcatggccactcagggatactaaaaccagaaacatgaagggcgtgtgatatgtgatatagcacaggaaatacacatcttcagaaacatacatggctggaaggctgttgtttttcccctcaagaaccagaaacataaaggacatgtttgggctcgcaaaggaacttcctgctctgctcaggttctagtatccttgagtggccatctgttcgcttcagattaaaaccgactgtttagactgctgcagttataattcatagagacaaaaacactatagaagtagtagaagttggtacggactaaagccaaacgaacaagcttcgctggcctctcctttctctagaaagtaaacggctcagtgtgcagactaaagctaaatgtatccacatgggcacgttttttttatagacgaggcagcaatcttttcgtcgattaagg

SEQ ID NO: 76738 - DNA, 636 bp, Zea Mays
acggtaccatgcaaacgcacagtagcttatcgaaatttatctctttttttctctccacataatcacagcatgcagcaacaatgagtccccaagaggagctcagaaaattcagtcttttctttgcttcttttttgaagagcttacatctcgaattctacaaccatgccgggccaacaaggccgcaaagtaggaaaaggaaaaaaatcaaatcagacaactgccggccgccggagagtcacttactggtctcggagatgaagaggagcagcataacgacggcggcgacgagcgtgacgatgcctccggagagcgtccgcttgtagaaatcttcgttcaccttggggtacgcgtccagccgcttgagcctgtgcaggaacgcgtccatctctcctcgtactactcggccgccggcgcccgacggcagtacccacgctggcgattggcgaaccctagcccgcccctctgatccgagctcccgagagcactagcacgcggaaaccgcggcgatgcggcgcgacgtgaggtggggtggcgtataggctttgaccgccgcgattccgcgagacgccggcgggatcggggtccggtcagggtatggaggcagggaggcggagattgattagacgaggacgcggt

SEQ ID NO: 76739 - DNA, 1974 bp, Zea Mays
agagaaggaaaaagcattccaacgctgcatctgcactgcacggtacctcatcctcctctatctctaagaatttaaaagagaaggaggaggaaagtcctcgactgctcgttccataaaccctaacctcgttggattctcggcaaaaatcctcccaattcggaaccctccgatgttccagctacctgcgggagctgagccgtgctcggtttggcgaaattttgcacccctcttgtgctaggaccacccggttcaagctgttcctcgctcctcggaaggatcaggtcttcaccggtgctctccggcgccggatccaggtttgtttcggcgagaggtcgggctcttggcgggggccagcccagcttcgagctcaatttgccggcctgagatggaatcgcgactgcggtgccggtgccggtggctcagtcgcgtcgagtcgacgcgcgattcctgccatttgggtgggccagcctttcctggcaatctcggggggcgtttcgcctcgctgcgtggcagaaaggtgtgacgtgtgatgcatcccaaggcacgaatccacgccgacccggtgcgcgaggtcgaccacttcgactgcctgccggattcgctcgtcctgctcatcctgaacaaggtcgaggacgtgcggtcgctcggccggtgctacgccgtgtccaagcggctctgtgggctcgtttccctcgtccatgatgtgtatgtcaagattgaccgcgtcgttgcggtcgacggcgacgccgagggcacgctcaacctgtcctcgccgaagcctcggagcatcttctcgcacttcctgaagctgatgctcttcacaatcatcaagccgttccacaacatgcgcagccctaatggtactgcgaggccattgttcccgcagctctcgcagcactcaccggcacaggtgctcaggaacttcacgcacgtcaggaaccttcggatcgagctcccctctggggatgtgggtactgaggagggagttctcctgaaatggcgagcagagtatgggagcacacttgagaattgtgtgatcctggggggtacccgggttgaccgcaagcctgttggtggagagcatgagccagctttggaggacaatggaagcatgccagagtctttctataccaatggtgggctgaaacttcgtgtcgtctggacaatcagctctctaatcgcggcatcaacaaggcactatcttctccgctcaatcatcaatggccatcccacactacagagcttggtactgacagatgctgatggccaaggcacattgtgcatgggggcaaagcagctggaggagttcagagagaaccagttgtcgacctcggcatgttccaacaggactcaggtcccagcctgcaacatgaagctcaagtatgctccatatgttgaactgcctggtggtatggcgttgcaaggcgctactttggtggctatcaaaccctcacctgagggaagcaatggaagccaccctaaccgcaaggaagccgaaggattcgtctttggagcattcgatgggccatttaaagctgctgtgaaggcgctgatgaagagacgcacttaccttctggagatgaatggcttctaggaatcttggtatctagcttgttggtgctatgcatggtacatttagctgagtgtctcatatgtgtaatattcaagaaggcaccatctctagttttgatgcttgctgtctgctgttttagctatttgtacagtgttaacatttggttagataaagatcatatcaagtcctctagcgcaatagtgaatctctctacagttcactattctggcccatgatgtcctgtgtgatatggaagactgaagcatcctactgttaactcttttcaagtgaaacagccttgtgaccatctaatgtgtcagcactgggattgagatattcagatgctctcaccagtggacacaagttattatatatataatgtacatttttctcctctttca

SEQ ID NO: 76740 - DNA, 1639 bp, Zea Mays
cattggcgttgaaaaacagacctctcgacgcctaccattcaccgcgcaggcgccgccatgggcattggagtcgttacgaggtcgaagaggaggagattggacgaggaacagcgcctcgccgacaggatcagcagcctccccgacgacgtcctcggtgaaatcgtgtccctccttcccaccagagccggcgcccgcacgcaggtgctctcctcccgctggcgccacatctggcgctccgctcctctcaacatggacctccatcccgacggccctgaatggcggcacatgcccgtcgagcagatcaggcgcgtgctctcggcgcacccgggccccggacgccgcctctcggtccccagcagattcggctacctccactggatggacggctggcttcggtccgcagccgccctagggcctagacaacctccaggtgctcgaactgaactcacacagccgtcgtcctcatcactggtcggccttgcccacgcggccgcttctgccgccatcggtgcaccgcttctcgtccaccctccgcgtcgcctgcttccgcggcttcgggtttccgaccagtgccaaggcccaaggccctcccctcagccagtccgcctgccgcgtctccagcagctgactctctcgggcgtcaccatctccgagggctccctgcatgccatgctcgctggcgcccctgccctgcggagcctgctcctgctcgacagcaacgggtttgcccgactgcagatagcgtcctgtagcatagaaaacatcggcgtgcgttcccggtgcagaggtgctaagctacaacacctcgttctggaggacacgccgtctctgaagagattgctactgttcgaaggaaccaatcacatggatatctcggtggtctccgcgccaagattggatgtttttgggaaactctgtgacgacgccaccaaacttaagtatagcagcgccacgacggatcttcagggatcacccactgttagcgtgctgcacagtgtgaagcttctagctttgtctagtgtgaggatttcgttgcatgcgctgattgacttgctcaagtgcgttccccacctggagaagctgtacatcgaggcatcaagtgtttgtgtgagaaatggatcgtatcataaataccggaagcacatcggcaccctatgcgtccgtctgaggagggtcgtgctaggagggtacctaggcagcaagccacacgtcaacgtagccaaattcttcgtatcgatcgcgagagcgctggagtcgatgaggctcgagtcatgggtaattataagcaaagcctggttggcgagacagcataggctgcatgctcaacagcaggaagagggcgtcgtctagggctgcacggttcgagttcgtagctcataaagcaaaaatattcaccggttcatcacttgatgatctgcgtgctgagcaggtgcatgatctgtcgacggccgacccccttttcaaatgtggttttaggtctctggtctgatatttggttttgatttgacctttaattgcattgtgttatctctctttcctagagacactgtgattttatcaacccgggaatttggtgctattatatcactatcgaaatccgggcctttgccgagtgtcagcggttttgctgagtgctttt

SEQ ID NO: 76741 - DNA, 3367 bp, Zea Mays
cggaccctgcggcccagcttttttcttcactctctgcaacccattccccccctgcattctctctctgttctcttgtgcgtgcctgcgctctgtagtgacgacgactgggcggcggccgctgccgccgacctacgtgcgcaggtctccatcttccggaccttcgctggagacgagcacccaccaccagaaattttctatacatttaagatgtacagggcctcaaatttcatacctgatcctaatcaggtgcttctagatgccaatccattaaggtctttagctccaatgttccctgcccccatgggagtcaatgttaatcagtcaagtacaccaccattggtttgtgtcactccggttggtcaatttccaattgggtttggtgcagggaaccttcctgcctttggatcgttcactactttcagcgccactacaaacggtgtttcttatacgggcaccagtggtaatggtgccattgatgccactcctatctctgcatacaagacaagatcaagcatatcacttgatgatgatgatgatgagccttactcgggcaaccaaggtttggcatctgaacggaaggctaggagaggccgtcctcctggttctggtcgtgatggatcaaatggtaagttaaagcgccctaagcctacatacaagaattttgttgctggcaaagagcttgtctttctgtcttctacatccgatcccagggagtttgtggaatcagttcacatgacttttgaggccctcaggcgaagacatctgcagatggatgaaacacaggatgctagcagacgtgcagacctgaaggctggtgccatcatgatggccagtaacatcagggcgaattcaggcaagagggaggttatgagaatgaggatgatgacacagatgtgctcgtgtacagtggtcaaggtggaaataataggaatactgaggagaggcatgatcagaagcttgagaggggtaacctagctcttgagaggagtttgcataggaagaatgagataagggttgtacgcggcttcaaggatccattttgcctaactgggaaaatttacatatatgatggtctctacaagattcacgagtcctggaaggagagaacaaagtacggtgtcaattgcttcaagtacaagctgctgcgggaacctggacagcgtgatggagctgcattatggaagatgactcagagatggatagataatcctgctaccagaggcagggtcctactagctgatctgtcatctaaggctgaaattttgcctgtttgtctcgtcaatgaggtagaccatgagaaaggacctgtacatttcacttatactaatcaggtcaaatacttgaggcctctcagttctatgaaaaagttgcagggctgtggatgccagagcgtttgcttgcctggcgacgccagttgtgcttgtggacaacataatggaggcgatttacccttcagttcatcaggattgttgtcatgccgcaaaccaatagtctacgaatgtggtgaatcttgcaactgttctacaaattgcaggaacagagtgacccaaaaagggtccaggctacatttcgaggtcttcaggaccacaaatcgaggctggggtcttcgctgctgggaacctattcgtgctggttcatttatatgtgagtatgccggtgaggttattgatgagctcaaatttaatttgaatgatagtgaagatgattacatttttcaaactgtatgccctggcgagaagacattaaaatggaattatggacctgaactgataggtgaagtaagcacatatgtatcgcctgatgaatttgaaccactgcctgtcaagataagtgcaaaaaacatgggaaatgtctcccgtttcatgaaccacagttgctcacccaatgtcttttggcaaccagttcaatatgatcacggagatgatggacacccgcatataatgttctttgcactgaagcatattccacccatgacagaactgacttatgactatggtgttgctggagctgaatctagtggttcaggttctcgtagaacgaagaactgcgtgtgtggatcacaaaactgcaggggattattttgatgggttgagagacgtgctcttggtggttaatcatgcaaaccactttctgctagatcctttctatgaaaccaaatttagtctccggataatatgacagatgatgtcatttgccatgtgtactgtgaagacagtaagttgtcgagcgagctgtagaatttctgttgctctgaactgcatggtggtcgctttcccaccatttcctcggatgtttatgtgggcgtggattgctgcattgcttccgctaaacttgtccaccaattgcaccggcttttgtagacttgttatcagccccgcttgcgttggacgcctggttgttaggatatggtcttgtaaattatcctggttaaggatcatgttgctttcgactcgaattttcgtcctcccttgcccttatgttcagcaatgttcaggtgtatgctgagtgctcaggtagggaccaaaggatgcagttgatgcaatttggaaccaggttttcttgtgggcgccggccaagggaatttgctgcgagaggtacagatctgtttgcggctggatggtttgtgtgtagcgttgttcattattgatccgacggggacacacaaggctgcgctatggcccttgccaccgcgatcggtgaggggcatggtcgcccatgccgactgagcgtgcaagtgggcctatgcccatgtctcggcccgtcagctgggccccgccagcactgctcacgcgagaatggagaaaacgaaacgctcgctgttgaagaaaattggagggctgggcctctagaatcaacaggaagacacatgctctccatcgacgaacagcaagacgaggccagggaatcggagatcctcacgccgctgcatgcttgtagtaggatactctgctgctttggatgcactaaaagtgtaagttccgtaggagtagacgcactaggctttgctgtctgcttgcatgcttgtaggaggatactctgctgcttcttaaaatttcttgtgctcgattgatgcaccggggcagttggaagtcaaggcgctggtggccgtggcgctgcacagacgtcaatcgcgtccgcggcacctgaccagcgcgcggccaggatcgcgggagtccgctgggatcgggcacccacacccgaatcctgtgtcgtggctgatcgtcgcgccccacgctggggctaccagcaccgccgatggggctgccaagtctgcgtcctcgacgggaccgcggggcccacacacgccggtgctgaggcatcgcgccggaggctgagcccgcaccggggcccaacctgataagaggcc

SEQ ID NO: 76742 - DNA, 3514 bp, Zea Mays
cttgaccggaccctgcggcccagcttttttcttcactctctgcaacccattccccccctgcattctctctctgttctcttgtgcgtgcctgcgctctgtagtgacgacgactgggcggcggccgctgccgccgacctacgtgcgcaggtctccatcttccggaccttcgctggagacgagcacccaccaccagaaattttctatacatttaagatgtacagggcctcaaatttcatacctgatcctaatcaggtgcttctagatgccaatccattaagggaaccttcctgcctttggatcgttcactactttcagcgccactacaaacggtgtttcttatacgggcaccagtggtaatggtgccattgatgccactcctatctctgcatacaagacaagatcaagcatatcacttgatgatgatgatgatgagccttactcgggcaaccaaggtttggcatctgaacggaaggctaggagaggccgtcctcctggttctggtcgtgatggatcaaatggtaagttaaagcgccctaagcctacatacaagaattttgttgctggcaaagagcttgtctttctgtcttctacatccgatcccagggagtttgtggaatcagttcacatgacttttgaggccctcaggcgaagacatctgcagatggatgaaacacaggatgctagcagacgtgcagacctgaaggctggtgccatcatgatggccagtaacatcagggcgaattcaggcaagagggaggttatgagaatgaggatgatgacacagatgtgctcgtgtacagtggtcaaggtggaaataataggaatactgaggagaggcatgatcagaagcttgagaggggtaacctagctcttgagaggagtttgcataggaagaatgagataagggttgtacgcggcttcaaggatccattttgcctaactgggaaaatttacatatatgatggtctctacaagattcacgagtcctggaaggagagaacaaagtacggtgtcaattgcttcaagtacaagctgctgcgggaacctggacagcgtgatggagctgcattatggaagatgactcagagatggatagataatcctgctaccagaggcagggtcctactagctgatctgtcatctaaggctgaaattttgcctgtttgtctcgtcaatgaggtagaccatgagaaaggacctgtacatttcacttatactaatcaggtcaaatacttgaggcctctcagttctatgaaaaagttgcagggctgtggatgccagagcgtttgcttgcctggcgacgccagttgtgcttgtggacaacataatggaggcgatttacccttcagttcatcaggattgttgtcatgccgcaaaccaatagtctacgaatgtggtgaatcttgcaactgttctacaaattgcaggaacagagtgacccaaaaagggtccaggctacatttcgaggtcttcaggaccacaaatcgaggctggggtcttcgctgctgggaacctattcgtgctggttcatttatatgtgagtatgccggtgaggttattgatgagctcaaatttaatttgaatgatagtgaagatgattacatttttcaaactgtatgccctggcgagaagacattaaaatggaattatggacctgaactgataggtgaagtaagcacatatgtatcgcctgatgaatttgaaccactgcctgtcaagataagtgcaaaaaacatgggaaatgtctcccgtttcatgaaccacagttgctcacccaatgtcttttggcaaccagttcaatatgatcacggagatgatggacacccgcatataatgttctttgcactgaagcatattccacccatgacagaactgacttatgactatggtgttgctggagctgaatctagtggttcaggttctcgtagaacgaagaactgcgtgtgtggatcacaaaactgcaggggattattttgatgggttgagagacgtgctcttggtggttaatcatgcaaaccactttctgctagatcctttctatgaaaccaaatttagtctccggataatatgacagatgatgtcatttgccatgtgtactgtgaagacagtaagttgtcgagcgagctgtagaatttctgttgctctgaactgcatggtggtcgctttcccaccatttcctcggatgtttatgtgggcgtggattgctgcattgcttccgctaaacttgtccaccaattgcaccggcttttgtagacttgttatcagccccgcttgcgttggacgcctggttgttaggatatggtcttgtaaattatcctggttaaggatcatgttgctttcgactcgaattttcgtcctcccttgcccttatgttcagcaatgttcaggtgtatgctgagtgctcaggtagggaccaaaggatgcagttgatgcaatttggaaccaggttttcttgtgggcgccggccaagggaatttgctgcgagaggtacagatctgtttgcggctggatggtttgtgtgtagcgttgttcattattgatccgacggggacacacaaggctgcgctatggcccttgccaccgcgatcggtgaggggcatggtcgcccatgccgactgagcgtgcaagtgggcctatgcccatgtctcggcccgtcagctgggccccgccaggtctgttcacgccatggttgattctgttacaaaatattgtcatatattgtcatgtgatcaaccctcttccccgacgatctcttccctgacaattttcttccaaaggacacacaattttctcccaaaggacacaccctttaggagacactgtatctacatgtatataaaccagaatctctgcaataaagatctacaactgtcatttacactattctctcgaatcttgttttcactgagttacggcacgttatcagcactgctcacgcgagaatggagaaaacgaaacgctcgctgttgaagaaaattggagggctgggcctctagaatcaacaggaagacacatgctctccatcgacgaacagcaagacgaggccagggaatcggagatcctcacgccgctgcatgcttgtagtaggatactctgctgctttggatgcactaaaagtgtaagttccgtaggagtagacgcactaggctttgctgtctgcttgcatgcttgtaggaggatactctgctgcttcttaaaatttcttgtgctcgattgatgcaccggggcagttggaagtcaaggcgctggtggccgtggcgctgcacagacgtcaatcgcgtccgcggcacctgaccagcgcgcggccaggatcgcgggagtccgctgggatcgggcacccacacccgaatcctgtgtcgtggctgatcgtcgcgccccacgctggggctaccagcaccgccgatggggctgccaagtctgcgtcctcgacgggaccgcggggcccacacacgccggtgctgaggcatcgcgccggaggctgagcccgcaccggggcccaacctgataagaggcc

SEQ ID NO: 76743 - DNA, 2789 bp, Zea Mays
cggaccctgcggcccagcttttttcttcactctctgcaacccattccccccctgcattctctctctgttctcttgtgcgtgcctgcgctctgtagtgacgacgactgggcggcggccgctgccgccgacctacgtgcgcaggtctccatcttccggaccttcgctggagacgagcacccaccaccagggaaccttcctgcctttggatcgttcactactttcagcgccactacaaacggtgtttcttatacgggcaccagtggtaatggtgccattgatgccactcctatctctgcatacaagacaagatcaagcatatcacttgatgatgatgatgatgagccttactcgggcaaccaaggtttggcatctgaacggaaggctaggagaggccgtcctcctggttctggtcgtgatggatcaaatggtaagttaaagcgccctaagcctacatacaagaattttgttgctggcaaagagcttgtctttctgtcttctacatccgatcccagggagtttgtggaatcagttcacatgacttttgaggccctcaggcgaagacatctgcagatggatgaaacacaggatgctagcagacgtgcagacctgaaggctggtgccatcatgatggccagtaacatcagggcgaattcaggcaagagggtaggaactgtacctggagttgaaataggagatattttctattttaggatggagctgtgtgtcattgggttgcatgcacctagtatgggaggcattgattacatgactactaaatttggaaaagatgaggattctgtagccatatgtattgtctctgcaggaggttatgagaatgaggatgatgacacagatgtgctcgtgtacagtggtcaaggtggaaataataggaatactgaggagaggcatgatcagaagcttgagaggggtaacctagctcttgagaggagtttgcataggaagaatgagataagggttgtacgcggcttcaaggatccattttgcctaactgggaaaatttacatatatgatggtctctacaagattcacgagtcctggaaggagagaacaaagtacggtgtcaattgcttcaagtacaagctgctgcgggaacctggacagcgtgatggagctgcattatggaagatgactcagagatggatagataatcctgctaccagaggcagggtcctactagctgatctgtcatctaaggctgaaattttgcctgtttgtctcgtcaatgaggtagaccatgagaaaggacctgtacatttcacttatactaatcaggtcaaatacttgaggcctctcagttctatgaaaaagttgcagggctgtggatgccagagcgtttgcttgcctggcgacgccagttgtgcttgtggacaacataatggaggcgatttacccttcagttcatcaggattgttgtcatgccgcaaaccaatagtctacgaatgtggtgaatcttgcaactgttctacaaattgcaggaacagagtgacccaaaaagggtccaggctacatttcgaggtcttcaggaccacaaatcgaggctggggtcttcgctgctgggaacctattcgtgctggttcatttatatgtgagtatgccggtgaggttattgatgagctcaaatttaatttgaatgatagtgaagatgattacatttttcaaactgtatgccctggcgagaagacattaaaatggaattatggacctgaactgataggtgaagtaagcacatatgtatcgcctgatgaatttgaaccactgcctgtcaagataagtgcaaaaaacatgggaaatgtctcccgtttcatgaaccacagttgctcacccaatgtcttttggcaaccagttcaatatgatcacggagatgatggacacccgcatataatgttctttgcactgaagcatattccacccatgacagaactgacttatgactatggtgttgctggagctgaatctagtggttcaggttctcgtagaacgaagaactgcgtgtgtggatcacaaaactgcaggggattattttgatgggttgagagacgtgctcttggtggttaatcatgcaaaccactttctgctagatcctttctatgaaaccaaatttagtctccggataatatgacagatgatgtcatttgccatgtgtactgtgaagacagtaagttgtcgagcgagctgtagaatttctgttgctctgaactgcatggtggtcgctttcccaccatttcctcggatgtttatgtgggcgtggattgctgcattgcttccgctaaacttgtccaccaattgcaccggcttttgtagacttgttatcagccccgcttgcgttggacgcctggttgttaggatatggtcttgtaaattatcctggttaaggatcatgttgctttcgactcgaattttcgtcctcccttgcccttatgttcagcaatgttcaggtgtatgctgagtgctcaggtagggaccaaaggatgcagttgatgcaatttggaaccaggttttcttgtgggcgccggccaagggaatttgctgcgagaggtacaggtgagatgcaatgtggctggcacaccataaggccatctctctctagcagccgtgtgtgtacatgtgaacattgttttgcagtgtagactttacggggtggataggtcgggtagagatgttactccttagaaccgcggtcccagcacttgggcgcgagcgtaactacgtacacgagtcccggacccgccgactagcctggtcggctcgtctcctggtcctctacaccc

SEQ ID NO: 76744 - DNA, 2815 bp, Zea Mays
cggaccctgcggcccagcttttttcttcactctctgcaacccattccccccctgcattctctctctgttctcttgtgcgtgcctgcgctctgtagtgacgacgactgggcggcggccgctgccgccgacctacgtgcgcaggtctccatcttccggaccttcgctggagacgagcacccaccaccaggtgcttctagatgccaatccattaagggaaccttcctgcctttggatcgttcactactttcagcgccactacaaacggtgtttcttatacgggcaccagtggtaatggtgccattgatgccactcctatctctgcatacaagacaagatcaagcatatcacttgatgatgatgatgatgagccttactcgggcaaccaaggtttggcatctgaacggaaggctaggagaggccgtcctcctggttctggtcgtgatggatcaaatggtaagttaaagcgccctaagcctacatacaagaattttgttgctggcaaagagcttgtctttctgtcttctacatccgatcccagggagtttgtggaatcagttcacatgacttttgaggccctcaggcgaagacatctgcagatggatgaaacacaggatgctagcagacgtgcagacctgaaggctggtgccatcatgatggccagtaacatcagggcgaattcaggcaagagggtaggaactgtacctggagttgaaataggagatattttctattttaggatggagctgtgtgtcattgggttgcatgcacctagtatgggaggcattgattacatgactactaaatttggaaaagatgaggattctgtagccatatgtattgtctctgcaggaggttatgagaatgaggatgatgacacagatgtgctcgtgtacagtggtcaaggtggaaataataggaatactgaggagaggcatgatcagaagcttgagaggggtaacctagctcttgagaggagtttgcataggaagaatgagataagggttgtacgcggcttcaaggatccattttgcctaactgggaaaatttacatatatgatggtctctacaagattcacgagtcctggaaggagagaacaaagtacggtgtcaattgcttcaagtacaagctgctgcgggaacctggacagcgtgatggagctgcattatggaagatgactcagagatggatagataatcctgctaccagaggcagggtcctactagctgatctgtcatctaaggctgaaattttgcctgtttgtctcgtcaatgaggtagaccatgagaaaggacctgtacatttcacttatactaatcaggtcaaatacttgaggcctctcagttctatgaaaaagttgcagggctgtggatgccagagcgtttgcttgcctggcgacgccagttgtgcttgtggacaacataatggaggcgatttacccttcagttcatcaggattgttgtcatgccgcaaaccaatagtctacgaatgtggtgaatcttgcaactgttctacaaattgcaggaacagagtgacccaaaaagggtccaggctacatttcgaggtcttcaggaccacaaatcgaggctggggtcttcgctgctgggaacctattcgtgctggttcatttatatgtgagtatgccggtgaggttattgatgagctcaaatttaatttgaatgatagtgaagatgattacatttttcaaactgtatgccctggcgagaagacattaaaatggaattatggacctgaactgataggtgaagtaagcacatatgtatcgcctgatgaatttgaaccactgcctgtcaagataagtgcaaaaaacatgggaaatgtctcccgtttcatgaaccacagttgctcacccaatgtcttttggcaaccagttcaatatgatcacggagatgatggacacccgcatataatgttctttgcactgaagcatattccacccatgacagaactgacttatgactatggtgttgctggagctgaatctagtggttcaggttctcgtagaacgaagaactgcgtgtgtggatcacaaaactgcaggggattattttgatgggttgagagacgtgctcttggtggttaatcatgcaaaccactttctgctagatcctttctatgaaaccaaatttagtctccggataatatgacagatgatgtcatttgccatgtgtactgtgaagacagtaagttgtcgagcgagctgtagaatttctgttgctctgaactgcatggtggtcgctttcccaccatttcctcggatgtttatgtgggcgtggattgctgcattgcttccgctaaacttgtccaccaattgcaccggcttttgtagacttgttatcagccccgcttgcgttggacgcctggttgttaggatatggtcttgtaaattatcctggttaaggatcatgttgctttcgactcgaattttcgtcctcccttgcccttatgttcagcaatgttcaggtgtatgctgagtgctcaggtagggaccaaaggatgcagttgatgcaatttggaaccaggttttcttgtgggcgccggccaagggaatttgctgcgagaggtacaggtgagatgcaatgtggctggcacaccataaggccatctctctctagcagccgtgtgtgtacatgtgaacattgttttgcagtgtagactttacggggtggataggtcgggtagagatgttactccttagaaccgcggtcccagcacttgggcgcgagcgtaactacgtacacgagtcccggacccgccgactagcctggtcggctcgtctcctggtcctctacaccc

SEQ ID NO: 76745 - DNA, 2720 bp, Zea Mays
cttgaccggaccctgcggcccagcttttttcttcactctctgcaacccattccccccctgcattctctctctgttctcttgtgcgtgcctgcgctctgtagtgacgacgactgggcggcggccgctgccgccgacctacgtgcgcaggtctccatcttccggaccttcgctggagacgagcacccaccaccagaaattttctatacatttaagatgtacagggcctcaaatttcatacctgatcctaatcaggtgcttctagatgccaatccattaagggaaccttcctgcctttggatcgttcactactttcagcgccactacaaacggtgtttcttatacgggcaccagtggtaatggtgccattgatgccactcctatctctgcatacaagacaagatcaagcatatcacttgatgatgatgatgatgagccttactcgggcaaccaaggtttggcatctgaacggaaggctaggagaggccgtcctcctggttctggtcgtgatggatcaaatggtaagttaaagcgccctaagcctacatacaagaattttgttgctggcaaagagcttgtctttctgtcttctacatccgatcccagggagtttgtggaatcagttcacatgacttttgaggccctcaggcgaagacatctgcagatggatgaaacacaggatgctagcagacgtgcagacctgaaggctggtgccatcatgatggccagtaacatcagggcgaattcaggcaagagggaggttatgagaatgaggatgatgacacagatgtgctcgtgtacagtggtcaaggtggaaataataggaatactgaggagaggcatgatcagaagcttgagaggggtaacctagctcttgagaggagtttgcataggaagaatgagataagggttgtacgcggcttcaaggatccattttgcctaactgggaaaatttacatatatgatggtctctacaagattcacgagtcctggaaggagagaacaaagtacggtgtcaattgcttcaagtacaagctgctgcgggaacctggacagcgtgatggagctgcattatggaagatgactcagagatggatagataatcctgctaccagaggcagggtcctactagctgatctgtcatctaaggctgaaattttgcctgtttgtctcgtcaatgaggtagaccatgagaaaggacctgtacatttcacttatactaatcaggtcaaatacttgaggcctctcagttctatgaaaaagttgcagggctgtggatgccagagcgtttgcttgcctggcgacgccagttgtgcttgtggacaacataatggaggcgatttacccttcagttcatcaggattgttgtcatgccgcaaaccaatagtctacgaatgtggtgaatcttgcaactgttctacaaattgcaggaacagagtgacccaaaaagggtccaggctacatttcgaggtcttcaggaccacaaatcgaggctggggtcttcgctgctgggaacctattcgtgctggttcatttatatgtgagtatgccggtgaggttattgatgagctcaaatttaatttgaatgatagtgaagatgattacatttttcaaactgtatgccctggcgagaagacattaaaatggaattatggacctgaactgataggtgaagtaagcacatatgtatcgcctgatgaatttgaaccactgcctgtcaagataagtgcaaaaaacatgggaaatgtctcccgtttcatgaaccacagttgctcacccaatgtcttttggcaaccagttcaatatgatcacggagatgatggacacccgcatataatgttctttgcactgaagcatattccacccatgacagaactgacttatgactatggtgttgctggagctgaatctagtggttcaggttctcgtagaacgaagaactgcgtgtgtggatcacaaaactgcaggggattattttgatgggttgagagacgtgctcttggtggttaatcatgcaaaccactttctgctagatcctttctatgaaaccaaatttagtctccggataatatgacagatgatgtcatttgccatgtgtactgtgaagacagtaagttgtcgagcgagctgtagaatttctgttgctctgaactgcatggtggtcgctttcccaccatttcctcggatgtttatgtgggcgtggattgctgcattgcttccgctaaacttgtccaccaattgcaccggcttttgtagacttgttatcagccccgcttgcgttggacgcctggttgttaggatatggtcttgtaaattatcctggttaaggatcatgttgctttcgactcgaattttcgtcctcccttgcccttatgttcagcaatgttcaggtgtatgctgagtgctcaggtagggaccaaaggatgcagttgatgcaatttggaaccaggttttcttgtgggcgccggccaagggaatttgctgcgagaggtacaggtgagatgcaatgtggctggcacaccataaggccatctctctctagcagccgtgtgtgtacatgtgaacattgttttgcagtgtagactttacggggtggataggtcgggtagagatgttactccttagaaccgcggtcccagcacttgggcgcgagcgtaactacgtacacgagtcccggacccgccgactagcctggtcggctcgtctcctggtcctctacaccc

SEQ ID NO: 76746 - DNA, 2694 bp, Zea Mays
cttgaccggaccctgcggcccagcttttttcttcactctctgcaacccattccccccctgcattctctctctgttctcttgtgcgtgcctgcgctctgtagtgacgacgactgggcggcggccgctgccgccgacctacgtgcgcaggtctccatcttccggaccttcgctggagacgagcacccaccaccagaaattttctatacatttaagatgtacagggcctcaaatttcatacctgatcctaatcagggaaccttcctgcctttggatcgttcactactttcagcgccactacaaacggtgtttcttatacgggcaccagtggtaatggtgccattgatgccactcctatctctgcatacaagacaagatcaagcatatcacttgatgatgatgatgatgagccttactcgggcaaccaaggtttggcatctgaacggaaggctaggagaggccgtcctcctggttctggtcgtgatggatcaaatggtaagttaaagcgccctaagcctacatacaagaattttgttgctggcaaagagcttgtctttctgtcttctacatccgatcccagggagtttgtggaatcagttcacatgacttttgaggccctcaggcgaagacatctgcagatggatgaaacacaggatgctagcagacgtgcagacctgaaggctggtgccatcatgatggccagtaacatcagggcgaattcaggcaagagggaggttatgagaatgaggatgatgacacagatgtgctcgtgtacagtggtcaaggtggaaataataggaatactgaggagaggcatgatcagaagcttgagaggggtaacctagctcttgagaggagtttgcataggaagaatgagataagggttgtacgcggcttcaaggatccattttgcctaactgggaaaatttacatatatgatggtctctacaagattcacgagtcctggaaggagagaacaaagtacggtgtcaattgcttcaagtacaagctgctgcgggaacctggacagcgtgatggagctgcattatggaagatgactcagagatggatagataatcctgctaccagaggcagggtcctactagctgatctgtcatctaaggctgaaattttgcctgtttgtctcgtcaatgaggtagaccatgagaaaggacctgtacatttcacttatactaatcaggtcaaatacttgaggcctctcagttctatgaaaaagttgcagggctgtggatgccagagcgtttgcttgcctggcgacgccagttgtgcttgtggacaacataatggaggcgatttacccttcagttcatcaggattgttgtcatgccgcaaaccaatagtctacgaatgtggtgaatcttgcaactgttctacaaattgcaggaacagagtgacccaaaaagggtccaggctacatttcgaggtcttcaggaccacaaatcgaggctggggtcttcgctgctgggaacctattcgtgctggttcatttatatgtgagtatgccggtgaggttattgatgagctcaaatttaatttgaatgatagtgaagatgattacatttttcaaactgtatgccctggcgagaagacattaaaatggaattatggacctgaactgataggtgaagtaagcacatatgtatcgcctgatgaatttgaaccactgcctgtcaagataagtgcaaaaaacatgggaaatgtctcccgtttcatgaaccacagttgctcacccaatgtcttttggcaaccagttcaatatgatcacggagatgatggacacccgcatataatgttctttgcactgaagcatattccacccatgacagaactgacttatgactatggtgttgctggagctgaatctagtggttcaggttctcgtagaacgaagaactgcgtgtgtggatcacaaaactgcaggggattattttgatgggttgagagacgtgctcttggtggttaatcatgcaaaccactttctgctagatcctttctatgaaaccaaatttagtctccggataatatgacagatgatgtcatttgccatgtgtactgtgaagacagtaagttgtcgagcgagctgtagaatttctgttgctctgaactgcatggtggtcgctttcccaccatttcctcggatgtttatgtgggcgtggattgctgcattgcttccgctaaacttgtccaccaattgcaccggcttttgtagacttgttatcagccccgcttgcgttggacgcctggttgttaggatatggtcttgtaaattatcctggttaaggatcatgttgctttcgactcgaattttcgtcctcccttgcccttatgttcagcaatgttcaggtgtatgctgagtgctcaggtagggaccaaaggatgcagttgatgcaatttggaaccaggttttcttgtgggcgccggccaagggaatttgctgcgagaggtacaggtgagatgcaatgtggctggcacaccataaggccatctctctctagcagccgtgtgtgtacatgtgaacattgttttgcagtgtagactttacggggtggataggtcgggtagagatgttactccttagaaccgcggtcccagcacttgggcgcgagcgtaactacgtacacgagtcccggacccgccgactagcctggtcggctcgtctcctggtcctctacaccc

SEQ ID NO: 76747 - DNA, 1354 bp, Zea Mays
caaccgaacagggcctaagtgcgctgcacccatgttataggtcattgtctcgttgttttctgatgaccaaggacaaggaaaaggtagccagtggcctgccagatcggaatttgctgtttacccttttgacctggcgaaatcgaatcagaataaaagaaagctctgcacttcgttcatcgagagcatccatagcaagaggaagcggctgaggttggctcgggtgagcaacatggcggagaagctgacgccggagcaggtggacgagtgcaaggaaatcttcgacctgttcgacgccgacgaggacggtcgcatcgccacgggtgagctcgtgacggcgctgcgctccctgggccagaacgtggacgaggcggaggcgcggcgcttcctggaggacgcgggcgtcgccgcgggcgccggcgacatcgacctcgcggcgttcctggccgtggcggcgcgcaagatgggcgccaggcagtcggaggcgcgcctcgccgagtgcttcgacgtgttcgacgacgcctgcagcgggtccatccccgcggagcagctgcggcaggtgatggtgagccacggcgaccggctcacggaggaggaggccgacgcgatgctccgcgaggccgacccgcgcggcgagggccgcgtcgagtacaaacactacgtcaaagtactgctcagggacaagaagtgatccggtgatccttcgcccgccggtggccacggccggccacgagtgggggaggaggatgtcaactcgatctgctctttgatcatgtgcgcgtcctagtcctagcaccgccgcttaattattatcacggcatcagatccagtagctagtggctaccgaattcttgaagttgacatcaccagttctgtattctggtttcgcttgtgttgagcgtgtaagatgtctgcgatcgcagctttcgagaccaactccgttcgccgtagactcatcgtcacccaaagcaccggcgccggcgtcttgttccgatgcgaaggcggcagcaggagagactgtcacttttctgctgggctggacgggcagcacgccacacgccacctcgcgtacaaggagagatagaagaaatgaccacattttttatgattttttgttgatagtcacgcgaaggtaggtagatgtcgaagtaatttttggcaacgatgtggtccaaaaaatcgaacggacggtgtcgccaatgtcttatcctactttgacctcaaaccaaatatcgtctcaccaccgcctcctatccagtgccccatccagcagtggcgcgaccacctcttgtgacgagagcgccgagggaaggagcacgttgccgcgctcgtctctatggtgaccacaacggttgcc

SEQ ID NO: 76748 - DNA, 2392 bp, Zea Mays
ctgaccgcacgcgtgccgacgcgtgtgagctggccggacccaagcttttcgtttgattcagcagaaccgttcgtgttgacatccgcccccttcccctcttcgactcacggcccacccactgcacgcgcaagcgagaggacggctccgcctccgtcccatggatggccgccggcgccacctcatggtgttcacggtcgcggtcactgctaggtggtggtccggcgtgctagatctcacgcctccagggcaggctccctcgcatgggtcgccgtttcctcatggtgttcacggtcgcgctcatcgctcgcagcgcggaggcgtcgatctgcatctatgatcaggagcccttctgcgaggtggacaatgcctcctcctctctggccaatacttctctgccagtcgcctgctcccaaggggaggggcgctggaatacgggcccgcagatggcgtcggctgtgcaggcggccatgatcgacgaagcctcctcagatctgtgctcatcgccaccagggtgataacctttgtatctcgatcctgctcagcatctcggtggtcgtgcggtgccagctggttcggtcggggcagcaggcgctcctggcacccgcctatccccgagggcgcgaccaaagggagtccacgacgaggaagcgacagggccgaaatcagatatgaatgccattggagggttagtactaaattcttgttgatatttatagttttctctatttacataggtacaataagccggcgaagtttcgtggtggaatcagcagggtgcccaccggccggcgaggccccggctgcccgaccggccagccagtcggagtcgggccgggtggtctccgtcgcagggtcgatgatgaggtatatgatgctttagccgtcaccttctttctatcttggaggatattgaaaatttgattcaaagtcggcgtcgtcctcgtcgctggcgccggcggacgtgtcgtcggcgtcgggtccggtgccctcgctgtcggagaggcgcgcgagccagcagctgccgtggaggtggccgctgacgcagacgaagtactcgagccggccctcgtaggcgccgagcctgcgggacgcgctgcgcggggcgagacccgcggcggccatgctccagacgcgcgcgccgcagtaggggcatcgcgcgcgggggtccagcgcggcgcggtggcccaccagccacgcccgcgtccgggaccgcatgaagccgcggaacacgccgcggtagacgccgacgtcgtcggcgcccgccacggcgtgctcgcaggggtccgacacgtacagcaggtcccccgcgcagcggcgcggcaggaagctccgcccggacgtcttggagaagcgggagaccggggcgaagtggcccgtcacgcccgcgcccgcggcgccgcagcagaagagcagcagcttcgccagcgccggccacccgccgccgacgcgcccggccgccggcgccgagcccgcggggcctcccgtcagcgccgccaccatccgcggcgcccgcgagacgcagagctcccgccacagcacccgctccgccacggcgcgcaggcgccggctcacccgcgccaccgcgcacagcgactgcgggtcccagttgagcgccaggaacacgagctgcagcaccttctcgtccatgagccccacgttgacgccccggatgcgcgccgcattgccgccgccgccgcctcctcctccccaggtgccgaccgcgcaagagctagctcccgcattgccgccgccgttcgacggcccgctcagccgccttatggtcaaggcgctctcgctcatccctccgcgcccatcaacctcacctcacgcaccggcaccgcgagcgaagcgctgagcgcaggaggccgcgaccgacaactggcgagctgctcacttgcctaaactggtgctcgcagctcgctcattcggtgtccaatatcggcgtgccgcaattttcacaggccgtagccggttatatacgcccgtccgctgccggcggtcaggtgcagtgcgctgtgcgcggacacggacacggacacggacccgattcgcgtcgtgtttgtgtctttatggacgcgcgacaaggggaccaatccctcccaggcatcgaacgcactccacccctctaaatatctcgactattacgcgctaatccctccctgtgcgagcgccgcgctgagcactgacggtgggcgttggccgactgccccccgtgctgttgttccctggacgagacgaaacgcaagcggaaaaaacaaagggtgtttgtttggttgcggtggtgcaccattgatccaaacagcctaaaagcttctggaacagtctcgcggcgtcgcgatcccgaaccagcctagccgtactactgtgtcctgttcctgctgccctggtcggc

SEQ ID NO: 76749 - DNA, 2507 bp, Zea Mays
caataatctaaagtcttaaaacgtgacccggtttcgacgcctccccgcacttcgcgggctcctgaccgcacgcgtgccgacgcgtgtgagctggccggacccaagcttttcgtttgattcagcagaaccgttcgtgttgacatccgcccccttcccctcttcgactcacggcccacccactgcacgcgcaagcgagaggacggctccgcctccgtcccatggatggccgccggcgccacctcatggtgttcacggtcgcggtcactgctaggtggtggtccggcgtgctagatctcacgcctccagggcaggctccctcgcatgggtcgccgtttcctcatggtgttcacggtcgcgctcatcgctcgcagcgcggaggcgtcgatctgcatctatgatcaggagcccttctgcgaggtggacaatgcctcctcctctctggccaatacttctctgccagtcgcctgctcccaaggggaggggcgctggaatacgggcccgcagatggcgtcggctgtgcaggcggccatgatcgacgaagcctcctcagatctgtgctcatcgccaccagggtgataacctttgtatctcgatcctgctcagcatctcggtggtcgtgcggtgccagctggttcggtcggggcagcaggcgctcctggcacccgcctatccccgagggcgcgaccaaagggagtccacgacgaggaagcgacagggccgaaatcagatatgaatgccattggaggggtgcccaccggccggcgaggccccggctgcccgaccggccagccagtcggagtcgggccgggtggtctccgtcgcagggctatcaactttagatcttgaacatgggacccaaatcactggcctggagcacaatacgaagaaaactagcttatgattgcagatctcacccatgggttcaatgagtcaaaaaatcgaaattttcacggaagatgagatcgcagtcgatgatgaggtatatgatgctttagccgtcaccttctttctatcttggaggatattgaaaatttgattcaaagtcggcgtcgtcctcgtcgctggcgccggcggacgtgtcgtcggcgtcgggtccggtgccctcgctgtcggagaggcgcgcgagccagcagctgccgtggaggtggccgctgacgcagacgaagtactcgagccggccctcgtaggcgccgagcctgcgggacgcgctgcgcggggcgagacccgcggcggccatgctccagacgcgcgcgccgcagtaggggcatcgcgcgcgggggtccagcgcggcgcggtggcccaccagccacgcccgcgtccgggaccgcatgaagccgcggaacacgccgcggtagacgccgacgtcgtcggcgcccgccacggcgtgctcgcaggggtccgacacgtacagcaggtcccccgcgcagcggcgcggcaggaagctccgcccggacgtcttggagaagcgggagaccggggcgaagtggcccgtcacgcccgcgcccgcggcgccgcagcagaagagcagcagcttcgccagcgccggccacccgccgccgacgcgcccggccgccggcgccgagcccgcggggcctcccgtcagcgccgccaccatccgcggcgcccgcgagacgcagagctcccgccacagcacccgctccgccacggcgcgcaggcgccggctcacccgcgccaccgcgcacagcgactgcgggtcccagttgagcgccaggaacacgagctgcagcaccttctcgtccatgagccccacgttgacgccccggatgcgcgccgcattgccgccgccgccgcctcctcctccccaggtgccgaccgcgcaagagctagctcccgcattgccgccgccgttcgacggcccgctcagccgccttatggtcaaggcgctctcgctcatccctccgcgcccatcaacctcacctcacgcaccggcaccgcgagcgaagcgctgagcgcaggaggccgcgaccgacaactggcgagctgctcacttgcctaaactggtgctcgcagctcgctcattcggtgtccaatatcggcgtgccgcaattttcacaggccgtagccggttatatacgcccgtccgctgccggcggtcaggtgcagtgcgctgtgcgcggacacggacacggacacggacccgattcgcgtcgtgtttgtgtctttatggacgcgcgacaaggggaccaatccctcccaggcatcgaacgcactccacccctctaaatatctcgactattacgcgctaatccctccctgtgcgagcgccgcgctgagcactgacggtgggcgttggccgactgccccccgtgctgttgttccctggacgagacgaaacgcaagcggaaaaaacaaagggtgtttgtttggttgcggtggtgcaccattgatccaaacagcctaaaagcttctggaacagtctcgcggcgtcgcgatcccgaaccagcctagccgtactactgtgtcctgttcctgctgccctggtcggc

SEQ ID NO: 76750 - DNA, 1262 bp, Zea Mays
cgtgttgacatccgcccccttcccctcttcgactcacggcccacccactgcacgcgcaagcgagaggacggctccgcctccgtcccatggatggccgccggcgccacctcatggtgttcacggtcgcggtcactgctaggtggtggtccggcgtgctagatctcacgcctccagggcaggctccctcgcatgggtcgccgtttcctcatggtgttcacggtcgcgctcatcgctcgcagcgcggaggcgtcgatctgcatctatgatcaggagcccttctgcgaggtggacaatgcctcctcctctctggccaatacttctctgccagtcgcctgctcccaaggggaggggcgctggaatacgggcccgcagatggcgtcggctgtgcaggcggccatgatcgacgaagcctcctcagatctgtgctcatcgccaccagggtgataacctttgtatctcgatcctgctcagcatctcggtggtcgtgcggtgccagctggttcggtcggggcagcaggcgctcctggcacccgcctatccccgagggcgcgaccaaagggagtccacgacgaggaagcgacagggccgaaatcagatatgaatgccattggagggttagtactaaattcttgttgatatttatagttttctctatttacataggtacaataagccggcgaagtttcgtggtggaatcagcagggtgcccaccggccggcgaggccccggctgcccgaccggccagccagtcggagtcgggccgggtggtctccgtcgcagggctatcaactttagatcttgaacatgggacccaaatcactggcctggagcacaatacgaagaaaactagcttatgattgcagatctcacccatgggttcaatgagtcaaaaaatcgaaattttcacggaagatgagatcgcaagtattactagcaattatagcactcttattgatcttctcagctttgaacattattaatgtttatactattgaatgattggcatactgataaaattcgatgttaaacttgaaggtcgatgatgaggtatatgatgctttagccgtcaccttctttctatcttggaggatattgaaaatttgattcaaaggcgcctgaatgggcgccgcctgatctagtaataaggaaaggccgtggcccatgtgaaataccgaggcaccgagcagaccacggtggctagtgctcaagcacgaagtgggttgcagtgaaatgcaatgcagcaatagccaacagggcaagtg

SEQ ID NO: 76751 - DNA, 1008 bp, Zea Mays
cgtgttgacatccgcccccttcccctcttcgactcacggcccacccactgcacgcgcaagcgagaggacggctccgcctccgtcccatggatggccgccggcgccacctcatggtgttcacggtcgcggtcactgctaggtggtggtccggcgtgctagatctcacgcctccagggcaggctccctcgcatgggtcgccgtttcctcatggtgttcacggtcgcgctcatcgctcgcagcgcggaggcgtcgatctgcatctatgatcaggagcccttctgcgaggtggacaatgcctcctcctctctggccaatacttctctgccagtcgcctgctcccaaggggaggggcgctggaatacgggcccgcagatggcgtcggctgtgcaggcggccatgatcgacgaagcctcctcagatctgtgctcatcgccaccagggtgataacctttgtatctcgatcctgctcagcatctcggtggtcgtgcggtgccagctggttcggtcggggcagcaggcgctcctggcacccgcctatccccgagggcgcgaccaaagggagtccacgacgaggaagcgacagggccgaaatcagatatgaatgccattggagggttagtactaaattcttgttgatatttatagttttctctatttacataggtacaataagccggcgaagtttcgtggtggaatcagcagggtgcccaccggccggcgaggccccggctgcccgaccggccagccagtcggagtcgggccgggtggtctccgtcgcagggtcgatgatgaggtatatgatgctttagccgtcaccttctttctatcttggaggatattgaaaatttgattcaaaggcgcctgaatgggcgccgcctgatctagtaataaggaaaggccgtggcccatgtgaaataccgaggcaccgagcagaccacggtggctagtgctcaagcacgaagtgggttgcagtgaaatgcaatgcagcaatagccaacagggcaagtg

SEQ ID NO: 76752 - DNA, 1399 bp, Zea Mays
cgtgttgacatccgcccccttcccctcttcgactcacggcccacccactgcacgcgcaagcgagaggacggctccgcctccgtcccatggatggccgccggcgccacctcatggtgttcacggtcgcggtcactgctaggtggtggtccggcgtgctagatctcacgcctccagggcaggctccctcgcatgggtcgccgtttcctcatggtgttcacggtcgcgctcatcgctcgcagcgcggaggcgtcgatctgcatctatgatcaggagcccttctgcgaggtggacaatgcctcctcctctctggccaatacttctctgccagtcgcctgctcccaaggggaggggcgctggaatacgggcccgcagatggcgtcggctgtgcaggcggccatgatcgacgaagcctcctcagatctgtgctcatcgccaccagggtgataacctttgtatctcgatcctgctcagcatctcggtggtcgtgcggtgccagctggttcggtcggggcagcaggcgctcctggcacccgcctatccccgagggcgcgaccaaagggagtccacgacgaggaagcgacagggccgaaatcagatatgaatgccattggaggggtgcccaccggccggcgaggccccggctgcccgaccggccagccagtcggagtcgggccgggtggtctccgtcgcagggctatcaactttagatcttgaacatgggacccaaatcactggcctggagcacaatacgaagaaaactagcttatgattgcagatctcacccatgggttcaatgagtcaaaaaatcgaaattttcacggaagatgagatcgcagtcgatgatgaggtatatgatgctttagccgtcaccttctttctatcttggaggatattgaaaatttgattcaaagtaagcctttcctgttggtgctgtttcgggacattgatcgttgcatggtcatgttcttctattgtagacttgcagttatcaaagctgggttggttttgaatgtcctgcactaggacatgttaatttttgaacatcgccaatcatgtttgtggtctggttgctttcactcttaattttaattttaaaaaacatagttggcttgtactgtccaaccttttttttggtcaagcgtactaaactactaatttgcttccaagagaatctgtagcggttgttcagttatctagcttgggaatagataaatatattcaagaaagtctatatagccaccagatgtctataaactacagagatgagactgtttaggatatagttttgaagaaaacatcgtatcattcatttttttcacaatgataataataaaaagattaccgtttgttttcatgtacatgcatgttttttcacatcgttgtactgtatattgttact

SEQ ID NO: 76753 - DNA, 2155 bp, Zea Mays
cgtgttgacatccgcccccttcccctcttcgactcacggcccacccactgcacgcgcaagcgagaggacggctccgcctccgtcccatggatggccgccggcgccacctcatggtgttcacggtcgcggtcactgctaggtggtggtccggcgtgctagatctcacgcctccagggcaggctccctcgcatgggtcgccgtttcctcatggtgttcacggtcgcgctcatcgctcgcagcgcggaggcgtcgatctgcatctatgatcaggagcccttctgcgaggtggacaatgcctcctcctctctggccaatacttctctgccagtcgcctgctcccaaggggaggggcgctggaatacgggcccgcagatggcgtcggctgtgcaggcggccatgatcgacgaagcctcctcagatctgtgctcatcgccaccagggtgataacctttgtatctcgatcctgctcagcatctcggtggtcgtgcggtgccagctggttcggtcggggcagcaggcgctcctggcacccgcctatccccgagggcgcgaccaaagggagtccacgacgaggaagcgacagggccgaaatcagatatgaatgccattggaggggtgcccaccggccggcgaggccccggctgcccgaccggccagccagtcggagtcgggccgggtggtctccgtcgcagggtacgtttccctatctgaatctctctgtctgtcttcttctccgagacgcaggaaaccatttcgtcgagataattttagagctttttttgttttgttttgccccaaccgtcaatctttgtgcagagtggtgtgatacgtaatgctcgagtagagttgttgagacgtacctgggatgttgggggtaatttcttgagatttagaactaggaggaaactgaaagtcgccaacttgcctatgaagtttgagttcccaggttgcctatgaattacatatttgcatccattaggtggctccattttattttgtaggaataccagagattttccttcggagcatccaatcggctcagctgagcaaaacctgcgattcgaattcctactgaaaactaactagataacccttttggattgctggtgttcttaaacaaaacgaagatgaaagatagtagtacattgcagctggggtgacaagtgttggataaacccatgaattggcctcgttgaattccttaaattctcaacaaaatgttataggattctacagaagcacataggtgataggtcgaatttcgttcatgtctccttaaacaaaagggcaaatatttttcattacgttgtgcgctatgctaactgaaatgttcaggtcttgtaggaaactaatagcaaatacagtaccctctgcacatgacagatggaagttagatgaatcaacatttacctcgtcttgaaagtaacgacaccgatttttttctatcaggctatcaactttagatcttgaacatgggacccaaatcactggcctggagcacaatacgaagaaaactagcttatgattgcagatctcacccatgggttcaatgagtcaaaaaatcgaaattttcacggaagatgagatcgcagtcgatgatgaggtatatgatgctttagccgtcaccttctttctatcttggaggatattgaaaatttgattcaaagtaagcctttcctgttggtgctgtttcgggacattgatcgttgcatggtcatgttcttctattgtagacttgcagttatcaaagctgggttggttttgaatgtcctgcactaggacatgttaatttttgaacatcgccaatcatgtttgtggtctggttgctttcactcttaattttaattttaaaaaacatagttggcttgtactgtccaaccttttttttggtcaagcgtactaaactactaatttgcttccaagagaatctgtagcggttgttcagttatctagcttgggaatagataaatatattcaagaaagtctatatagccaccagatgtctataaactacagagatgagactgtttaggatatagttttgaagaaaacatcgtatcattcatttttttcacaatgataataataaaaagattaccgtttgttttcatgtacatgcatgttttttcacatcgttgtactgtatattgttact

SEQ ID NO: 76754 - DNA, 2156 bp, Zea Mays
cgtgttgacatccgcccccttcccctcttcgactcacggcccacccactgcacgcgcaagcgagaggacggctccgcctccgtcccatggatggccgccggcgccacctcatggtgttcacggtcgcggtcactgctaggtggtggtccggcgtgctagatctcacgcctccagggcaggctccctcgcatgggtcgccgtttcctcatggtgttcacggtcgcgctcatcgctcgcagcgcggaggcgtcgatctgcatctatgatcaggagcccttctgcgaggtggacaatgcctcctcctctctggccaatacttctctgccagtcgcctgctcccaaggggaggggcgctggaatacgggcccgcagatggcgtcggctgtgcaggcggccatgatcgacgaagcctcctcagatctgtgctcatcgccaccagggtgataacctttgtatctcgatcctgctcagcatctcggtggtcgtgcggtgccagctggttcggtcggggcagcaggcgctcctggcacccgcctatccccgagggcgcgaccaaagggagtccacgacgaggaagcgacagggccgaaatcagatatgaatgccattggaggggtgcccaccggccggcgaggccccggctgcccgaccggccagccagtcggagtcgggccgggtggtctccgtcgcagggtacgtttccctatctgaatctctctgtctgtcttcttctccgagacgcaggaaaccatttcgtcgagataattttagagctttttttgttttgttttgccccaaccgtcaatctttgtgcagagtggtgtgatacgtaatgctcgagtagagttgttgagacgtacctgggatgttgggggtaatttcttgagatttagaactaggaggaaactgaaagtcgccaacttgcctatgaagtttgagttcccaggttgcctatgaattacatatttgcatccattaggtggctccattttattttgtaggaataccagagattttccttcggagcatccaatcggctcagctgagcaaaacctgcgattcgaattcctactgaaaactaactagataacccttttggattgctggtgttcttaaacaaaacgaagatgaaagatagtagtacattgcagctggggtgacaagtgttggataaacccatgaattggcctcgttgaattccttaaattctcaacaaaatgttataggattctacagaagcacataggtgataggtcgaatttcgttcatgtctccttaaacaaaagggcaaatatttttcattacgttgtgcgctatgctaactgaaatgttcaggtcttgtaggaaactaatagcaaatacagtaccctctgcacatgacagatggaagttagatgaatcaacatttacctcgtcttgaaagtaacgacaccgatttttttctatcaggctatcaactttagatcttgaacatgggacccaaatcactggcctggagcacaatacgaagaaaactagcttatgattgcagatctcacccatgggttcaatgagtcaaaaaatcgaaattttcacggaagatgagatcgcaagtcgatgatgaggtatatgatgctttagccgtcaccttctttctatcttggaggatattgaaaatttgattcaaagtaagcctttcctgttggtgctgtttcgggacattgatcgttgcatggtcatgttcttctattgtagacttgcagttatcaaagctgggttggttttgaatgtcctgcactaggacatgttaatttttgaacatcgccaatcatgtttgtggtctggttgctttcactcttaattttaattttaaaaaacatagttggcttgtactgtccaaccttttttttggtcaagcgtactaaactactaatttgcttccaagagaatctgtagcggttgttcagttatctagcttgggaatagataaatatattcaagaaagtctatatagccaccagatgtctataaactacagagatgagactgtttaggatatagttttgaagaaaacatcgtatcattcatttttttcacaatgataataataaaaagattaccgtttgttttcatgtacatgcatgttttttcacatcgttgtactgtatattgttact

SEQ ID NO: 76755 - DNA, 1818 bp, Zea Mays
gtccatgctcccccaccggcccacctaaaccaagaaagatttttgggacactccagcggtccagcccgacctctttccaaaccggcaaatcctcagatccgccccctcctccgcctccgcctccgcctcctgtaccctcacgccgtgcttccacagccctcccacctccgaatccagatccgccgccaccaactcctgcttctcacctcctaggctgcttcgcgcgacaacctccgcgaggagcagcaggagcggcggcggcggcatggggcgggacggcggtggcggtgtcgccggcggaatgtctgaatcggtgctgcggaaggtgctcctctcctacttgtacgtcgcggtgtggatcttcctctccttctccgtcatcgtctacaacaagtacatcctcgaccccaagatgtacaactggcccttccccatctcgctcaccatggtgcacatgggtttctgctcatccctcgccgtcgcgctcgtccgcgtgctccgcgtcgtcgacctccccacctctccctccatgacgccacagctctacacctcctccgtcgtccccatcggcgcgctatacgcgatgtcgctctggttctccaactccgcatacatctacctgtctgtgtcatttatccagatgctcaaggcgcttatgcccgtcgccgtctactccatcggcgtcctattcaataaggagaccttcaggtcctcctccatgctgaacatgctctccatctccttcggcgtggccatcgccgcctacggcgaggcgcgcttcgacgtgcgcggggtcgcgctgcagctcgctgccgtcgccttcgaggccacgcggctcgtgctcatccagatcctgctcacatctaagggcatctccctcaaccctatcacctcgctctactacgtcgcgccgtgctgcctctgcttcctcgtcgtgccctgggtcttcgtcgagctgcccaggctacgcgccgtcggcaccttccaaccggatttcttcgtctttgggaccaactcactctgcgcctttgcgctcaaccttgctgtgttcctgctagtgggcaagacctcggcgttgaccatgaacgtcgcgggagtagtcaaggattggctgttgattgcattctcgtggtctgtgatccgggacaccgtcaccccgattaacctgttcggatatgggatcgcgtttttaggggtggcctactacaatcatgtcaagctgcaggcgctcaaggctaaggaggcccagaagaaagccgcacaggctgatgaggaggttgggtcgctcttgcaggagcgcgatggacatggtgatcataagagcgacaatcaggcttagactgtcagatctgatcctggccttcccatattggggatctgatgcaaggtgcaaagaccggagtttggtctacggttgctttcaaggaggtggatgacggtttcttgcacttctttaactttgtgtctggagagaaaatcagagacttcagcgcccagaagaatgcttgatctgttgttgcggcactacgcaagtcaacgagatttttgtcgctctcttgatgcacatgggggaagatcttgagcaactagtgggccatccaaagcgtcgtggcttcgaacagaaggcaacaaccaacattctaccagtcctcttcgcgaccgagctgggtgttttggttacggtttcagtaaaatatactgcgttaggatacttttcaaatatgcaaggaatgacctctaagacagggtgaattagacggtctaatttctctctaatttatgatctttaattttcttccggtcaagatctatgcaaag

SEQ ID NO: 76756 - DNA, 1398 bp, Zea Mays
cagaaatgtgattatctataaggtcagttgaggaatattgtgattggccacaccgccacaagtacactcattcagttaggcttaaatgtagccgctagttagacctgcaacagaacagagtgagttcatcatcacctgcattctggatgagataattggccctatttcgatgttgcttaactcgttttcagttgtaacaagtcacagtatctgcgttgctgctggtcctgttcttttactgacatgccccttgcaggttccagagactccactgcacagacctactgagctctctcctcttctcaaccattcaccagtaaacgaatccaccgaccaccactcccaggagcagggtattccgactttgattacatggagccaaggaggagatgaggtgttcctggaaggatcgtgggataactggacatcgaggagggcacttgagagatctggaaaagatcacgccgtcttgttggttctgccatccggagtctaccattaccggatcatcgtggacggggagctgaggactacgtgccagaaagcctcgacagcgtagccgagttcgaagcgcccccgtctcccgtgcacagctacgacctgcattgcccgggcgacgaggagttcgccaaggagccgcccacgctcccgccccagcttctcgtgtccgtcctcgggggggacgtcgatagcgctggccatggcaatcaagctttgaagccacagcacgtcgtcctcgaccacctgttcatcgagaaagggtgggggtcgcagtcgctgctcgccctcggcgtcacccaccggtttgagtccaagtacgtgagctttgtgctctacaagccgttggagaggtgatggtggtactgtctactagctgtgtgtgagtggaagaacagagtggactgctggaggtgaataatgtgtgtgtgtgcccttgtatagaagggaaatgcatgcaggagcttgtagctgtagctgatcttttattttatttttttattttcctttcactttcgacgaaagtaataaattagttgaccatgcatgcatgcttcgtgcaaatctgaatgtttgtgtggtctgaatgcgtgcagatatccggactttgttctgatgtggagacaccatgggaaaaaagaaaaaaaaaggaaaataacgacaccagcaaatcagtggataaagcggatttgtcgatttgatggaggcggtagttaactaggacaggtaaagaaaatgatggatgcccgctgatgtcgatgttcaccaaagggacgatagataacgtcgtgcgatcacgagctgcctggatttgtcaaaaagcttgacagcgactaggggaggaaatggtctttttctctcgattttttggagtccgaattcgtttttatgaatgatttc

SEQ ID NO: 76757 - DNA, 1260 bp, Zea Mays
gtttgatgtacatggtggaatgaattgtttggatgggtccccatcgaagaaaataatgttaagagccatggtttcagaaatgtgattatctataaggtcagttgaggaatattgtgattggccacaccgccacaagtacactcattcagttaggcttaaatgtagccgctagttagacctgcaacagaacagagtgagttcatcatcacctgcattctggatgagataattggccctatttcgatgttgcttaactcgttttcagttgtaacaagtcacagtatctgcgttgctgctggtcctgttcttttactgacatgccccttgcaggttccagagactccactgcacagacctactgagctctctcctcttctcaaccattcaccagtaaacgaatccaccgaccaccactcccaggagcagggtattccgactttgattacatggagccaaggaggagatgaggtgttcctggaaggatcgtgggataactggacatcgaggagggcacttgagagatctggaaaagatcacgccgtcttgttggttctgccatccggagtctaccattaccggatcatcgtggacggggagctgaggtacatccctgaactacctcacgcagctgacgaaagagggcgagtggccaacgtcctcgatgtccatgactacgtgccagaaagcctcgacagcgtagccgagttcgaagcgcccccgtctcccgtgcacagctacgacctgcattgcccgggcgacgaggagttcgccaaggagccgcccacgctcccgccccagcttctcgtgtccgtcctcgggggggacgtcgatagcgctggccatggcaatcaagctttgaagccacagcacgtcgtcctcgaccacctgttcatcgagaaagggtgggggtcgcagtcgctgctcgccctcggcgtcacccaccggtttgagtccaaatatccggactttgttctgatgtggagacaccatgggaaaaaagaaaaaaaaaggaaaataacgacaccagcaaatcagtggataaagcggatttgtcgatttgatggaggcggtagttaactaggacaggtaaagaaaatgatggatgcccgctgatgtcgatgttcaccaaagggacgatagataacgtcgtgcgatcacgagctgcctggatttgtcaaaaagcttgacagcgactaggggaggaaatggtctttttctctcgattttttggagtccgaattcgtttttatgaatgatttc

SEQ ID NO: 76758 - DNA, 1357 bp, Zea Mays
tttccctattttttttgtcttcccttggtgatcacacacttttttcgcgacaaaatctttacaacttatcttgtttcgacggcatgtggtctcatccttgaaaacatactctgtggcttgtgctaaaagttcgccagcgtttgatgtacatggtggaatgaattgtttggatgggtccccatcgaagaaaataatgttaagagccatggtttcagaaatgtgattatctataaggtcagttgaggaatattgtgattggccacaccgccacaagtacactcattcagttaggcttaaatgtagccgctagttagacctgcaacagaacagagttccagagactccactgcacagacctactgagctctctcctcttctcaaccattcaccagtaaacgaatccaccgaccaccactcccaggagcagggtattccgactttgattacatggagccaaggaggagatgaggtgttcctggaaggatcgtgggataactggacatcgaggagggcacttgagagatctggaaaagatcacgccgtcttgttggttctgccatccggagtctaccattaccggatcatcgtggacggggagctgaggtacatccctgaactacctcacgcagctgacgaaagagggcgagtggccaacgtcctcgatgtccatgactacgtgccagaaagcctcgacagcgtagccgagttcgaagcgcccccgtctcccgtgcacagctacgacctgcattgcccgggcgacgaggagttcgccaaggagccgcccacgctcccgccccagcttctcgtgtccgtcctcgggggggacgtcgatagcgctggccatggcaatcaagctttgaagccacagcacgtcgtcctcgaccacctgttcatcgagaaagggtgggggtcgcagtcgctgctcgccctcggcgtcacccaccggtttgagtccaagtacgtgagctttgtgctctacaagccgttggagaggtgatggtggtactgtctactagctgtgtgtgagtggaagaacagagtggactgctggagatatccggactttgttctgatgtggagacaccatgggaaaaaagaaaaaaaaaggaaaataacgacaccagcaaatcagtggataaagcggatttgtcgatttgatggaggcggtagttaactaggacaggtaaagaaaatgatggatgcccgctgatgtcgatgttcaccaaagggacgatagataacgtcgtgcgatcacgagctgcctggatttgtcaaaaagcttgacagcgactaggggaggaaatggtctttttctctcgattttttggagtccgaattcgtttttatgaatgatttc

SEQ ID NO: 76759 - DNA, 1560 bp, Zea Mays
cgtctaaacccacgacgcatgcatgcacggacgcacctcaacggtcgagacgccccgacgcctcctatccgacggcggagaaaacacgcgtgagggggcgtgcgactcgccacgttatatttcgtccgccttgctccgcctccggcgcaccattttcgtcagctcctggcgcccggtggctcgccggcgcaaattaagtaattaacccgaactccctggcattctccgcgggcctgtagtcttgtagcctatcgcttgcttcgccgtagcacttgcttaattagggcggtgttcgagaggtgggtgtggtggtgtactagtagtactactcgcctcgcctcgcctcgagggtttgactggcggaggcaggagcggggagtagctgcggcggtccgggagcgcatggggaacgcgagcgccaaggagggggagaacggccacatggcggcgtctccggagccggcggctcccaacggcggcggaggaagcagcagctcggcgggtggcgccgccgcgcgaccgccaccgttgtcgccgccggacgacgtgatgctggagcgtccaccgcccgtgccctatctcttcgtgccgcaggttccagagactccactgcacagacctactgagctctctcctcttctcaaccattcaccagtaaacgaatccaccgaccaccactcccaggagcagggtattccgactttgattacatggagccaaggaggagatgaggtgttcctggaaggatcgtgggataactggacatcgaggagggcacttgagagatctggaaaagatcacgccgtcttgttggttctgccatccggagtctaccattaccggatcatcgtggacggggagctgaggtacatccctgaactacctcacgcagctgacgaaagagggcgagtggccaacgtcctcgatgtccatgactacgtgccagaaagcctcgacagcgtagccgagttcgaagcgcccccgtctcccgtgcacagctacgacctgcattgcccgggcgacgaggagttcgccaaggagccgcccacgctcccgccccagcttctcgtgtccgtcctcgggggggacgtcgatagcgctggccatggcaatcaagctttgaagccacagcacgtcgtcctcgaccacctgttcatcgagaaagggtgggggtcgcagtcgctgctcgccctcggcgtcacccaccggtttgagtccaagtacgtgagctttgtgctctacaagccgttggagagatatccggactttgttctgatgtggagacaccatgggaaaaaagaaaaaaaaaggaaaataacgacaccagcaaatcagtggataaagcggatttgtcgatttgatggaggcggtagttaactaggacaggtaaagaaaatgatggatgcccgctgatgtcgatgttcaccaaagggacgatagataacgtcgtgcgatcacgagctgcctggatttgtcaaaaagcttgacagcgactaggggaggaaatggtctttttctctcgattttttggagtccgaattcgtttttatgaatgatttc

SEQ ID NO: 76760 - DNA, 1127 bp, Zea Mays
cgtctaaacccacgacgcatgcatgcacggacgcacctcaacggtcgagacgccccgacgcctcctatccgacggcggagaaaacacgcgtgagggggcgtgcgactcgccacgttatatttcgtccgccttgctccgcctccggcgcaccattttcgtcagctcctggcgcccggtggctcgccggcgcaaattaagttccagagactccactgcacagacctactgagctctctcctcttctcaaccattcaccagtaaacgaatccaccgaccaccactcccaggagcagggtattccgactttgattacatggagccaaggaggagatgaggtgttcctggaaggatcgtgggataactggacatcgaggagggcacttgagagatctggaaaagatcacgccgtcttgttggttctgccatccggagtctaccattaccggatcatcgtggacggggagctgaggtacatccctgaactacctcacgcagctgacgaaagagggcgagtggccaacgtcctcgatgtccatgactacgtgccagaaagcctcgacagcgtagccgagttcgaagcgcccccgtctcccgtgcacagctacgacctgcattgcccgggcgacgaggagttcgccaaggagccgcccacgctcccgccccagcttctcgtgtccgtcctcgggggggacgtcgatagcgctggccatggcaatcaagctttgaagccacagcacgtcgtcctcgaccacctgttcatcgagaaagggtgggggtcgcagtcgctgctcgccctcggcgtcacccaccggtttgagtccaaatatccggactttgttctgatgtggagacaccatgggaaaaaagaaaaaaaaaggaaaataacgacaccagcaaatcagtggataaagcggatttgtcgatttgatggaggcggtagttaactaggacaggtaaagaaaatgatggatgcccgctgatgtcgatgttcaccaaagggacgatagataacgtcgtgcgatcacgagctgcctggatttgtcaaaaagcttgacagcgactaggggaggaaatggtctttttctctcgattttttggagtccgaattcgtttttatgaatgatttc

SEQ ID NO: 76761 - DNA, 1163 bp, Zea Mays
cgtctaaacccacgacgcatgcatgcacggacgcacctcaacggtcgagacgccccgacgcctcctatccgacggcggagaaaacacgcgtgagggggcgtgcgactcgccacgttatatttcgtccgccttgctccgcctccggcgcaccattttcgtcagctcctggcgcccggtggctcgccggcgcaaattaagttccagagactccactgcacagacctactgagctctctcctcttctcaaccattcaccagtaaacgaatccaccgaccaccactcccaggagcagggtattccgactttgattacatggagccaaggaggagatgaggtgttcctggaaggatcgtgggataactggacatcgaggagggcacttgagagatctggaaaagatcacgccgtcttgttggttctgccatccggagtctaccattaccggatcatcgtggacggggagctgaggtacatccctgaactacctcacgcagctgacgaaagagggcgagtggccaacgtcctcgatgtccatgactacgtgccagaaagcctcgacagcgtagccgagttcgaagcgcccccgtctcccgtgcacagctacgacctgcattgcccgggcgacgaggagttcgccaaggagccgcccacgctcccgccccagcttctcgtgtccgtcctcgggggggacgtcgatagcgctggccatggcaatcaagctttgaagccacagcacgtcgtcctcgaccacctgttcatcgagaaagggtgggggtcgcagtcgctgctcgccctcggcgtcacccaccggtttgagtccaagtacgtgagctttgtgctctacaagccgttggagagatatccggactttgttctgatgtggagacaccatgggaaaaaagaaaaaaaaaggaaaataacgacaccagcaaatcagtggataaagcggatttgtcgatttgatggaggcggtagttaactaggacaggtaaagaaaatgatggatgcccgctgatgtcgatgttcaccaaagggacgatagataacgtcgtgcgatcacgagctgcctggatttgtcaaaaagcttgacagcgactaggggaggaaatggtctttttctctcgattttttggagtccgaattcgtttttatgaatgatttc

SEQ ID NO: 76762 - DNA, 1277 bp, Zea Mays
caggaatatgccgacctaatccgagaccatactactaggggtcaccgtggtaatcgtctaaacccacgacgcatgcatgcacggacgcacctcaacggtcgagacgccccgacgcctcctatccgacggcggagaaaacacgcgtgagggggcgtgcgactcgccacgttatatttcgtccgccttgctccgcctccggcgcaccattttcgtcagctcctggcgcccggtggctcgccggcgcaaattaagttccagagactccactgcacagacctactgagctctctcctcttctcaaccattcaccagtaaacgaatccaccgaccaccactcccaggagcagggtattccgactttgattacatggagccaaggaggagatgaggtgttcctggaaggatcgtgggataactggacatcgaggagggcacttgagagatctggaaaagatcacgccgtcttgttggttctgccatccggagtctaccattaccggatcatcgtggacggggagctgaggtacatccctgaactacctcacgcagctgacgaaagagggcgagtggccaacgtcctcgatgtccatgactacgtgccagaaagcctcgacagcgtagccgagttcgaagcgcccccgtctcccgtgcacagctacgacctgcattgcccgggcgacgaggagttcgccaaggagccgcccacgctcccgccccagcttctcgtgtccgtcctcgggggggacgtcgatagcgctggccatggcaatcaagctttgaagccacagcacgtcgtcctcgaccacctgttcatcgagaaagggtgggggtcgcagtcgctgctcgccctcggcgtcacccaccggtttgagtccaagtacgtgagctttgtgctctacaagccgttggagaggtgatggtggtactgtctactagctgtgtgtgagtggaagaacagagtggactgctggagatatccggactttgttctgatgtggagacaccatgggaaaaaagaaaaaaaaaggaaaataacgacaccagcaaatcagtggataaagcggatttgtcgatttgatggaggcggtagttaactaggacaggtaaagaaaatgatggatgcccgctgatgtcgatgttcaccaaagggacgatagataacgtcgtgcgatcacgagctgcctggatttgtcaaaaagcttgacagcgactaggggaggaaatggtctttttctctcgattttttggagtccgaattcgtttttatgaatgatttc

SEQ ID NO: 76763 - DNA, 1348 bp, Zea Mays
attggacttcctatcccacattatttgacgaatttatttgagagaattaatgcttggatgttaggagtgaggaggcactcaaatactctttgctcatactgccattttacattggaaattggatccatttggagctaaggttccagagactccactgcacagacctactgagctctctcctcttctcaaccattcaccagtaaacgaatccaccgaccaccactcccaggagcagggtattccgactttgattacatggagccaaggaggagatgaggtgttcctggaaggatcgtgggataactggacatcgaggagggcacttgagagatctggaaaagatcacgccgtcttgttggttctgccatccggagtctaccattaccggatcatcgtggacggggagctgaggtacatccctgaactacctcacgcagctgacgaaagagggcgagtggccaacgtcctcgatgtccatgactacgtgccagaaagcctcgacagcgtagccgagttcgaagcgcccccgtctcccgtgcacagctacgacctgcattgcccgggcgacgaggagttcgccaaggagccgcccacgctcccgccccagcttctcgtgtccgtcctcgggggggacgtcgatagcgctggccatggcaatcaagctttgaagccacagcacgtcgtcctcgaccacctgttcatcgagaaagggtgggggtcgcagtcgctgctcgccctcggcgtcacccaccggtttgagtccaagtacgtgagctttgtgctctacaagccgttggagaggtgatggtggtactgtctactagctgtgtgtgagtggaagaacagagtggactgctggaggtgaataatgtgtgtgtgtgcccttgtatagaagggaaatgcatgcaggagcttgtagctgtagctgatcttttattttatttttttattttcctttcactttcgacgaaagtaataaattagttgaccatgcatgcatgcttcgtgcaaatctgaatgtttgtgtggtctgaatgcgtgcagatatccggactttgttctgatgtggagacaccatgggaaaaaagaaaaaaaaaggaaaataacgacaccagcaaatcagtggataaagcggatttgtcgatttgatggaggcggtagttaactaggacaggtaaagaaaatgatggatgcccgctgatgtcgatgttcaccaaagggacgatagataacgtcgtgcgatcacgagctgcctggatttgtcaaaaagcttgacagcgactaggggaggaaatggtctttttctctcgattttttggagtccgaattcgtttttatgaatgatttc

SEQ ID NO: 76764 - DNA, 2307 bp, Zea Mays
attggatccatttggagctaaggctaccgggaagaaatgttgtttggtcaaaacagctagactcagagcgcagagggcgtaacctaatcatcaagcggcagtacagtcatgcctccagccgtgtctggtagcctggtagtggtagtaatactagttgttttggagactgcatgcaagttcttttcaaggagtgctgaacaagtttatttatcaagtcctttttaggagtgctgaacaagtttatttatctcattacgcgctgaagaactcaaggcacagcaagctacctgaagccgtttcgttgatcttcgaaccaatggatacctctaatcttcagcgaagtatgcacgtacaaaactctattcagcaagctacctgaccgcctgagtccttattagggactaggagggatggtaatgggtcggttggatggtaatgggtcggttggattcgggtcgggtgaagtaaaactctatccacaattacacgcaattacacatgtgaagtctacctaaacctcttggattcgggttgggtaaaataaaaacccatccgcaatcgcatcagtgaagtctacctaaacctatctgtgcgtaattttaaaccagcacctaaatccccaaatccgtcgtaaggtacatgtgtttcagttcaactgtcaatgtgccaagcaaaggccaaagggcccatagacatgtgaagtctatctaaacctatccgtgttgtatctgcgtaattttaaaccagcacccaaatccatcgtaaagtacatgcgttgcgtaattttaaaccagcacccaaatccatcgtaaagtacatgcggtgcgtaattttaaaccagcacccaaatccatcgtaaagtacatgcgttgcgtaattttaaaccagcacccaaatccatcgtaaagtacatgcggtgcgtaattttaaaccagcacccaaatccatcgtaaagtacatgtgtttctgtttaactgtcaatgtgccaagcaaaggccaaagggcccataccctagaggtctggtaatggtggtaacggacggctcctaaagtacatgcgtttttgttcttcctccggccgacgatgctaagtttttcacagcgaaacttaatatccttctatgtgcttatggtacacatgattttgaggtaaattcactagaaaatcaaagtatggtggacgctatatcttgccacactgagagctctgcccctgttgttatggttattaagtctatatttaaatatagacatagacataaaaattaatagacataagattaatagctatagccgatactatttagatatttttgtttttgaaattgggtctttaaaaagaacgggacctaggcttcaacgatgcattccttggttcatagttttacttttgaaatcttgatagctgggacctgggcctaaagtttccatatacgctagtattagaagtcatgtgaattcttgtacaaactcacctgaagtttttttccgtcaggttacttgatgttttcttactgtcacacgtaaaattacatttagcatggctaaataatattgattatttattaagttatcataatgaaaccgatctcaagtagtacatttaacaagtttacagagacctatatatgtttttattagcttagttggacacttggtgctgtctgaaactcatgttgaaatgttcttaggagacttaatttgaaccactagttttttgctgccttacatgaaaatattaggacatattatttaaagtaaaggcttcaatatgttgagcaacattaccaggggtctaaggaggcccacggaggggctgcggcagcgacagccatgggccatctaagtgagattagataaggataattagagataagattagaagattagttgagattatttaggagagtttttaagagagttttaatgagataatgatttctagctagacaagggcggcggcctatttatgtaatcaatagatgagaaataaagtaggcaagaattagaatggagaaaccctcctcttgctcaaatgtgatacatttactagtcctaggaggctagtaaacacatttatacatcagatgattccagatctgcttaaacgagacaaacctataaaggtggcgacaactttaagagttggtccacaactcgggacatatcatcagagtggggcggaagcagcccgatatacgcagcgaagcaattcggcggttccaacagccacaggcaaggttgggaacagtcgtaactcttactcgatctcctttttctgaaaaacaacaaataagcaagggtgag

SEQ ID NO: 76765 - DNA, 6490 bp, Zea Mays
ccgctcgttcgtagcgacgcggtctttacccgtgctttgccggacagtcaacgtccccgcgcacgccagcgcagcgccaaaacaaacacccgcccgtcccgtgtccgccagggattcatctccgtctggcgcgagacctgctcctccaccgcctctcctcgcccataaatagcgcccaccggatggtttattcccctcgcgctctggttttcatctcttcgcgtcggtgttgctgttcaagcgcctcacctgtccccctgtcttcccctttgccccttcgtcgccgcggcgcgtttgcgttttccaattcttccttgtctatactgtctccgtttggacttcgagctggttcggtttcgacttcggctgatctgttccgctgctgttgcccttccttgttctcgcagatctccatcgggcgttccgctttcgtgcgacgcggggagcgagcctttgttcggttgcggggttgttgggtttgcggtttattttttcccctgcgattcgtctagtcatcgtgtgcagttcgtctagtcatcgtgtcgatcttgtttcgtcccgtcttctcatcgcgtgggttgcaggattggatccgatctggtgttgggagttcgtcatgttcgccagaactcggaagcaggtcagtgttctgtcagatccgacggttcattggttttgtcacttggaaagcatggattcggtggtttcaggttcaatcgtctcccggtgcggtagcatcagaaaccgatagtgcagttgtggcctgcacaccagatgcaagaaggtctttgctggttatggagagatcagttgaagggtggaggtttgcttatggttcattcgtcgtttctcattctgatatcatcatattggtgcgaagattagcatttagcaccggacttactctaagcttgattggaaatgctgctagctagatctgcagaggcaacatagttttggaagtaggttgagccgttgactggactggagttcgtagtattggagagaagatcgtttggatatatttacctatcgccgttcatattattaattttctatccgttgcaattttaatttcttacattggggtgatggttttctccagcaacttgattaaatggatggatgggttggaggcaagtttgatcctgcttctgtttaagcaatcagaagttcggaattgttttgggatatatcaattcagagttgtgtggaggtttgcttacgttccttggttttgatctgatatatatggctatttttatgttgatcatggtggcgtgaagattgccaccagactaagcttgattgtccttaattggaaaaatgcagtagaggcaattgagcaactggattacaacatctggattgtatatggatggattgaagcctgagtttggtcctgcttctacatgaacaataataattttggaggcatcacaacagagataggacttcgcagttgaacttgtcggcgaatgattggacttcatcctatcccacattatttgatgaacgttcatgctgtttaagtgttctaagtggtaactatcaaatatatagttaccagagggcggtcttgctgattgcagatctctaggtcttctcatatttttgcatgggcttgtcacgccgcacggaatatgggctgaggtaagtttggcaattggaaatccctgtagcgaagaactgatatttaaaactgggggcaggtcagagatcattccggttgcgttggttccatcacttgttttcagtgattttagatctgaatggttggctaacattctggcgctccaatgatatcgctggtccaatgatatcactggtgtagtagtagcaaggtttgagatgcagggaggacattggaggtggattttcctcgcactctggtttttcatctcttcgcgtcgatgttgctattcaagtgcctcgcctcgcatgtccctgtcttgccctttgtccattcgtcgccatgacgcctttgcgatttccatttcttccttctctgtactctctgttttgacttcgagctgggtcggtttctactccggttgatcttttctgctgctgttgagcttccgtgctcttgcagatccccttgggacgttcagctttcgtgccacgctggagtgggcctgcgttcggtggcgggattgttgggtttgcggtttattttttccggcaattcgtctagttctcgtgtcgatcttgtttcatcttcgccttctcagcgtatgtgctgcaggattggatctgatatgagttgtttgtcctccttaaacttcagatgcaaggagggtctttgctggttatgaaaagatcagttgaagggtggaggtttgcttatggtttattcatcgtttctcattctgatatcatggtgcaaagattagcatcggacttgctctaaagcttgatggaaatgacgctggctagatttgcagaggcaacttagttttggaagtagattgaggtgttgactggagtgggagctcgtagcatcggcgagaatatcgtttggatatatttacctacctctcttcatattattaaatttctatccgctgcaattttacattggggtgatggttttctccagcaactcatggatagatgggttggaggcgagtttgatcctgcttctgcttgtgcaatcagaagtttggaattgttcagagttccttgtgtttgttcactaaccatcctcctgtcaatgttctttgaaagttaacttcacacataggctcccttaatgcttcgttagtgaatctgtagttttgggagaggtcggttgaagggtgaagggtggagtttggttgaagggtcgagctatgcttacgttcgtcgattgaagggtggaggttgttttttttccagcaactggattgtatatggatggattggggcctaagttcgattctgcattctgcatgagcaataataagtctgagctattcctgtcaaatgttcttgtttcctgtgtttgttcaataataaccatatcctgtcaaatgttcttggaaaatttagttccctacttccctcataggctacctagtacctactcttttattggcactcctaaatttcttgtttcttattatatttgggctggtgttcttctccagcaactggattatagcagctggtttatatacggatggattggagtcagttcgattctgcttattcggggttccctttttttgtccaaaaaaccatcctatcctgtggaaatttattttactcgtaggctaccttcaacgatttgattgtaatctgcagttttggaggcatcgccacagagataggactttgcagctgaacttgtcggtgaatgattgatcggactttatcctattccacattatttgatgaacgttcatgctgtttaagtgttctaagtggtaactatcaaataaatagttatcagagggtggtcttgctgattgcagatctccaggtggtcttgtgtttgttcagtgtcttctatcttgaagtagataatgattggggcctttattgcaggtcttctcatatttttggatgagcatgtcacgcggaatatgtgttgagtaaacttatctaatttacaaaatgctagtatatgaaccatgataaaattcagataattcttatttaatctgcagtgatagaagacaccgggcatgtttgggatgtgggagatttaagcagatacgggtagaactacagtactacagtctacaactttcatttaatcgaacttgtttctgcttcgactgaagctttaattcttgtgctgttggaatttctgttctgcagatcatttagctcaaataattggtagtccaacggtcacgatacttgttttggtttgggatttctgtgcttttgtctactttatctatgttgttgtggttggctggttgcttttacatgtggttgtatggtaagtttggcaattggaaatccctgtagcgaaaactgatatttaaaactgggccctggtcagaagtcattctggttgtgttggtttcatcacttgcttccagtgatttcagatctgaatggttggctaacattctgccctctatggatattgctggtatagcagtagtgaagcacaagatctggatctatttggtactgtatatcaaatctatttggtactgtatttcaaatgatcatagtatgtcgttgtgtcctttatgtaccaagactatgtattctcttgatgtatcgctctttgtaaccttttaatataaagtctcctttatcgaaaagaggtgcaggacattggaggtggattttcctcgctctccgtttattcatctcggcgcgtttgcgttttccatttcttccttctttgtacactccgtttcgacttcgagttgggtcagtttcttctctggctgatctcttctgctgctgttgcgcttttgtgctctcgcagatccctttggggcgttccgctttcctgcgacccggggagtgagcctgagttgtggcagggttggttgggtttgtagtttgttttttcctgcaacccgtctagtttttgtgtcgaatcttgtttcgtcttcgttttctctgtgcgtgggttgcaggattgggtccgatctggtgttgggggttcgtcgtggtgccgtgtggcgatctgtttgcccaagttcggaggcaggtcagtattgtgttagatcctacggctttctggttttgtcaattggacatggatttggtggtttcaggctcaattgtctgtccctggtgtggtaccatcagaatcagatagcgcagtcgtagcttgtgcaccaggtgaatttggagacctttcttcttatgttaacgactgatctcgcttgtggccttttggttgtttgtcctccttaaacttcatcagatgcagaagggtcctttctggttatggagagatcagttgaagggtggaggtttgcttatggctcactcgtcatttctcattctgatatcatcatattggtgcgaagattattagaaccagacttgctctaagcttgattggaggttttgtcacttggacatggatttggtggtttcaggctcaattgtctgtccctggtgtggtaccatcagaatcagatagcgcagtcgtagcttgtgcaccaggtgaatttggagaccttcgttcttatgttaacgactgatctcgcttgtggccttttggttgtttgtcctccttaaacttcatcagatgcagaagggtcctttctggttatggagagatcagttgaagggtggaggtttgcttatggctcactcgtcatttctcattctgatatcatcatattggtgcgaagattattagaaccagacttgctctaagcttgattggaaatgctgctggctcgatctgcaggggcaacagagttttgtaaagtagattgaggccttgactcgaatggagtttgtagtatcatcgatgagatcgtttggataaatttacctatcgttcttcacatccttaaatgtctatctgctgattggaaatgttgctggttggatctgcaggggcaaccgagttttggaaagtagattaaggccttgactcgactcgttcatagtatcggcgataaaatcgtttgaattaatttacctatcgcccttcaaattcttagatttctatccgctgccattttaatttcttatgttgggatggtggttttctccagcaactcgatttgtggatggatgggttggaggcgagttagatcctgcttctgcttttgccatcagaagtttggaaatgttcagagttgtttgttcactaaccatcctcctgtcaatgatctttgaaaatgaactgcacacataggccccctttaatgcttggttagtgaatctgcagagtttgtctggctagatgcaaaatgaaaggtccttgctggttttgtcctcctagatgcggaaggaaaggtcctctggttatggagagatccgttgaagggtggaggtttgcttaaattcgttggttttgatttgttacatggctattcttatgttaatcatggtggcgtgaagattgccacccgattaattagaaacttgattgtccttgattggaaaaatgtagaggcaacagaggtgatgttttggacgtagattgaagctttgactggactaagttcatggcatgccgataacatcgtttggatatatgtatctctcacttattggtactcaaatttcttgtttcttatattcgggctagtattttttttccagcaactggattgtatatggatagatgtcttctcatatttttgggtgggcttgtcacgcagaatatgtttagagtaaacttatccaatttacaaaatgctagtatatgaaccatgataaaattcagataattcttatttaatctgcagcgatagaagtcactgggcaagtttgggatgtgggagatttaagcagatattggtagaactacagccctacaactttcatttaatcaaacttgtttctg

SEQ ID NO: 76766 - DNA, 1711 bp, Zea Mays
gcgctctggttttcatctcttcgcgtcggtgttgctgttcaagcgcctcacctgtccccctgtcttcccctttgccccttcgtcgccgcggcgcgtttgcgttttccaattcttccttgtctatactgtctccgtttggacttcgagctggttcggtttcgacttcggctgatctgttccgctgctgttgcccttccttgttctcgcagatctccatcgggcgttccgctttcgtgcgacgcggggagcgagcctttgttcggttgcggggttgttgggtttgcggtttattttttcccctgcgattcgtctagtcatcgtgtgcagttcgtctagtcatcgtgtcgatcttgtttcgtcccgtcttctcatcgcgtgggttgcaggattggatccgatctggtgttgggagttcgtcatgttcgccagaactcggaagcaggttcaatcgtctcccggtgcggtagcatcagaaaccgatagtgcagttgtggcctgcacaccaggtggatttggagaaccttcggtacattcttatgttaacggctgatctcgcttgtggccttttggttgtttgtcctccttaaacttcagatgcaagaaggtctttgctggttatggagagatcagttgaagggtggaggtttgcttatggttcattcgtcgtttctcattctgatatcatcatattggtgcgaagattagcatttagcaccggacttactctaagcttgattggaaatgctgctagctagatctgcagaggcaacatagttttggaagtaggttgagccgttgactggactggagttcgtagtattggagagaagatcgtttggatatatttacctatcgccgttcatattattaattttctatccgttgcaattttaatttcttacattggggtgatggttttctccagcaacttgattaaatggatggatgggttggaggcaagtttgatcctgcttctgtttaagcaatcagaagttcggaattggtctgagttccttgtgtttgttcactaaccatcctcctgtagatgttctaaaattaactgcacacataagctcccttcaatgcttcgttactgaatctgcagttttgggatatatcaattcagagttgtgtggaggtttgcttacgttccttggttttgatctgatatatatggctatttttatgttgatcatggtggcgtgaagattgccaccagactaagcttgattgtccttaattggaaaaatgcagtagaggcaattgaggtgatgttttggacctgggttgaagctttgacctgactaagttcatgacatgctgataacattgttgggatatatgtatctctcacacttctattggtactcttaatttcttgtttcttatatttgggctgatgtttttctccagcaactggattacaacatctggattgtatatggatggattgaagcctgagtttggtcctgcttctacatgaacaataataagttctgaactattcagggttccctttttgttcaaaaaacagttctatcatgtcaaatgttagttcactcgtaggctaccttcaatgatcctaatgtgatctgcagttttggaggcatcacaacagagataggacttcgcagttgaacttgtcggcgaatgattggacttcatcctatcccacattatttgatgaacgttcatgctgtttaagtgttct

SEQ ID NO: 76767 - DNA, 7656 bp, Zea Mays
gcgttctggttttcatctcttcgcgtccgtgttgctgttcaagcgcctcacctgtccccctgtcttcccctttgccccttcgtcgccgcagcacgtttgcgttttccaattcttccttgtctatactctctccgtctcgacttcgagctgggtcggtttcgacttcggctgatctgttccgctgctgttgcccttccttgttctcgcagatctccatcgggcgttccgctttcgtgcgacgcggggagcgagcctttgttcggtggcggggttgttgggtttgcggtttattttttccctgcaattcgtctagtcatcgtgtgtagttcgtctagtcatcgtgtcgatcttgtttcgtctcgccttctcatcgcgtgggttgcaggattggatccgatctggtgttgggagttcgtcatgttcgcctgaactcggaggcaggtcagtgttctgtcagatccgacggttcattggttttgtcacttggaaagcatggattcggtggtttcaggcccaatcgtctcccggtgtggtaccaccagaaattgtcacttggacatggattcggtggtttcaggtcaatcgtctcccggtgcgggtagcgtcagaaaccgatagtgcagttgtagcctgcacaccaggtggatttggagaaccttcagtacattcttatgttaacggctgatctcgcttgtggccttttggttgtttgtcctccttaaacttcagatgcaagaagggtccttgctggttatggagagatcagttgaagggtggaggtttgcttatggttcattcgtcgtttctcattctgatatcatcatattggtgcgaagattagcaccggacttactctaagcttgattggaaatgctgctggctagatctgcagaggcaacatagttttggaagtaggttgaggcgttgactggactggagttcgtagtattggagagaagatcgtttggatatatttacctatcgccgttcatattattaattttctatccgttgcaattttaatttcttacattggggtgatggttttctccagcaacttgattaaatggatggatgggttggaggcgagtttgatcatgcttctgcttaagcaatcagaagtttggaataggtcagagttccttgtgtttgttcactaaccatcctcctgtagatgttcttctaaaattaactacacacataagctcccttcaatgcttcgttactgaatctgcagttttgggatatatcaattcagagttagctgaggtttgcttacattccttggttttgatctgatatatatggctatttttatattgatcatggtggcgtgaagattgccactggactaattaggagcttgattgtccttaattggaaaaatgttgtagaggcaactgaggtgatgttttggacgtaggttgaagctttgacctgactaagttcatgacatgccgataacattgttgggatatattgtcggaagattagcaccgaacttactttaagcttcgttggaaatgctgcctctagatctgcagaggcaacttaatattggaaataaattggggcgttgactgcactgcaattcgtagtattggcgagaagatcattaaatggatggatgggttggaggcgagtttgatcctgcttctgcttgtgcaatcagaagtttggaattgttcagagttccttgtgtttgttcattaaccatccttctgtcaatgttcttcgaaaactaacttcacacataggctccctttaatgctttgttagtgaatctgcagttttgggagacatcactacagagttcatccccctaaatgcataatggaagtccttgctggtattatccacctagatgcaaaaggaaaggtcccttggttatgaatagatcggttgaagggtggaggtttgcttacgttccttggttttgatctgctatatggctattttatgttagcgagtttgatcctgcttctgcttgtgcaatcagaactttggaattgttcagagttccttgtgtttgttcactaactatcctcctgtcgatgttttttgaaaattgacttcacacataggctcccttaatgcttcgttagtgtctgcagttttgggagatgccactccagagttggtcccccctagatgcaaaatgaaaggtccttgctggtttgtcctagatgcaaaaggaaaggtcccttggttatggatagatcggttggagggtggaggtttgcttatgttccttggttttggtctgatatatggctatttttatgtcaatcacggtggcgtgaagattgccaccggactaattagaagcttggttgtccttaattggaataatgttgtagaggcaactgagcaactggattacaacatctggattgtatatggatgcattgaagactgagttcggtcctgcttctacatgaacaataataattttggaggcattacaacagagataggacttcgcagctgaacttgtcgacgaatgattggacttcatcctatcccacattatttgatgaacgttcatgctgtttaagtgttctaagtggtaactatcaaatatatagttaccagagggcggtcttgctgattgcagatctctaggtgggatatttgcatgggcacagaaaggaacccgatcaattcaaacctacaacaacctttaactctcactgtgtttgttcagtgtgttctaccttgaagtagataatgattggggtcttcattgcagtcttctcctatttttgcatgggcttgtcatgctgcacggaatatgggctgagtactaaacttatccaatttacaaaatgctagtatatgacccatgatgaaaattcggatacttctaatttaatctgtagttgtagaaggcactgggtatgtttgggacgtgggagattcaagcagatatgggtagaactacaactttgatttaatcaatcgtgtttctgcttcatcatgctatatatgctctgactgaagctttaattcttgtgttgctatcatttctgcgttctgcagatcatttagctcaagtaattggtagtccaacggtcatgatacttgttttggtttgggattagctttatctacatttttgtgctcgcttttacatgtggttgcagggtaagtttggcaattggaaatccctgtagcgaagaactgatatttaaaactgggggcaggtcagagatcattccggttgcgttggttccatcacttgttttcagtgattttagatctgaatggttggctaacattctggcgctccaatgatatcgctggtccaatgatatcactggtgtagtagtagcaaggtttgagatgcagggaggacattggaggtggattttcctcgcactctggtttttcatctcttcgcgtcgatgttgctattcaagtgcctcgcctcgcatgtccctgtcttgccctttgtccattcgtcgcatgacgcctttgcgatttccatttcttccttctctgtactctctgttttgacttcgagctgggtcggcttctactccggttgatcttttctgctgctgttgagcttctgtgctcttccagatccccttggggcgttcagctttcgtgccacgctggagtgggcctgcgttcggtggcgggattgttgggtttgcggtttattttttccggcaattcgtctagttctcgtgtcgatcttgtttcatcttcgccttctcagcgtatgggctgcaggattggatctgatatgagttgtttgtcctccttaaacttcagatgcaaggagggtctttgctggttatgaaaagatcagttgaagggtggagatttgcagaggcaacttagttttggaagtagattgaggcattgactggagtgggagctcgtagcatcggcgagaatatcgtttggatatatttacctacctctcttcatattattaaatttctatccgctgcagttttacattggggtgatgattttctacagcaactcatggatggatgggttggaggcgagtttgatcctgcttctgcttgtgcaatcagaagtttggaattgttcagagttccttgtttttgggagagggcggttgaagggtgaagggtggagtttggttgaagggtgttcttctctagcaactggattatagcagctggtttatatacggatggattggagctaccctaccttcaacgatttgattgtaatctgcagttttggaggcatcgccacagagataggactttgcagctgaactcgtcggtgaatgattgatcggactttatcgtattccacatcaattgatgaatgttcatgctgtttaagtgttctcagttctcactatcaaatagatagttaccagagggtggtcttgctgattgcagatctccaggtgggatacttgcacgggcacagaaggatacagatctattcaaacctacaatgacctttaactcattgtgtttgttcagtgtcttctatcttgaagtagataatgatcggggcctttattgcaggtcttctcatatttttggatgggcttgtcatgcggaatatgttgatagaagtttctgggcatgtttgggatgtgggagatttaagcagatatgggtagaactacatcactataactttcatttaatgtaacttgtttctgcttcgactgaagcttgaattgtgtgctgctggaatttctgttctgcagaccatttagctcaaataattggtagtccaacggtcactatacttgttttggtttgggatttctgtggatgcttttgtctactttatctatgttgttgtggttgcttttacatgtggttgtatggtaagtttggcaattggaaatccctgtagcgaaaaactgatatttaaaaagtcattctggttgtgttggtttcatcacttacttccagtgatttcagatctgaatgattggctaacattctgccctccatggatactgctggtgtagcagtagtgaagcaaggttcaagatctggatttatttggtactgtatatcaaatgatcatagtatgtggttgtgtcctttagaggtgcaggacattggaggtggattttcctcgctctccgattattcatctcggcgcgtttgtgttttccatttcttccttctctgtacactccatttcgacttcgagttgggtcagtttcttctctggctgatctcttctgctgctgttgcggttctgcagatccctttggggcgttccgctttcctgcgaccctgggagtgagcctgagttgtggcagggtcgttgggtttgtagtttttttttctgcaatccgtctagtttttgtgtcgatcttgtttcgtcttcgctttcttggtgcgtgggttgcaggattggatccgatctggtgctgggagttcgtcgtggtgtcgtgtggcaatctgtttgcccaagttcagaggcaggtcagtattctgttagatccaacggttcattggttttgtcgcttggacatggatttggtggtttcaggctcaattgtctgtccctggtgtggtaccatcagaatcagatagcgcagtcgtcgcttgtgcaccaggtgaatttggagaccttcgttcttatgttaacgactgatctcgcttgtggccttttggttgttttgtcctcaaacttcatcagatgcagaagggtcctttctggttatggagagatcagttgaagggtggagatttgcttatggctcacttgttgtttctcattctaatatcatcatattggtgcgaagattattagaaccagacttgctctaagcttgattggaaatgctgctggttagatctgcaggggcaacagagttttgtaaagtagattgaggctttgactcgaatggagttcgtagtatcatcgatgagatcgtttggataaatttacctatcgttcttcacattcttaaatgtctatctgctgattggaaatgttgctggttggatctgcaggggcaaccgagttttggacattcttaaatgtctatctgctgaatggagttcatagtatcggcgataagatcgtttgaattaatttacctatcactcttcatattcttagatttctatccgctgccattttaattccttatgttgggattatgttgggatggtggttttctccagcaactcgatttgtggatggatgggttggagccttggaggcgagttagatcctgcttcttcttttgctatcagaagtttggaaatgttcagagttagtttgtctggctagatacaaaatgaaaggtccttgctggttttgtcctcctagatgcggaaggaaaggtcctctggttatggagagatccgttgaagggtggaggtttgcttaaattcgttggttttgatatgttacatggctattcttatgttaatcatggtggcgtgaagattgccacccgattaattagaaacttgattgtccttgattggaaaaatgtagaggcaacagaggtgatgttttggacgtagattgaagctttgactggactaagttcatggcatgctctcttttattgttatttgagagaattaatgcttggatgttaggagtgaggaggcactcaaatactctttgctcatactgccattttacattggaaattggatacatttggagctaaggtccactatttgcgctgatatccagcaagaactctttcttgacatacatacctttattgagcaaaattgtttttttactgaaattgtagttacttgagcatatgtgcatcgtattctttatggtcccctcgtcccttcattaatacccaaattttcttttaggactctagtttctggttcgcttctaattttactttggtataacccctcgtccacttactggttcagttatgcattattagtataaggctgttgactgcattgtttatgaaagtcaagaaaggatgttactgcttctgtgcatttcaaaagaaaatctctctgaacaaacttgtcttctatgtgcttattgtttgaccatttctgtcgtggactagcagtagtgccttatatacatggattctcaatttatcacaagtttgggttcgagttgactcatcctaatttatagatcaataaggttgttgcattgatattaatatgccaaagtcagtggaagcttagtgcttgcttaaatctgtttcaactgggtttcttgaaccttgaccttgagtgaacttgaatggttggttccatttgtgtcatctgtacagcttggtgtttggtcatgcaagctaggatatgattgcttctttttctgtaattctgcactatctccaaattagcatgttcattcttgttataatggtgattgagtagttaggctaatttaacactaggattgattatcttgcatttggttaggtccttgcaaagtggtccaggtaacattggggatgacaatagtaccttaacctagctaggatatgtttggtcatgcaagctatgatgttggaaactgtacataagattgcacgagtgtacactagctgattttttagctgtgcacttgcttaaatttctatgggtctttgttgatggtatgattttttattaaagctggttcctgtatctgttcagtcctcgagatcattaggtattcgaattaggaatacac

SEQ ID NO: 76768 - DNA, 7434 bp, Zea Mays
gcgttctggttttcatctcttcgcgtccgtgttgctgttcaagcgcctcacctgtccccctgtcttcccctttgccccttcgtcgccgcagcacgtttgcgttttccaattcttccttgtctatactctctccgtctcgacttcgagctgggtcggtttcgacttcggctgatctgttccgctgctgttgcccttccttgttctcgcagatctccatcgggcgttccgctttcgtgcgacgcggggagcgagcctttgttcggtggcggggttgttgggtttgcggtttattttttccctgcaattcgtctagtcatcgtgtgtagttcgtctagtcatcgtgtcgatcttgtttcgtctcgccttctcatcgcgtgggttgcaggattggatccgatctggtgttgggagttcgtcatgttcgcctgaactcggaggcaggtcagtgttctgtcagatccgacggttcattggttttgtcacttggaaagcatggattcggtggtttcaggcccaatcgtctcccggtgtggtaccaccagaaattgtcacttggacatggattcggtggtttcaggtcaatcgtctcccggtgcgggtagcgtcagaaaccgatagtgcagttgtagcctgcacaccaggtggatttggagaaccttcagtacattcttatgttaacggctgatctcgcttgtggccttttggttgtttgtcctccttaaacttcagatgcaagaagggtccttgctggttatggagagatcagttgaagggtggaggtttgcttatggttcattcgtcgtttctcattctgatatcatcatattggtgcgaagattagcaccggacttactctaagcttgattggaaatgctgctggctagatctgcagaggcaacatagttttggaagtaggttgaggcgttgactggactggagttcgtagtattggagagaagatcgtttggatatatttacctatcgccgttcatattattaattttctatccgttgcaattttaatttcttacattggggtgatggttttctccagcaacttgattaaatggatggatgggttggaggcgagtttgatcatgcttctgcttaagcaatcagaagtttggaataggtcagagttccttgtgtttgttcactaaccatcctcctgtagatgttcttctaaaattaactacacacataagctcccttcaatgcttcgttactgaatctgcagttttgggatatatcaattcagagttagctgaggtttgcttacattccttggttttgatctgatatatatggctatttttatattgatcatggtggcgtgaagattgccactggactaattaggagcttgattgtccttaattggaaaaatgttgtagaggcaactgaggtgatgttttggacgtaggttgaagctttgacctgactaagttcatgacatgccgataacattgttgggatatattgtcggaagattagcaccgaacttactttaagcttcgttggaaatgctgcctctagatctgcagaggcaacttaatattggaaataaattggggcgttgactgcactgcaattcgtagtattggcgagaagatcattaaatggatggatgggttggaggcgagtttgatcctgcttctgcttgtgcaatcagaagtttggaattgttcagagttccttgtgtttgttcattaaccatccttctgtcaatgttcttcgaaaactaacttcacacataggctccctttaatgctttgttagtgaatctgcagttttgggagacatcactacagagttcatccccctaaatgcataatggaagtccttgctggtattatccacctagatgcaaaaggaaaggtcccttggttatgaatagatcggttgaagggtggaggtttgcttacgttccttggttttgatctgctatatggctattttatgttagcgagtttgatcctgcttctgcttgtgcaatcagaactttggaattgttcagagttccttgtgtttgttcactaactatcctcctgtcgatgttttttgaaaattgacttcacacataggctcccttaatgcttcgttagtgtctgcagttttgggagatgccactccagagttggtcccccctagatgcaaaatgaaaggtccttgctggtttgtcctagatgcaaaaggaaaggtcccttggttatggatagatcggttggagggtggaggtttgcttatgttccttggttttggtctgatatatggctatttttatgtcaatcacggtggcgtgaagattgccaccggactaattagaagcttggttgtccttaattggaataatgttgtagaggcaactgagcaactggattacaacatctggattgtatatggatgcattgaagactgagttcggtcctgcttctacatgaacaataataattttggaggcattacaacagagataggacttcgcagctgaacttgtcgacgaatgattggacttcatcctatcccacattatttgatgaacgttcatgctgtttaagtgttctaagtggtaactatcaaatatatagttaccagagggcggtcttgctgattgcagatctctaggtgggatatttgcatgggcacagaaaggaacccgatcaattcaaacctacaacaacctttaactctcactgtgtttgttcagtgtgttctaccttgaagtagataatgattggggtcttcattgcagtcttctcctatttttgcatgggcttgtcatgctgcacggaatatgggctgagtactaaacttatccaatttacaaaatgctagtatatgacccatgatgaaaattcggatacttctaatttaatctgtagttgtagaaggcactgggtatgtttgggacgtgggagattcaagcagatatgggtagaactacaactttgatttaatcaatcgtgtttctgcttcatcatgctatatatgctctgactgaagctttaattcttgtgttgctatcatttctgcgttctgcagatcatttagctcaagtaattggtagtccaacggtcatgatacttgttttggtttgggattagctttatctacatttttgtgctcgcttttacatgtggttgcagggtaagtttggcaattggaaatccctgtagcgaagaactgatatttaaaactgggggcaggtcagagatcattccggttgcgttggttccatcacttgttttcagtgattttagatctgaatggttggctaacattctggcgctccaatgatatcgctggtccaatgatatcactggtgtagtagtagcaaggtttgagatgcagggaggacattggaggtggattttcctcgcactctggtttttcatctcttcgcgtcgatgttgctattcaagtgcctcgcctcgcatgtccctgtcttgccctttgtccattcgtcgcatgacgcctttgcgatttccatttcttccttctctgtactctctgttttgacttcgagctgggtcggcttctactccggttgatcttttctgctgctgttgagcttctgtgctcttccagatccccttggggcgttcagctttcgtgccacgctggagtgggcctgcgttcggtggcgggattgttgggtttgcggtttattttttccggcaattcgtctagttctcgtgtcgatcttgtttcatcttcgccttctcagcgtatgggctgcaggattggatctgatatgagttgtttgtcctccttaaacttcagatgcaaggagggtctttgctggttatgaaaagatcagttgaagggtggagatttgcagaggcaacttagttttggaagtagattgaggcattgactggagtgggagctcgtagcatcggcgagaatatcgtttggatatatttacctacctctcttcatattattaaatttctatccgctgcagttttacattggggtgatgattttctacagcaactcatggatggatgggttggaggcgagtttgatcctgcttctgcttgtgcaatcagaagtttggaattgttcagagttccttgtttttgggagagggcggttgaagggtgaagggtggagtttggttgaagggtgttcttctctagcaactggattatagcagctggtttatatacggatggattggagctaccctaccttcaacgatttgattgtaatctgcagttttggaggcatcgccacagagataggactttgcagctgaactcatctccaggtgggatacttgcacgggcacagaaggatacagatctattcaaacctacaatgacctttaactcattgtgtttgttcagtgtcttctatcttgaagtagataatgatcggggcctttattgcaggtcttctcatatttttggatgggcttgtcatgcggaatatgtgttgagtaaacttatccaatttacaaaatgctagtatacgaaccatgataaaattcagataattcttatttaatctgcagtgatagaagtttctgggcatgtttgggatgtgggagatttaagcagatatgggtagaactacatcactataactttcatttaatgtaacttgtttctgcttcgactgaagcttgaattgtgtgctgctggaatttctgttctgcagaccatttagctcaaataattggtagtccaacggtcactatacttgttttggtttgggatttctgtggatgcttttgtctactttatctatgttgttgtggttgcttttacatgtggttgtatggtaagtttggcaattggaaatccctgtagcgaaaaactgatatttaaaaagtcattctggttgtgttggtttcatcacttacttccagtgatttcagatctgaatgattggctaacattctgccctccatggatactgctggtgtagcagtagtgaagcaaggttcaagatctggatttatttggtactgtatatcaaatgatcatagtatgtggttgtgtcctttagaggtgcaggacattggaggtggattttcctcgctctccgattattcatctcggcgcgtttgtgttttccatttcttccttctctgtacactccatttcgacttcgagttgggtcagtttcttctctggctgatctcttctgctgctgttgcggttctgcagatccctttggggcgttccgctttcctgcgaccctgggagtgagcctgagttgtggcagggtcgttgggtttgtagtttttttttctgcaatccgtctagtttttgtgtcgatcttgtttcgtcttcgctttcttggtgcgtgggttgcaggattggatccgatctggtgctgggagttcgtcgtggtgtcgtgtggcaatctgtttgcccaagttcagaggcaggtcagtattctgttagatccaacggttcattggttttgtcgcttggacatggatttggtggtttcaggctcaattgtctgtccctggtgtggtaccatcagaatcagatagcgcagtcgtcgcttgtgcaccaggtgaatttggagaccttcgttcttatgttaacgactgatctcgcttgtggccttttggttgttttgtcctcaaacttcatcagatgcagaagggtcctttctggttatggagagatcagttgaagggtggagatttgcttatggctcacttgttgtttctcattctaatatcatcatattggtgcgaagattattagaaccagacttgctctaagcttgattggaaatgctgctggttagatctgcaggggcaacagagttttgtaaagtagattgaggctttgactcgaatggagttcgtagtatcatcgatgagatcgtttggataaatttacctatcgttcttcacattcttaaatgtctatctgctgattggaaatgttgctggttggatctgcaggggcaaccgagttttggacattcttaaatgtctatctgctgaatggagttcatagtatcggcgataagatcgtttgaattaatttacctatcactcttcatattcttagatttctatccgctgccattttaattccttatgttgggattatgttgggatggtggttttctccagcaactcgatttgtggatggatgggttggagccttggagagtttgtctggctagatacaaaatgaaaggtccttgctggttttgtcctcctagatgcggaaggaaaggtcctctggttatggagagatccgttgaagggtggagaggcaacagaggtgatgttttggacgtagattgaagctttgactggactaagttcatggcatgctctcttttattgttatttgagagaattaatgcttggatgttaggagtgaggaggcactcaaatactctttgctcatactgccattttacattggaaattggatacatttggagctaaggtccactatttgcgctgatatccagcaagaactctttcttgacatacatacctttattgagcaaaattgtttttttactgaaattgtagttacttgagcatatgtgcatcgtattctttatggtcccctcgtcccttcattaatacccaaattttcttttaggactctagtttctggttcgcttctaattttactttggtataacccctcgtccacttactggttcagttatgcattattagtataaggctgttgactgcattgtttatgaaagtcaagaaaggatgttactgcttctgtgcatttcaaaagaaaatctctctgaacaaacttgtcttctatgtgcttattgtttgaccatttctgtcgtggactagcagtagtgccttatatacatggattctcaatttatcacaagtttgggttcgagttgactcatcctaatttatagatcaataaggttgttgcattgatattaatatgccaaagtcagtggaagcttagtgcttgcttaaatctgtttcaactgggtttcttgaaccttgaccttgagtgaacttgaatggttggttccatttgtgtcatctgtacagcttggtgtttggtcatgcaagctaggatatgattgcttctttttctgtaattctgcactatctccaaattagcatgttcattcttgttataatggtgattgagtagttaggctaatttaacactaggattgattatcttgcatttggttaggtccttgcaaagtggtccaggtaacattggggatgacaatagtaccttaacctagctaggatatgtttggtcatgcaagctatgatgttggaaactgtacataagattgcacgagtgtacactagctgattttttagctgtgcacttgcttaaatttctatgggtctttgttgatggtatgattttttattaaagctggttcctgtatctgttcagtcctcgagatcattaggtattcgaattaggaatacac

SEQ ID NO: 76769 - DNA, 4969 bp, Zea Mays
gcgttctggttttcatctcttcgcgtccgtgttgctgttcaagcgcctcacctgtccccctgtcttcccctttgccccttcgtcgccgcagcacgtttgcgttttccaattcttccttgtctatactctctccgtctcgacttcgagctgggtcggtttcgacttcggctgatctgttccgctgctgttgcccttccttgttctcgcagatctccatcgggcgttccgctttcgtgcgacgcggggagcgagcctttgttcggtggcggggttgttgggtttgcggtttattttttccctgcaattcgtctagtcatcgtgtgtagttcgtctagtcatcgtgtcgatcttgtttcgtctcgccttctcatcgcgtgggttgcaggattggatccgatctggtgttgggagttcgtcatgttcgcctgaactcggaggcaggtcagtgttctgtcagatccgacggttcattggttttgtcacttggaaagcatggattcggtggtttcaggcccaatcgtctcccggtgtggtaccaccagaaattgtcacttggacatggattcggtggtttcaggtcaatcgtctcccggtgcgggtagcgtcagaaaccgatagtgcagttgtagcctgcacaccaggtggatttggagaaccttcagtacattcttatgttaacggctgatctcgcttgtggccttttggttgtttgtcctccttaaacttcagatgcaagaagggtccttgctggttatggagagatcagttgaagggtggaggtttgcttatggttcattcgtcgtttctcattctgatatcatcatattggtgcgaagattagcaccggacttactctaagcttgattggaaatgctgctggctagatctgcagaggcaacatagttttggaacaacttgattaaatggatggatgggttggaggcgagtttgatcatgcttctgcttaagcaatcagaagtttggaatagcaactggattacaacatctggattgtatatggatgcattgaagactgagttcggtcctgcttctacatgaacaataataagttctgaactattcagggttccctttttgttcaaaaaacagttctaacttctatcctgtcaaatgttagttcactcgtaggctaccttcaatgattctattgtgatctgcagttttggaggcattacaacagagataggacttcgcagctgaacttgtcgacgaatgattggacttcatcctatcccacattatttgatgaacgttcatgctgtttaagtgttctaagtggtaactatcaaatatatagttaccagagggcggtcttgctgattgcagatctctagggtaagtttggcaattggaaatccctgtagcgaagaactgatatttaaaactgggggcaggtcagagatcattccggttgcgttggttccatcacttgttttcagtgattttagatctgaatggttggctaacattctggcgctccaatgatatcgctggtccaatgatatcactggtgtagtagtagcaaggtttgagatgcagggaggacattggaggtggattttcctcgcactctggtttttcatctcttcgcgtcgatgttgctattcaagtgcctcgcctcgcatgtccctgtcttgccctttgtccattcgtcgcatgacgcctttgcgatttccatttcttccttctctgtactctctgttttgacttcgagctgggtcggcttctactccggttgatcttttctgctgctgttgagcttctgtgctcttccagatccccttggggcgttcagctttcgtgccacgctggagtgggcctgcgttcggtggcgggattgttgggtttgcggtttattttttccggcaattcgtctagttctcgtgtcgatcttgtttcatcttcgccttctcagcgtatgggctgcaggattggatctgatatgagttgtttgtcctccttaaacttcagatgcaaggagggtctttgctggttatgaaaagatcagttgaagggtggagatttgcagaggcaacttagttttggaagtagattgaggcattgactggagtgggagctcgtagcatcggcgagaatatcgtttggatatatttacctacctctcttcatattattaaatttctatccgctgcagttttacattggggtgatgattttctacagcaactcatggatggatgggttggaggcgagtttgatcctgcttctgcttgtgcaatcagaagtttggaattgttcagagttccttgtgtttgttcactgaccatcctcctgtcaatgttctttgaaaattaacttcacacataggctcccttaatgcttcgttagtgaatctgcagttttgggagagggcggttgaagggtgaagggtggagtttggttgaagggtgttcttctctagcaactggattatagcagctggtttatatacggatggattggagctaccctaccttcaacgatttgattgtaatctgcagttttggaggcatcgccacagagataggactttgcagctgaactcgtcggtgaatgattgatcggactttatcgtattccacatcaattgatgaatgttcatgctgtttaagtgttctcagttctcactatcaaatagatagttaccagagggtggtcttgctgattgcagatctccaggtgggatacttgcacgggcacagaaggatacagatctattcaaacctacaatgacctttaactcattgtgtttgttcagtgtcttctatcttgaagtagataatgatcggggcctttattgcaggtcttctcatatttttggatgggcttgtcatgcggaatatgtgttgagtaaacttatccaatttacaaaatgctagtatacgaaccatgataaaattcagataattcttatttaatctgcagtgatagaagtttctgggcatgtttgggatgtgggagatttaagcagatatgggtagaactacatcactataactttcatttaatgtaacttgtttctgcttcgactgaagcttgaattgtgtgctgctggaatttctgttctgcagaccatttagctcaaataattggtagtccaacggtcactatacttgttttggtttgggatttctgtggatgcttttgtctactttatctatgttgttgtggttgcttttacatgtggttgtatggtaagtttggcaattggaaatccctgtagcgaaaaactgatatttaaaaagtcattctggttgtgttggtttcatcacttacttccagtgatttcagatctgaatgattggctaacattctgccctccatggatactgctggtgtagcagtagtgaagcaaggttcaagatctggatttatttggtactgtatatcaaatgatcatagtatgtggttgtgtcctttagaggtgcaggacattggaggtggattttcctcgctctccgattattcatctcggcgcgtttgtgttttccatttcttccttctctgtacactccatttcgacttcgagttgggtcagtttcttctctggctgatctcttctgctgctgttgcggttctgcagatccctttggggcgttccgctttcctgcgaccctgggagtgagcctgagttgtggcagggtcgttgggtttgtagtttttttttctgcaatccgtctagtttttgtgtcgatcttgtttcgtcttcgctttcttggtgcgtgggttgcaggattggatccgatctggtgctgggagttcgtcgtggtgtcgtgtggcaatctgtttgcccaagttcagaggcaggtcagtattctgttagatccaacggttcattggttttgtcgcttggacatggatttggtggtttcaggctcaattgtctgtccctggtgtggtaccatcagaatcagatagcgcagtcgtcgcttgtgcaccaggtgaatttggagaccttcgttcttatgttaacgactgatctcgcttgtggccttttggttgttttgtcctcaaacttcatcagatgcagaagggtcctttctggttatggagagatcagttgaagggtggagatttgcttatggctcacttgttgtttctcattctaatatcatcatattggtgcgaagattattagaaccagacttgctctaagcttgattggaaatgctgctggttagatctgcaggggcaacagagttttgtaaagtagattgaggctttgactcgaatggagttcgtagtatcatcgatgagatcgtttggataaatttacctatcgttcttcacattcttaaatgtctatctgctgattggaaatgttgctggttggatctgcaggggcaaccgagttttggacattcttaaatgtctatctgctgaatggagttcatagtatcggcgataagatcgtttgaattaatttacctatcactcttcatattcttagatttctatccgctgccattttaattccttatgttgggattatgttgggatggtggttttctccagcaactcgatttgtggatggatgggttggagccttggaggcgagttagatcctgcttcttcttttgctatcagaagtttggaaatgttcagagttagtttgtctggctagatacaaaatgaaaggtccttgctggttttgtcctcctagatgcggaaggaaaggtcctctggttatggagagatccgttgaagggtggaggtttgcttaaattcgttggttttgatatgttacatggctattcttatgttaatcatggtggcgtgaagattgccacccgattaattagaaacttgattgtccttgattggaaaaatgtagaggcaacagaggtgatgttttggacgtagattgaagctttgactggactaagttcatggcatgctctcttttattgttatttgagagaattaatgcttggatgttaggagtgag

SEQ ID NO: 76770 - DNA, 4960 bp, Zea Mays
gcgttctggttttcatctcttcgcgtccgtgttgctgttcaagcgcctcacctgtccccctgtcttcccctttgccccttcgtcgccgcagcacgtttgcgttttccaattcttccttgtctatactctctccgtctcgacttcgagctgggtcggtttcgacttcggctgatctgttccgctgctgttgcccttccttgttctcgcagatctccatcgggcgttccgctttcgtgcgacgcggggagcgagcctttgttcggtggcggggttgttgggtttgcggtttattttttccctgcaattcgtctagtcatcgtgtgtagttcgtctagtcatcgtgtcgatcttgtttcgtctcgccttctcatcgcgtgggttgcaggattggatccgatctggtgttgggagttcgtcatgttcgcctgaactcggaggcaggtcagtgttctgtcagatccgacggttcattggttttgtcacttggaaagcatggattcggtggtttcaggcccaatcgtctcccggtgtggtaccaccagaaattgtcacttggacatggattcggtggtttcaggtcaatcgtctcccggtgcgggtagcgtcagaaaccgatagtgcagttgtagcctgcacaccaggtggatttggagaaccttcagtacattcttatgttaacggctgatctcgcttgtggccttttggttgtttgtcctccttaaacttcagatgcaagaagggtccttgctggttatggagagatcagttgaagggtggaggtttgcttatggttcattcgtcgtttctcattctgatatcatcatattggtgcgaagattagcaccggacttactctaagcttgattggaaatgctgctggctagatctgcagaggcaacatagttttggaacaacttgattaaatggatggatgggttggaggcgagtttgatcatgcttctgcttaagcaatcagaagtttggaatagcaactggattacaacatctggattgtatatggatgcattgaagactgagttcggtcctgcttctacatgaacaataataattttggaggcattacaacagagataggacttcgcagctgaacttgtcgacgaatgattggacttcatcctatcccacattatttgatgaacgttcatgctgtttaagtgttctaagtggtaactatcaaatatatagttaccagagggcggtcttgctgattgcagatctctaggtgggatatttgcatgggcacagaaaggaacccgatcaattcaaacctacaacaacctttaactctcactgtgtttgttcagtgtgttctaccttgaagtagataatgattggggtcttcattgcagtcttctcctatttttgcatgggcttgtcatgctgcacggaatatgggctgagtactaaacttatccaatttacaaaatgctagtatatgacccatgatgaaaattcggatacttctaatttaatctgtagttgtagaaggcactgggtatgtttgggacgtgggagattcaagcagatatgggtagaactacaactttgatttaatcaatcgtgtttctgcttcatcatgctatatatgctctgactgaagctttaattcttgtgttgctatcatttctgcgttctgcagatcatttagctcaagtaattggtagtccaacggtcatgatacttgttttggtttgggattagctttatctacatttttgtgctcgcttttacatgtggttgcagggtaagtttggcaattggaaatccctgtagcgaagaactgatatttaaaactgggggcaggtcagagatcattccggttgcgttggttccatcacttgttttcagtgattttagatctgaatggttggctaacattctggcgctccaatgatatcgctggtccaatgatatcactggtgtagtagtagcaaggtttgagatgcagggaggacattggagatgcaaggagggtctttgctggttatgaaaagatcagttgaagggtggagatttgcagaggcaacttagttttggaagtagattgaggcattgactggagtgggagctcgtagcatcggcgagaatatcgtttggatatatttacctacctctcttcatattattaaatttctatccgctgcagttttacattggggtgatgattttctacagcaactcatggatggatgggttggaggcgagtttgatcctgcttctgcttgtgcaatcagaagtttggaattgttcagagttccttgtgtttgttcactgaccatcctcctgtcaatgttctttgaaaattaacttcacacataggctcccttaatgcttcgttagtgaatctgcagttttgggagagggcggttgaagggtgaagggtggagtttggttgaagggtgttcttctctagcaactggattatagcagctggtttatatacggatggattggagctaccctaccttcaacgatttgattgtaatctgcagttttggaggcatcgccacagagataggactttgcagctgaactcgtcggtgaatgattgatcggactttatcgtattccacatcaattgatgaatgttcatgctgtttaagtgttctcagttctcactatcaaatagatagttaccagagggtggtcttgctgattgcagatctccaggtgggatacttgcacgggcacagaaggatacagatctattcaaacctacaatgacctttaactcattgtgtttgttcagtgtcttctatcttgaagtagataatgatcggggcctttattgcaggtcttctcatatttttggatgggcttgtcatgcggaatatgtgttgagtaaacttatccaatttacaaaatgctagtatacgaaccatgataaaattcagataattcttatttaatctgcagtgatagaagtttctgggcatgtttgggatgtgggagatttaagcagatatgggtagaactacatcactataactttcatttaatgtaacttgtttctgcttcgactgaagcttgaattgtgtgctgctggaatttctgttctgcagaccatttagctcaaataattggtagtccaacggtcactatacttgttttggtttgggatttctgtggatgcttttgtctactttatctatgttgttgtggttgcttttacatgtggttgtatggtaagtttggcaattggaaatccctgtagcgaaaaactgatatttaaaaagtcattctggttgtgttggtttcatcacttacttccagtgatttcagatctgaatgattggctaacattctgccctccatggatactgctggtgtagcagtagtgaagcaaggttcaagatctggatttatttggtactgtatatcaaatgatcatagtatgtggttgtgtcctttagaggtgcaggacattggaggtggattttcctcgctctccgattattcatctcggcgcgtttgtgttttccatttcttccttctctgtacactccatttcgacttcgagttgggtcagtttcttctctggctgatctcttctgctgctgttgcggttctgcagatccctttggggcgttccgctttcctgcgaccctgggagtgagcctgagttgtggcagggtcgttgggtttgtagtttttttttctgcaatccgtctagtttttgtgtcgatcttgtttcgtcttcgctttcttggtgcgtgggttgcaggattggatccgatctggtgctgggagttcgtcgtggtgtcgtgtggcaatctgtttgcccaagttcagaggcaggtcagtattctgttagatccaacggttcattggttttgtcgcttggacatggatttggtggtttcaggctcaattgtctgtccctggtgtggtaccatcagaatcagatagcgcagtcgtcgcttgtgcaccaggtgaatttggagaccttcgttcttatgttaacgactgatctcgcttgtggccttttggttgttttgtcctcaaacttcatcagatgcagaagggtcctttctggttatggagagatcagttgaagggtggagatttgcttatggctcacttgttgtttctcattctaatatcatcatattggtgcgaagattattagaaccagacttgctctaagcttgattggaaatgctgctggttagatctgcaggggcaacagagttttgtaaagtagattgaggctttgactcgaatggagttcgtagtatcatcgatgagatcgtttggataaatttacctatcgttcttcacattcttaaatgtctatctgctgattggaaatgttgctggttggatctgcaggggcaaccgagttttggacattcttaaatgtctatctgctgaatggagttcatagtatcggcgataagatcgtttgaattaatttacctatcactcttcatattcttagatttctatccgctgccattttaattccttatgttgggattatgttgggatggtggttttctccagcaactcgatttgtggatggatgggttggagccttggaggcgagttagatcctgcttcttcttttgctatcagaagtttggaaatgttcagagttagtttgtctggctagatacaaaatgaaaggtccttgctggttttgtcctcctagatgcggaaggaaaggtcctctggttatggagagatccgttgaagggtggaggtttgcttaaattcgttggttttgatatgttacatggctattcttatgttaatcatggtggcgtgaagattgccacccgattaattagaaacttgattgtccttgattggaaaaatgtagaggcaacagaggtgatgttttggacgtagattgaagctttgactggactaagttcatggcatgctctcttttattgttatttgagagaattaatgcttggatgttaggagtgag

SEQ ID NO: 76771 - DNA, 5045 bp, Zea Mays
gcgttctggttttcatctcttcgcgtccgtgttgctgttcaagcgcctcacctgtccccctgtcttcccctttgccccttcgtcgccgcagcacgtttgcgttttccaattcttccttgtctatactctctccgtctcgacttcgagctgggtcggtttcgacttcggctgatctgttccgctgctgttgcccttccttgttctcgcagatctccatcgggcgttccgctttcgtgcgacgcggggagcgagcctttgttcggtggcggggttgttgggtttgcggtttattttttccctgcaattcgtctagtcatcgtgtgtagttcgtctagtcatcgtgtcgatcttgtttcgtctcgccttctcatcgcgtgggttgcaggattggatccgatctggtgttgggagttcgtcatgttcgcctgaactcggaggcaggtcagtgttctgtcagatccgacggttcattggttttgtcacttggaaagcatggattcggtggtttcaggcccaatcgtctcccggtgtggtaccaccagaaattgtcacttggacatggattcggtggtttcaggtcaatcgtctcccggtgcgggtagcgtcagaaaccgatagtgcagttgtagcctgcacaccaggtggatttggagaaccttcagtacattcttatgttaacggctgatctcgcttgtggccttttggttgtttgtcctccttaaacttcagatgcaagaagggtccttgctggttatggagagatcagttgaagggtggaggtttgcttatggttcattcgtcgtttctcattctgatatcatcatattggtgcgaagattagcaccggacttactctaagcttgattggaaatgctgctggctagatctgcagaggcaacatagttttggaacaacttgattaaatggatggatgggttggaggcgagtttgatcatgcttctgcttaagcaatcagaagtttggaatagcaactggattacaacatctggattgtatatggatgcattgaagactgagttcggtcctgcttctacatgaacaataataattttggaggcattacaacagagataggacttcgcagctgaacttgtcgacgaatgattggacttcatcctatcccacattatttgatgaacgttcatgctgtttaagtgttctaagtggtaactatcaaatatatagttaccagagggcggtcttgctgattgcagatctctaggtgggatatttgcatgggcacagaaaggaacccgatcaattcaaacctacaacaacctttaactctcactgtgtttgttcagtgtgttctaccttgaagtagataatgattggggtcttcattgcagtcttctcctatttttgcatgggcttgtcatgctgcacggaatatgggctgagtactaaacttatccaatttacaaaatgctagtatatgacccatgatgaaaattcggatacttctaatttaatctgtagttgtagaaggcactgggtatgtttgggacgtgggagattcaagcagatatgggtagaactacaactttgatttaatcaatcgtgtttctgcttcatcatgctatatatgctctgactgaagctttaattcttgtgttgctatcatttctgcgttctgcagatcatttagctcaagtaattggtagtccaacggtcatgatacttgttttggtttgggattagctttatctacatttttgtgctcgcttttacatgtggttgcagggtaagtttggcaattggaaatccctgtagcgaagaactgatatttaaaactgggggcaggtcagagatcattccggttgcgttggttccatcacttgttttcagtgattttagatctgaatggttggctaacattctggcgctccaatgatatcgctggtccaatgatatcactggtgtagtagtagcaaggtttgagatgcagggaggacattggaggtggattttcctcgcactctggtttttcatctcttcgcgtcgatgttgctattcaagtgcctcgcctcgcatgtccctgtcttgccctttgtccattcgtcgcatgacgcctttgcgatttccatttcttccttctctgtactctctgttttgacttcgagctgggtcggcttctactccggttgatcttttctgctgctgttgagcttctgtgctcttccagatccccttggggcgttcagctttcgtgccacgctggagtgggcctgcgttcggtggcgggattgttgggtttgcggtttattttttccggcaattcgtctagttctcgtgtcgatcttgtttcatcttcgccttctcagcgtatgggctgcaggattggatctgatatgagttgtttgtcctccttaaacttcagatgcaaggagggtctttgctggttatgaaaagatcagttgaagggtggagatttgcagaggcaacttagttttggaagtagattgaggcattgactggagtgggagctcgtagcatcggcgagaatatcgtttggatatatttacctacctctcttcatattattaaatttctatccgctgcagttttacattggggtgatgattttctacagcaactcatggatggatgggttggaggcgagtttgatcctgcttctgcttgtgcaatcagaagtttggaattgttcagagttccttgtttttgggagagggcggttgaagggtgaagggtggagtttggttgaagggtgttcttctctagcaactggattatagcagctggtttatatacggatggattggagctaccctaccttcaacgatttgattgtaatctgcagttttggaggcatcgccacagagataggactttgcagctgaactcgtcggtgaatgattgatcggactttatcgtattccacatcaattgatgaatgttcatgctgtttaagtgttctcagttctcactatcaaatagatagttaccagagggtggtcttgctgattgcagatctccaggtcttctcatatttttggatgggcttgtcatgcggaatatgtgttgagtaaacttatccaatttacaaaatgctagtatacgaaccatgataaaattcagataattcttatttaatctgcagtgatagaagtttctgggcatgtttgggatgtgggagatttaagcagatatgggtagaactacatcactataactttcatttaatgtaacttgtttctgcttcgactgaagcttgaattgtgtgctgctggaatttctgttctgcagaccatttagctcaaataattggtagtccaacggtcactatacttgttttggtttgggatttctgtggatgcttttgtctactttatctatgttgttgtggttgcttttacatgtggttgtatggtaagtttggcaattggaaatccctgtagcgaaaaactgatatttaaaaagtcattctggttgtgttggtttcatcacttacttccagtgatttcagatctgaatgattggctaacattctgccctccatggatactgctggtgtagcagtagtgaagcaaggttcaagatctggatttatttggtactgtatatcaaatgatcatagtatgtggttgtgtcctttagaggtgcaggacattggaggtggattttcctcgctctccgattattcatctcggcgcgtttgtgttttccatttcttccttctctgtacactccatttcgacttcgagttgggtcagtttcttctctggctgatctcttctgctgctgttgcggttctgcagatccctttggggcgttccgctttcctgcgaccctgggagtgagcctgagttgtggcagggtcgttgggtttgtagtttttttttctgcaatccgtctagtttttgtgtcgatcttgtttcgtcttcgctttcttggtgcgtgggttgcaggattggatccgatctggtgctgggagttcgtcgtggtgtcgtgtggcaatctgtttgcccaagttcagaggcaggtcagtattctgttagatccaacggttcattggttttgtcgcttggacatggatttggtggtttcaggctcaattgtctgtccctggtgtggtaccatcagaatcagatagcgcagtcgtcgcttgtgcaccaggtgaatttggagaccttcgttcttatgttaacgactgatctcgcttgtggccttttggttgttttgtcctcaaacttcatcagatgcagaagggtcctttctggttatggagagatcagttgaagggtggagatttgcttatggctcacttgttgtttctcattctaatatcatcatattggtgcgaagattattagaaccagacttgctctaagcttgattggaaatgctgctggttagatctgcaggggcaacagagttttgtaaagtagattgaggctttgactcgaatggagttcgtagtatcatcgatgagatcgtttggataaatttacctatcgttcttcacattcttaaatgtctatctgctgattggaaatgttgctggttggatctgcaggggcaaccgagttttggacattcttaaatgtctatctgctgaatggagttcatagtatcggcgataagatcgtttgaattaatttacctatcactcttcatattcttagatttctatccgctgccattttaattccttatgttgggattatgttgggatggtggttttctccagcaactcgatttgtggatggatgggttggagccttggaggcgagttagatcctgcttcttcttttgctatcagaagtttggaaatgttcagagttagtttgtctggctagatacaaaatgaaaggtccttgctggttttgtcctcctagatgcggaaggaaaggtcctctggttatggagagatccgttgaagggtggagaggcaacagaggtgatgttttggacgtagattgaagctttgactggactaagttcatggcatgctctcttttattgttatttgagagaattaatgcttggatgttaggagtgag

SEQ ID NO: 76772 - DNA, 4195 bp, Zea Mays
gcgttctggttttcatctcttcgcgtccgtgttgctgttcaagcgcctcacctgtccccctgtcttcccctttgccccttcgtcgccgcagcacgtttgcgttttccaattcttccttgtctatactctctccgtctcgacttcgagctgggtcggtttcgacttcggctgatctgttccgctgctgttgcccttccttgttctcgcagatctccatcgggcgttccgctttcgtgcgacgcggggagcgagcctttgttcggtggcggggttgttgggtttgcggtttattttttccctgcaattcgtctagtcatcgtgtgtagttcgtctagtcatcgtgtcgatcttgtttcgtctcgccttctcatcgcgtgggttgcaggattggatccgatctggtgttgggagttcgtcatgttcgcctgaactcggaggcaggtcagtgttctgtcagatccgacggttcattggttttgtcacttggaaagcatggattcggtggtttcaggcccaatcgtctcccggtgtggtaccaccagaaattgtcacttggacatggattcggtggtttcaggtcaatcgtctcccggtgcgggtagcgtcagaaaccgatagtgcagttgtagcctgcacaccaggtggatttggagaaccttcagtacattcttatgttaacggctgatctcgcttgtggccttttggttgtttgtcctccttaaacttcagatgcaagaagggtccttgctggttatggagagatcagttgaagggtggaggtttgcttatggttcattcgtcgtttctcattctgatatcatcatattggtgcgaagattagcaccggacttactctaagcttgattggaaatgctgctggctagatctgcagaggcaacatagttttggaagtaggttgaggcgttgactggactggagttcgtagtattggagagaagatcgtttggatatatttacctatcgccgttcatattattaattttctatccgttgcaattttaatttcttacattggggtgatggttttctccagcaacttgattaaatggatggatgggttggaggcgagtttgatcatgcttctgcttaagcaatcagaagtttggaataggtcagagttccttgtgtttgttcactaaccatcctcctgtagatgttcttctaaaattaactacacacataagctcccttcaatgcttcgttactgaatctgcagttttgggatatatcaattcagagttagctgaggtttgcttacattccttggttttgatctgatatatatggctatttttatattgatcatggtggcgtgaagattgccactggactaattaggagcttgattgtccttaattggaaaaatgttgtagaggcaactgaggtgatgttttggacgtaggttgaagctttgacctgactaagttcatgacatgccgataacattgttgggatatattgtcggaagattagcaccgaacttactttaagcttcgttggaaatgctgcctctagatctgcagaggcaacttaatattggaaataaattggggcgttgactgcactgcaattcgtagtattggcgagaagatcattaaatggatggatgggttggaggcgagtttgatcctgcttctgcttgtgcaatcagaagtttggaattgttcagagttccttgtttttgggagagggcggttgaagggtgaagggtggagtttggttgaagggtgttcttctctagcaactggattatagcagctggtttatatacggatggattggagtcagttcgattctgcttattcggggctccctttttttgttcaaaaaaccatcctaacctgtggaaatttattttactcgtaggctaccctaccttcaacgatttgattgtaatctgcagttttggaggcatcgccacagagataggactttgcagctgaactcgtcggtgaatgattgatcggactttatcgtattccacatcaattgatgaatgttcatgctgtttaagtgttctcagttctcactatcaaatagatagttaccagagggtggtcttgctgattgcagatctccaggtgggatacttgcacgggcacagaaggatacagatctattcaaacctacaatgacctttaactcattgtgtttgttcagtgtcttctatcttgaagtagataatgatcggggcctttattgcaggtcttctcatatttttggatgggcttgtcatgcggaatatgtgttgagtaaacttatccaatttacaaaatgctagtatacgaaccatgataaaattcagataattcttatttaatctgcagtgatagaagtttctgggcatgtttgggatgtgggagatttaagcagatatgggtagaactacatcactataactttcatttaatgtaacttgtttctgcttcgactgaagcttgaattgtgtgctgctggaatttctgttctgcagaccatttagctcaaataattggtagtccaacggtcactatacttgttttggtttgggatttctgtggatgcttttgtctactttatctatgttgttgtggttgcttttacatgtggttgtatggtaagtttggcaattggaaatccctgtagcgaaaaactgatatttaaaaagtcattctggttgtgttggtttcatcacttacttccagtgatttcagatctgaatgattggctaacattctgccctccatggatactgctggtgtagcagtagtgaagcaaggttcaagatctggatttatttggtactgtatatcaaatgatcatagtatgtggttgtgtcctttagaggtgcaggacattggaggtggattttcctcgctctccgattattcatctcggcgcgtttgtgttttccatttcttccttctctgtacactccatttcgacttcgagttgggtcagtttcttctctggctgatctcttctgctgctgttgcggttctgcagatccctttggggcgttccgctttcctgcgaccctgggagtgagcctgagttgtggcagggtcgttgggtttgtagtttttttttctgcaatccgtctagtttttgtgtcgatcttgtttcgtcttcgctttcttggtgcgtgggttgcaggattggatccgatctggtgctgggagttcgtcgtggtgtcgtgtggcaatctgtttgcccaagttcagaggcaggtcagtattctgttagatccaacggttcattggttttgtcgcttggacatggatttggtggtttcaggctcaattgtctgtccctggtgtggtaccatcagaatcagatagcgcagtcgtcgcttgtgcaccaggtgaatttggagaccttcgttcttatgttaacgactgatctcgcttgtggccttttggttgttttgtcctcaaacttcatcagatgcagaagggtcctttctggttatggagagatcagttgaagggtggagatttgcttatggctcacttgttgtttctcattctaatatcatcatattggtgcgaagattattagaaccagacttgctctaagcttgattggaaatgctgctggttagatctgcaggggcaacagagttttgtaaagtagattgaggctttgactcgaatggagttcgtagtatcatcgatgagatcgtttggataaatttacctatcgttcttcacattcttaaatgtctatctgctgattggaaatgttgctggttggatctgcaggggcaaccgagttttggacattcttaaatgtctatctgctgaatggagttcatagtatcggcgataagatcgtttgaattaatttacctatcactcttcatattcttagatttctatccgctgccattttaattccttatgttgggattatgttgggatggtggttttctccagcaactcgatttgtggatggatgggttggagccttggagagtttgtctggctagatacaaaatgaaaggtccttgctggttttgtcctcctagatgcggaaggaaaggtcctctggttatggagagatccgttgaagggtggagaggcaacagaggtgatgttttggacgtagattgaagctttgactggactaagttcatggcatgctctcttttattgttatttgagagaattaatgcttggatgttaggagtgag

SEQ ID NO: 76773 - DNA, 8470 bp, Zea Mays
cataaatagggcctacccgactactccttcccctcgcgctctgccctttgcgccttcgtcaccgcgacgcgcttgcgttttccaatccttgtcttatactccgtttcgacttcgagctgggtcgatttcttcttcagctgattccttgttctcgcagatctccatcgggcgttccgctttcgtgcgacgcggggagcgagcctgtgttcggtggcggggttattgagtttgccgtttatttttttcctgcaattcgtctagttatcgtgtgcaattcgtctagtcatcgtgtcgatcttgtttcgtctcgcctcctcagcgtgtgggttgcaggattggatccgatctggtgtggggagttcgtcatgttcgcctggactcggaggcaggtcagtattctgtcagatccaacggttcattggttgtcacttggacatggattcggtggtttcaggcccaatcatctcccggtggggtaccaccagaaattgtcacttggacatggatttgaagatttcaggcttaatcgtctcccggtgcggtagcatcagaaaccgataatgcagttatagcctgcacaccaggtggatttggagaaccttcggtccgttcttatgttaacggctgatctcgcttctggtcttttggttgtttgtcctccttaaacttcagatgcatgaagggtccttgctggttatggagagatcatttgaagggtggaggtttgctattatggttcattcgccgtttctcattcctattcatcatattgtcggaagattagcaccgaacttactctaagcttcgttggaaatgctgcctctagatctgcagaggcaacctaatattggaaatagattggggcgttgattggactgcaattcgtagtattggcgagaagatcgtttggatatatttacctatcgcccatcatattattaaatttctatccgttgcagttttaatttcttacattggggtgatggttttctccagcaactcgattaaatggatggattggtggaggcgagtttgatcctgcttctgcttgtgtaatcagtagttcggaattgttcagagttccttgtgtttgttcactaaccatccttctgtcaatgttcttcgaaaactaacttcacacataggctccctttaatgtttcgttagtgtatctgcagttttgggagacatcactacagagttcatccccctaaatgcataatggaagtccttgctggtattgtcctcctagatgcaaaaggaaagatcccttggttatgaatagatcggttgaagggtccttgctggtttgtcctagatgcaaaaggaagatcccttggttatggatagatcggttgaagggtggaggtttgcttacgttccttggttttggtctgatatatggctatttttatgtcaatcacggtggcgtgaagatcgccaccggactaattagaagcttggttgtccttaattggaataatgtagaggcaactgaggtgatgttttggacgtagattgaagctttgaccggactaagttcatgtcatgcagataacatcgttgggatatatgtatctctcactcttctattggcactcttaaatttcttatttcttatatttcggctgatgtttttctccagcaactggattacaacatctggattgtatatggatggattggagcctgagtttggttctgcttctgcatgagcaataataagttctgaactattcaggggtccctttttgttcaaagaacaattctatcctgtcaaatgttagttcactcaggctacctaatgatcggactttatcctatcccacattatttgatgaacgttcatgctgtttgagtgttctaagttctcactaccaaatagatagttaccagagggtggtcctgctgattgcagatctctaggtgggatatttgcatgggcacagaaggaaccagatctattcaaacctacaacgaactttaactctcattgtgtttgttcagtggttctaccttgaagtagataaacttatccaatttacaaaatgctagtatatgaaccatgatgaaaatttggatacttctattttaatctgcacttctgcagtggtagaaggcactggatatgtttgggacgtaggagattcaagctgatatgggtagaactacaacttcgatttaatcgaacttgtttctgctttatcatgctatatgcattaactgaagctttaattcttgtgctgctgtcatttctgtgttctgcagatcatttagctcaagtaattggtagtccaacggtcatgatacttgttttggtttgggattagctttatctacatttttgtcctcgcttttacatgtgtttgcagggtaagtttggcaattggaaatccctgtagcgaagaactgatatttaaaactggggcaggttagaaatcattccggttgtgttggttccatcacttgttttcagtgatttcatatctgaatgattggctaacattctgactctccaatgatatcgctggaacagtagtagtagtattagcagcaaggttcgagatgcggacattggaggtggattttccttgcactctggtttttcttctcttcgtgtcggtgttgctattcaagcaccttgcctgtcccgtcttgccctttgtcacttcgtcactggcgtgtttgcgttttccatttcttccttctctgtactctctgtttcgacttcgagctgggatggtttcttctccggctgatctgttctgctgctgttgcggttacgtgctcttgcagatccccttggggcattctgctttcgtgccacgcgggagtgggcctgtgtttggtggcgggattgttggatttgcggtttatttttaaggcaaatcgtctagttatcgtcgatcttgtttcgtcttcgccttctcagcatgtcggttgcaggattggatctgatctgagttcgtcatgacgttgtgtggcgatctgtttgtctgagttcggagataggttagtattctgtcagatccaatggttcattggttttgtcacttggacatggattcggtggtttcaggctcaattgttcatctcctgttgtggtaccatcagaaaccgatagtgcagttgtagcctgcataccagatgcaaggagggtccttgctggttatggaaagatcagttgaatggtggaggtttgcttatggttcattcgtcgtttctcattctgatatcatcatattggtgcaaagattagcaccagacttgctctaagcttgattggaaatgctgctggctagatctgcagaggcaacataattttggaggtagattgaggcgttgactggagtggagtttgtagcatcggcgaggatatcagttggatatatttacctatcgctcttcatattattaaatttctatctgctgcaattttaatttcttacattggggtgatggttttctccagcaactcgattatatggatggatgggttggaggcgagttttgatcctgcttgtgcaatcagaagttcggaattgttcagagttccttatgtttgttcactaaccatcctgctgtcgatgttctttgaaaatcaacttcacacacaggctcccttaatgctttgttagtgaatctgcggttttgggagaggttgaagggtggaggtttgcttacatccgttggttttgaaatgttttatggctatttttatgtcaatcatggtgccgtgaagattgccacggactaattagaagcttgattgtccttaattgaaaaaatgctgtagagggctaaaggtaacagaggtgatgttttggacgtagattgaagctttgactggactaagttcatggcatgccgataacatcatttggatatatgtatctcactttttattggtactcaaatttcttgtttcttatattcgggctggtgtttttttccagcaactgcattgtatatggatagaagtcttctcatattcttggatgggcttgtcactcggaatgtgttgagtaaacttatccaatttataaaatgctagtatatgaaccatgataaaatttagataattcttatttaatctgcagtgatagaaggcactgtgcaagtttgggatgtggtgggagatttaagcagatatgggtagaattacagcactaactttcatttaatcaaacttgtttctgctttatcattctatatgcttcaactgaagctttaactcttgtgctgctggaatttctgtgttctgcagatcatttagctcaaataattggtagtgggtcacgatacttgttttggtttgggatttctatggatgcttttgtctagcttatctatgttgttgtggttgcttttacatgtggttgtagggtaagtttggcaattaaaaatcctgtatttaaaactggggacaggtcagaatgtcattccggttgtgttgatgcaaaatgaaaggtgggctggttttgtcctcctagatgcggaaggaaaggtctgctggttatggagagatcggttgaagggtggagatttgtttacgttcgttggttttgatttgttacatggatattcttatgtcaatcatgggggtgtgaagatagccacctgattaattagaagcttgatgattgtccttgattggaaaaatgatgtagaggcaacataggtgatgttttggacgtagattgaagctttgactgaactaacttcatggcatgctctcttttattggtactcttaaatttcttgtttcttatttctgggcgggtgttcttctccagcaactggattacagcaactggattgcatatggatggatttggggcctgatttggattctgcttctgcgtcagcaataataattctgaactattcagggttccctgtgtttgttcaataactaacctaccctgtcaaatgttctttgaaaatttagttccctcataaactatctactcttcttgttttttatatttgggctggtgtttctctccaacaactggagttacaacatctggattgtatatgaatggattggagcctgagctcgattctgcttttgcatgagcaataataataagttctaaactattcagggttcaaaaaaaatcatcctatcctgtcaaatgttctttgaaatttagttcactcgtaggctaccttcaaagatatgattgtaatctgcagttttggaggcatcgcaatggagataggactttgcagttgaacttggcggcaaatgatcggacttcgtatcccacattatttgatgaatgttcatgttgtttaagtgttctcggttctcactatcaaattgatagttaccagagggggtggtcttgctgattgcagatctctaggtgggatacttgcatgggcaccgaaagatccagatctattcaaacctacaacaacctttagctcattgtgtttgttcagtgtcttctacctggaagtagataatgattggggtcattgttgcaggtcttctcatatttttgcatgggcttgttacacggaatatgtgttgggagtactaaacttatctaatttacaaaatgcaatgctagtatatgaaccatgatgaaaattcggttacttctaatttaatctgtagtggtagaaggcactggacatgtttgggacttgggagattcaagcagagatgggtagaactacaacactacaacttccattcaatcaaactgtttctgctttatcatgctatatgcttctgtggaagctttaaattcttgtgctgcaggtcatttagctcaagtaattgatagtccaacggtcatgatatttggtttgggattcctgtggatgctttcgtctggctttagctatgtttttctggttgcttttacatgtggttgcagaataattttggcaattggaaatccatgtatcaaacaactgatattcgaaactgggggcaggtcagagataattccggttgtgttggtttcgtcacttgtgttatcagtgatttaagatctgactggttggctaacattctggctctccatggatattgctgatgtagtgatgtagtaaagcaaggtttttgatacctgggtttattcgtatatcaaatgatcgtagtgtgtgttttgtgtcatttagggatgcaggctgacattggaggcggattttcctcaattggagatataacaatttggaaataaattgtgacacttgacctctcacttataacttctgtctttggcctgtaatcacttgttatgtttccagccactttaactatagcatacggcattgacgcctaggagttcttttgtgctacaacaatctaaattacaaggatgcttctaattcttcatttctgtcaacagtcctatccagttactttcttcaaccagtaactctctgtgctgcaacaatctaaattacaaggattcttctaattcttcatttctgctgccaacagtcgtatccagttacttccttcaacctgttactcttcaagtttgtgcagatgtgacacacagaagctgagatagaatttccaaccatctatgccgtcttcaaagcccatcactgttccactggccatttatttgatttgccttggatttgaaggttttttaaggctatcactgaaccaaaatagacaaaccatagatggtctctttggaaaatgtagatttagcacttgaaattttaaagttcagtctgatcctgatcataatatgtgcctatcttccgaattctactacctccaattttgctagccagagaactttcagatagtgtgcattgaagttcaagcttgattacttgtactgatctgctgtttcggatgctttggatgctccatgctagttatataatccacatgatcacaaccaagacgatacattgttcagagattgcactaactactgttcctgaatattgactgcatatcactttccatttcacttgtgatttggattgttggtggtttgcttggtttccagttatttgaaagcattaatgcttggatgttaggagtgatgaggcactcattacgatactcttcaatctaaccatttatattggatccacttggagctaaggttaggttactcctttgcactacctttattttgaagctgtccttgttaatctgcatgcctcatctgatggctcaggtccactatttgcgccgatatccagcaagaactctttcttgacaatacataacttcattgtgcaaaattggtttgttactgaaattgtaggttctttacttgagcatatgtggtcatcgtatactttttggtccaattacccaaattttctgttaggacccctactaatgtttaatctagtttctggttcgcttctaattttacttccatctgttatgtattgtttatgtcttgactttcatctggtgcatcttatctgttgtggatcaaaactaagaaaaaggatgttgctgcttctgtgcatgccaaaagaaaatctctctgaacaaacttgtcttctatgtgcttattgtttgaccatttctatcgtggactagcagtagtgccttatgatgtccatgttggcgctaagaaatgtattgcggtcagttttttgtgatatgctggatgtcttaactgtacataagattgcacgagtgtacactggctgttttttagctgtccacttgcttatcttttttttcaaattatgtctgggagcacgatcttctttgtgtgtaattgtttgtgtttcctgatttgttgtttgtttgcggtttaacactgcctttgccggtcccaagcccggatgagaaaatgtggagggaactgcagggtttcttcttagtcccatgaatggtatcagggtactgggaagaaatgttgtttggtcaaaacagctggactctgagagctcagacgggcgtaacctaaccatcaagcgcaagcggcagtacggtcacgtctccagacgggcgttacctaaccatcaactgcaagctggtagcctggtagtaatactggttcacggctgcctgcatgcaagttcttttttcccctgttgaacaagtttatttatctcattacccgctgaagaactcaacgcacagcaagctacagctacctgaagccgtttggttaatcatcgaaacaatggatacctctaatcttcttcaaagtaagccatgtacaaaagggacttaggtccttccctgggagatgtctgtaccgatggactagcttgactttagtgatgtagctgttacctggtcttaatttgttcttgtccttccgttcttgtttccatgttgatttctgttccccactcgctcctcgcagcccatttgaagttcgtcagacttacgcacagcagagagcagacacaaacttggacgagaatcggccactgcttgccatgcgaccctgagcgcagcatgcccaattcggggattctaaccgaggtcgagctagtaaac

SEQ ID NO: 76774 - DNA, 8138 bp, Zea Mays
cataaatagggcctacccgactactccttcccctcgcgctctgccctttgcgccttcgtcaccgcgacgcgcttgcgttttccaatccttgtcttatactccgtttcgacttcgagctgggtcgatttcttcttcagctgattccttgttctcgcagatctccatcgggcgttccgctttcgtgcgacgcggggagcgagcctgtgttcggtggcggggttattgagtttgccgtttatttttttcctgcaattcgtctagttatcgtgtgcaattcgtctagtcatcgtgtcgatcttgtttcgtctcgcctcctcagcgtgtgggttgcaggattggatccgatctggtgtggggagttcgtcatgttcgcctggactcggaggcaggtcagtattctgtcagatccaacggttcattggttgtcacttggacatggattcggtggtttcaggcccaatcatctcccggtggggtaccaccagaaattgtcacttggacatggatttgaagatttcaggcttaatcgtctcccggtgcggtagcatcagaaaccgataatgcagttatagcctgcacaccaggtggatttggagaaccttcggtccgttcttatgttaacggctgatctcgcttctggtcttttggttgtttgtcctccttaaacttcagatgcatgaagggtccttgctggttatggagagatcatttgaagggtggaggtttgctattatggttcattcgccgtttctcattcctattcatcatattgtcggaagattagcaccgaacttactctaagcttcgttggaaatgctgcctctagatctgcagaggcaacctaatattggaaatagattggggcgttgattggactgcaattcgtagtattggcgagaagatcgtttggatatatttacctatcgcccatcatattattaaatttctatccgttgcagttttaatttcttacattggggtgatggttttctccagcaactcgattaaatggatggattggtggaggcgagtttgatcctgcttctgcttgtgtaatcagtagttcggaattgttcagagttccttgtgtttgttcactaaccatccttctgtcaatgttcttcgaaaactaacttcacacataggctccctttaatgtttcgttagtgtatctgcagttttgggagacatcactacagagttcatccccctaaatgcataatggaagtccttgctggtattgtcctcctagatgcaaaaggaaagatcccttggttatgaatagatcggttgaagggtggaggtttgcttatgttccttggttttgatctgctatatggctatttttatgttagcaagtttgatccagcttctgcttgtgcaatcagaacttctgaattgtttagagttccttgtgtttgttcactaaccatcctcctgtcgatgttctttgaaaattaacttcacacataggctcccttaatgcttcgttagtgtctgcagttttgggagatgccactccagagttggtccccctagatgcaaaatggaaggtccttgctggtttgtcctagatgcaaaaggaagatcccttggttatggatagatcggttgaagggtggaggtttgcttacgttccttggttttggtctgatatatggctatttttatgtcaatcacggtggcgtgaagatcgccaccggactaattagaagcttggttgtccttaattggaataatgtagaggcaactgaggtgatgttttggacgtagattgaagctttgaccggactaagttcatgtcatgcagataacatcgttgggatatatgtatctctcactcttctattggcactcttaaatttcttatttcttatatttcggctgatgtttttctccagcaactggattacaacatctggattgtatatggatggattggagcctgagtttggttctgcttctgcatgagcaataataagttctgaactattcaggggtccctttttgttcaaagaacaattctatcctgtcaaatagggtaagtttggcaattggaaatccctgtagcgaagaactgatatttaaaactggggcaggttagaaatcattccggttgtgttggttccatcacttgttttcagtgatttcatatctgaatgattggctaacattctgactctccaatgatatcgctggaacagtagtagtagtattagcagcaaggttcgagatgcggacattggaggtggattttccttgcactctggtttttcttctcttcgtgtcggtgttgctattcaagcaccttgcctgtcccgtcttgccctttgtcacttcgtcactggcgtgtttgcgttttccatttcttccttctctgtactctctgtttcgacttcgagctgggatggtttcttctccggctgatctgttctgctgctgttgcggttacgtgctcttgcagatccccttggggcattctgctttcgtgccacgcgggagtgggcctgtgtttggtggcgggattgttggatttgcggtttatttttaaggcaaatcgtctagttatcgtcgatcttgtttcgtcttcgccttctcagcatgtcggttgcaggattggatctgatctgagttcgtcatgacgttgtgtggcgatctgtttgtctgagttcggagataggttagtattctgtcagatccaatggttcattggttttgtcacttggacatggattcggtggtttcaggctcaattgttcatctcctgttgtggtaccatcagaaaccgatagtgcagttgtagcctgcataccagatgcaaggagggtccttgctggttatggaaagatcagttgaatggtggaggtttgcttatggttcattcgtcgtttctcattctgatatcatcatattggtgcaaagattagcaccagacttgctctaagcttgattggaaatgctgctggctagatctgcagaggcaacataattttggaggtagattgaggcgttgactggagtggagtttgtagcatcggcgaggatatcagttggatatatttacctatcgctcttcatattattaaatttctatctgctgcaattttaatttcttacattggggtgatggttttctccagcaactcgattatatggatggatgggttggaggcgagttttgatcctgcttgtgcaatcagaagttcggaattgttcagagttccttatgtttgttcactaaccatcctgctgtcgatgttctttgaaaatcaacttcacacacaggctcccttaatgctttgttagtgaatctgcggttttgggagaggttgaagggtggaggtttgcttacatccgttggttttgaaatgttttatggctatttttatgtcaatcatggtgccgtgaagattgccacggactaattagaagcttgattgtccttaattgaaaaaatgctgtagagggctaaaggtaacagaggtgatgttttggacgtagattgaagctttgactggactaagttcatggcatgccgataacatcatttggatatatgtatctcactttttattggtactcaaatttcttgtttcttatattcgggctggtgtttttttccagcaactgcattgtatatggatagaagtcttctcatattcttggatgggcttgtcactcggaatgtgttgagtaaacttatccaatttataaaatgctagtatatgaaccatgataaaatttagataattcttatttaatctgcagtgatagaaggcactgtgcaagtttgggatgtggtgggagatttaagcagatatgggtagaattacagcactaactttcatttaatcaaacttgtttctgctttatcattctatatgcttcaactgaagctttaactcttgtgctgctggaatttctgtgttctgcagatcatttagctcaaataattggtagtgggtcacgatacttgttttggtttgggatttctatggatgcttttgtctagcttatctatgttgttgtggttgcttttacatgtggttgtagggtaagtttggcaattaaaaatcctgtatttaaaactggggacaggtcagaatgtcattccggttgtgttgatgcaaaatgaaaggtgggctggttttgtcctcctagatgcggaaggaaaggtctgctggttatggagagatcggttgaagggtggagatttgtttacgttcgttggttttgatttgttacatggatattcttatgtcaatcatgggggtgtgaagatagccacctgattaattagaagcttgatgattgtccttgattggaaaaatgatgtagaggcaacataggtgatgttttggacgtagattgaagctttgactgaactaacttcatggcatgctctcttttattggtactcttaaatttcttgtttcttatttctgggcgggtgttcttctccagcaactggattacagcaactggattgcatatggatggatttggggcctgatttggattctgcttctgcgtcagcaataataattctgaactattcagggttccctgtgtttgttcaataactaacctaccctgtcaaatgttctttgaaaatttagttccctcataaactatctactcttcttgttttttatatttgggctggtgtttctctccaacaactggagttacaacatctggattgtatatgaatggattggagcctgagctcgattctgcttttgcatgagcaataataataagttctaaactattcagggttcaaaaaaaatcatcctatcctgtcaaatgttctttgaaatttagttcactcgtaggctaccttcaaagatatgattgtaatctgcagttttggaggcatcgcaatggagataggactttgcagttgaacttggcggcaaatgatcggacttcgtatcccacattatttgatgaatgttcatgttgtttaagtgttctcggttctcactatcaaattgatagttaccagagggggtggtcttgctgattgcagatctctaggtgggatacttgcatgggcaccgaaagatccagatctattcaaacctacaacaacctttagctcattgtgtttgttcagtgtcttctacctggaagtagataatgattggggtcattgttgcaggtcttctcatatttttgcatgggcttgttacacggaatatgtgttgggagtactaaacttatctaatttacaaaatgcaatgctagtatatgaaccatgatgaaaattcggttacttctaatttaatctgtagtggtagaaggcactggacatgtttgggacttgggagattcaagcagagatgggtagaactacaacactacaacttccattcaatcaaactgtttctgctttatcatgctatatgcttctgtggaagctttaaattcttgtgctgcaggtcatttagctcaagtaattgatagtccaacggtcatgatatttggtttgggattcctgtggatgctttcgtctggctttagctatgtttttctggttgcttttacatgtggttgcagaataattttggcaattggaaatccatgtatcaaacaactgatattcgaaactgggggcaggtcagagataattccggttgtgttggtttcgtcacttgtgttatcagtgatttaagatctgactggttggctaacattctggctctccatggatattgctgatgtagtgatgtagtaaagcaaggtttttgatacctgggtttattcgtatatcaaatgatcgtagtgtgtgttttgtgtcatttagggatgcaggctgacattggaggcggattttcctcaattggagatataacaatttggaaataaattgtgacacttgacctctcacttataacttctgtctttggcctgtaatcacttgttatgtttccagccactttaactatagcatacggcattgacgcctaggagttcttttgtgctacaacaatctaaattacaaggatgcttctaattcttcatttctgtcaacagtcctatccagttactttcttcaaccagtaactctctgtgctgcaacaatctaaattacaaggattcttctaattcttcatttctgctgccaacagtcgtatccagttacttccttcaacctgttactcttcaagtttgtgcagatgtgacacacagaagctgagatagaatttccaaccatctatgccgtcttcaaagcccatcactgttccactggccatttatttgatttgccttggatttgaaggttttttaaggctatcactgaaccaaaatagacaaaccatagatggtctctttggaaaatgtagatttagcacttgaaattttaaagttcagtctgatcctgatcataatatgtgcctatcttccgaattctactacctccaattttgctagccagagaactttcagatagtgtgcattgaagttcaagcttgattacttgtactgatctgctgtttcggatgctttggatgctccatgctagttatataatccacatgatcacaaccaagacgatacattgttcagagattgcactaactactgttcctgaatattgactgcatatcactttccatttcacttgtgatttggattgttggtggtttgcttggtttccagttatttgaaagcattaatgcttggatgttaggagtgatgaggcactcattacgatactcttcaatctaaccatttatattggatccacttggagctaaggttaggttactcctttgcactacctttattttgaagctgtccttgttaatctgcatgcctcatctgatggctcaggtccactatttgcgccgatatccagcaagaactctttcttgacaatacataacttcattgtgcaaaattggtttgttactgaaattgtaggttctttacttgagcatatgtggtcatcgtatactttttggtccaattacccaaattttctgttaggacccctactaatgtttaatctagtttctggttcgcttctaattttacttccatctgttatgtattgtttatgtcttgactttcatctggtgcatcttatctgttgtggatcaaaactaagaaaaaggatgttgctgcttctgtgcatgccaaaagaaaatctctctgaacaaacttgtcttctatgtgcttattgtttgaccatttctatcgtggactagcagtagtgccttatgatgtccatgttggcgctaagaaatgtattgcggtcagttttttgtgatatgctggatgtcttaactgtacataagattgcacgagtgtacactggctgttttttagctgtccacttgcttatcttttttttcaaattatgtctgggagcacgatcttctttgtgtgtaattgtttgtgtttcctgatttgttgtttgtttgcggtttaacactgcctttgccggtcccaagcccggatgagaaaatgtggagggaactgcagggtttcttcttagtcccatgaatggtatcagggtactgggaagaaatgttgtttggtcaaaacagctggactctgagagctcagacgggcgtaacctaaccatcaagcgcaagcggcagtacggtcacgtctccagacgggcgttacctaaccatcaactgcaagctggtagcctggtagtaatactggttcacggctgcctgcatgcaagttcttttttcccctgttgaacaagtttatttatctcattacccgctgaagaactcaacgcacagcaagctacagctacctgaagccgtttggttaatcatcgaaacaatggatacctctaatcttcttcaaagtaagccatgtacaaaagggacttaggtccttccctgggagatgtctgtaccgatggactagcttgactttagtgatgtagctgttacctggtcttaatttgttcttgtccttccgttcttgtttccatgttgatttctgttccccactcgctcctcgcagcccatttgaagttcgtcagacttacgcacagcagagagcagacacaaacttggacgagaatcggccactgcttgccatgcgaccctgagcgcagcatgcccaattcggggattctaaccgaggtcgagctagtaaac

SEQ ID NO: 76775 - DNA, 8449 bp, Zea Mays
cataaatagggcctacccgactactccttcccctcgcgctctgccctttgcgccttcgtcaccgcgacgcgcttgcgttttccaatccttgtcttatactccgtttcgacttcgagctgggtcgatttcttcttcagctgattccttgttctcgcagatctccatcgggcgttccgctttcgtgcgacgcggggagcgagcctgtgttcggtggcggggttattgagtttgccgtttatttttttcctgcaattcgtctagttatcgtgtgcaattcgtctagtcatcgtgtcgatcttgtttcgtctcgcctcctcagcgtgtgggttgcaggattggatccgatctggtgtggggagttcgtcatgttcgcctggactcggaggcaggtcagtattctgtcagatccaacggttcattggttgtcacttggacatggattcggtggtttcaggcccaatcatctcccggtggggtaccaccagaaattgtcacttggacatggatttgaagatttcaggcttaatcgtctcccggtgcggtagcatcagaaaccgataatgcagttatagcctgcacaccaggtggatttggagaaccttcggtccgttcttatgttaacggctgatctcgcttctggtcttttggttgtttgtcctccttaaacttcagatgcatgaagggtccttgctggttatggagagatcatttgaagggtggaggtttgctattatggttcattcgccgtttctcattcctattcatcatattgtcggaagattagcaccgaacttactctaagcttcgttggaaatgctgcctctagatctgcagaggcaacctaatattggaaatagattggggcgttgattggactgcaattcgtagtattggcgagaagatcgtttggatatatttacctatcgcccatcatattattaaatttctatccgttgcagttttaatttcttacattggggtgatggttttctccagcaactcgattaaatggatggattggtggaggcgagtttgatcctgcttctgcttgtgtaatcagtagttcggaattgttcagagttccttgtgtttgttcactaaccatccttctgtcaatgttcttcgaaaactaacttcacacataggctccctttaatgtttcgttagtgtatctgcagttttgggagacatcactacagagttcatccccctaaatgcataatggaagtccttgctggtattgtcctcctagatgcaaaaggaaagatcccttggttatgaatagatcggttgaagggtggaggtttgcttatgttccttggttttgatctgctatatggctatttttatgttagcaagtttgatccagcttctgcttgtgcaatcagaacttctgaattgtttagagttccttgtgtttgttcactaaccatcctcctgtcgatgttctttgaaaattaacttcacacataggctcccttaatgcttcgttagtgtctgcagttttgggagatgccactccagagttggtccccctagatgcaaaatggaaggtccttgctggtttgtcctagatgcaaaaggaagatcccttggttatggatagatcggttgaagggtggagcaactggattacaacatctggattgtatatggatggattggagcctgagtttggttctgcttctgcatgagcaataataagttctgaactattcaggggtccctttttgttcaaagaacaattctatcctgtcaaatgttagttcactcaggctacctaatgatcggactttatcctatcccacattatttgatgaacgttcatgctgtttgagtgttctaagttctcactaccaaatagatagttaccagagggtggtcctgctgattgcagatctctaggtgggatatttgcatgggcacagaaggaaccagatctattcaaacctacaacgaactttaactctcattgtgtttgttcagtggttctaccttgaagtagataaacttatccaatttacaaaatgctagtatatgaaccatgatgaaaatttggatacttctattttaatctgcacttctgcagtggtagaaggcactggatatgtttgggacgtaggagattcaagctgatatgggtagaactacaacttcgatttaatcgaacttgtttctgctttatcatgctatatgcattaactgaagctttaattcttgtgctgctgtcatttctgtgttctgcagatcatttagctcaagtaattggtagtccaacggtcatgatacttgttttggtttgggattagctttatctacatttttgtcctcgcttttacatgtgtttgcagggtaagtttggcaattggaaatccctgtagcgaagaactgatatttaaaactggggcaggttagaaatcattccggttgtgttggttccatcacttgttttcagtgatttcatatctgaatgattggctaacattctgactctccaatgatatcgctggaacagtagtagtagtattagcagcaaggttcgagatgcggacattggaggtggattttccttgcactctggtttttcttctcttcgtgtcggtgttgctattcaagcaccttgcctgtcccgtcttgccctttgtcacttcgtcactggcgtgtttgcgttttccatttcttccttctctgtactctctgtttcgacttcgagctgggatggtttcttctccggctgatctgttctgctgctgttgcggttacgtgctcttgcagatccccttggggcattctgctttcgtgccacgcgggagtgggcctgtgtttggtggcgggattgttggatttgcggtttatttttaaggcaaatcgtctagttatcgtcgatcttgtttcgtcttcgccttctcagcatgtcggttgcaggattggatctgatctgagttcgtcatgacgttgtgtggcgatctgtttgtctgagttcggagataggttagtattctgtcagatccaatggttcattggttttgtcacttggacatggattcggtggtttcaggctcaattgttcatctcctgttgtggtaccatcagaaaccgatagtgcagttgtagcctgcataccagatgcaaggagggtccttgctggttatggaaagatcagttgaatggtggaggtttgcttatggttcattcgtcgtttctcattctgatatcatcatattggtgcaaagattagcaccagacttgctctaagcttgattggaaatgctgctggctagatctgcagaggcaacataattttggaggtagattgaggcgttgactggagtggagtttgtagcatcggcgaggatatcagttggatatatttacctatcgctcttcatattattaaatttctatctgctgcaattttaatttcttacattggggtgatggttttctccagcaactcgattatatggatggatgggttggaggcgagttttgatcctgcttgtgcaatcagaagttcggaattgttcagagttccttatgtttgttcactaaccatcctgctgtcgatgttctttgaaaatcaacttcacacacaggctcccttaatgctttgttagtgaatctgcggttttgggagaggttgaagggtggaggtttgcttacatccgttggttttgaaatgttttatggctatttttatgtcaatcatggtgccgtgaagattgccacggactaattagaagcttgattgtccttaattgaaaaaatgctgtagagggctaaaggtaacagaggtgatgttttggacgtagattgaagctttgactggactaagttcatggcatgccgataacatcatttggatatatgtatctcactttttattggtactcaaatttcttgtttcttatattcgggctggtgtttttttccagcaactgcattgtatatggatagaagtcttctcatattcttggatgggcttgtcactcggaatgtgttgagtaaacttatccaatttataaaatgctagtatatgaaccatgataaaatttagataattcttatttaatctgcagtgatagaaggcactgtgcaagtttgggatgtggtgggagatttaagcagatatgggtagaattacagcactaactttcatttaatcaaacttgtttctgctttatcattctatatgcttcaactgaagctttaactcttgtgctgctggaatttctgtgttctgcagatcatttagctcaaataattggtagtgggtcacgatacttgttttggtttgggatttctatggatgcttttgtctagcttatctatgttgttgtggttgcttttacatgtggttgtagggtaagtttggcaattaaaaatcctgtatttaaaactggggacaggtcagaatgtcattccggttgtgttgatgcaaaatgaaaggtgggctggttttgtcctcctagatgcggaaggaaaggtctgctggttatggagagatcggttgaagggtggagatttgtttacgttcgttggttttgatttgttacatggatattcttatgtcaatcatgggggtgtgaagatagccacctgattaattagaagcttgatgattgtccttgattggaaaaatgatgtagaggcaacataggtgatgttttggacgtagattgaagctttgactgaactaacttcatggcatgctctcttttattggtactcttaaatttcttgtttcttatttctgggcgggtgttcttctccagcaactggattacagcaactggattgcatatggatggatttggggcctgatttggattctgcttctgcgtcagcaataataattctgaactattcagggttccctgtgtttgttcaataactaacctaccctgtcaaatgttctttgaaaatttagttccctcataaactatctactcttcttgttttttatatttgggctggtgtttctctccaacaactggagttacaacatctggattgtatatgaatggattggagcctgagctcgattctgcttttgcatgagcaataataataagttctaaactattcagggttcaaaaaaaatcatcctatcctgtcaaatgttctttgaaatttagttcactcgtaggctaccttcaaagatatgattgtaatctgcagttttggaggcatcgcaatggagataggactttgcagttgaacttggcggcaaatgatcggacttcgtatcccacattatttgatgaatgttcatgttgtttaagtgttctcggttctcactatcaaattgatagttaccagagggggtggtcttgctgattgcagatctctaggtgggatacttgcatgggcaccgaaagatccagatctattcaaacctacaacaacctttagctcattgtgtttgttcagtgtcttctacctggaagtagataatgattggggtcattgttgcaggtcttctcatatttttgcatgggcttgttacacggaatatgtgttgggagtactaaacttatctaatttacaaaatgcaatgctagtatatgaaccatgatgaaaattcggttacttctaatttaatctgtagtggtagaaggcactggacatgtttgggacttgggagattcaagcagagatgggtagaactacaacactacaacttccattcaatcaaactgtttctgctttatcatgctatatgcttctgtggaagctttaaattcttgtgctgcaggtcatttagctcaagtaattgatagtccaacggtcatgatatttggtttgggattcctgtggatgctttcgtctggctttagctatgtttttctggttgcttttacatgtggttgcagaataattttggcaattggaaatccatgtatcaaacaactgatattcgaaactgggggcaggtcagagataattccggttgtgttggtttcgtcacttgtgttatcagtgatttaagatctgactggttggctaacattctggctctccatggatattgctgatgtagtgatgtagtaaagcaaggtttttgatacctgggtttattcgtatatcaaatgatcgtagtgtgtgttttgtgtcatttagggatgcaggctgacattggaggcggattttcctcaattggagatataacaatttggaaataaattgtgacacttgacctctcacttataacttctgtctttggcctgtaatcacttgttatgtttccagccactttaactatagcatacggcattgacgcctaggagttcttttgtgctacaacaatctaaattacaaggatgcttctaattcttcatttctgtcaacagtcctatccagttactttcttcaaccagtaactctctgtgctgcaacaatctaaattacaaggattcttctaattcttcatttctgctgccaacagtcgtatccagttacttccttcaacctgttactcttcaagtttgtgcagatgtgacacacagaagctgagatagaatttccaaccatctatgccgtcttcaaagcccatcactgttccactggccatttatttgatttgccttggatttgaaggttttttaaggctatcactgaaccaaaatagacaaaccatagatggtctctttggaaaatgtagatttagcacttgaaattttaaagttcagtctgatcctgatcataatatgtgcctatcttccgaattctactacctccaattttgctagccagagaactttcagatagtgtgcattgaagttcaagcttgattacttgtactgatctgctgtttcggatgctttggatgctccatgctagttatataatccacatgatcacaaccaagacgatacattgttcagagattgcactaactactgttcctgaatattgactgcatatcactttccatttcacttgtgatttggattgttggtggtttgcttggtttccagttatttgaaagcattaatgcttggatgttaggagtgatgaggcactcattacgatactcttcaatctaaccatttatattggatccacttggagctaaggttaggttactcctttgcactacctttattttgaagctgtccttgttaatctgcatgcctcatctgatggctcaggtccactatttgcgccgatatccagcaagaactctttcttgacaatacataacttcattgtgcaaaattggtttgttactgaaattgtaggttctttacttgagcatatgtggtcatcgtatactttttggtccaattacccaaattttctgttaggacccctactaatgtttaatctagtttctggttcgcttctaattttacttccatctgttatgtattgtttatgtcttgactttcatctggtgcatcttatctgttgtggatcaaaactaagaaaaaggatgttgctgcttctgtgcatgccaaaagaaaatctctctgaacaaacttgtcttctatgtgcttattgtttgaccatttctatcgtggactagcagtagtgccttatgatgtccatgttggcgctaagaaatgtattgcggtcagttttttgtgatatgctggatgtcttaactgtacataagattgcacgagtgtacactggctgttttttagctgtccacttgcttatcttttttttcaaattatgtctgggagcacgatcttctttgtgtgtaattgtttgtgtttcctgatttgttgtttgtttgcggtttaacactgcctttgccggtcccaagcccggatgagaaaatgtggagggaactgcagggtttcttcttagtcccatgaatggtatcagggtactgggaagaaatgttgtttggtcaaaacagctggactctgagagctcagacgggcgtaacctaaccatcaagcgcaagcggcagtacggtcacgtctccagacgggcgttacctaaccatcaactgcaagctggtagcctggtagtaatactggttcacggctgcctgcatgcaagttcttttttcccctgttgaacaagtttatttatctcattacccgctgaagaactcaacgcacagcaagctacagctacctgaagccgtttggttaatcatcgaaacaatggatacctctaatcttcttcaaagtaagccatgtacaaaagggacttaggtccttccctgggagatgtctgtaccgatggactagcttgactttagtgatgtagctgttacctggtcttaatttgttcttgtccttccgttcttgtttccatgttgatttctgttccccactcgctcctcgcagcccatttgaagttcgtcagacttacgcacagcagagagcagacacaaacttggacgagaatcggccactgcttgccatgcgaccctgagcgcagcatgcccaattcggggattctaaccgaggtcgagctagtaaac

SEQ ID NO: 76776 - DNA, 7750 bp, Zea Mays
cataaatagggcctacccgactactccttcccctcgcgctctgccctttgcgccttcgtcaccgcgacgcgcttgcgttttccaatccttgtcttatactccgtttcgacttcgagctgggtcgatttcttcttcagctgattccttgttctcgcagatctccatcgggcgttccgctttcgtgcgacgcggggagcgagcctgtgttcggtggcggggttattgagtttgccgtttatttttttcctgcaattcgtctagttatcgtgtgcaattcgtctagtcatcgtgtcgatcttgtttcgtctcgcctcctcagcgtgtgggttgcaggattggatccgatctggtgtggggagttcgtcatgttcgcctggactcggaggcaggtcagtattctgtcagatccaacggttcattggttgtcacttggacatggattcggtggtttcaggcccaatcatctcccggtggggtaccaccagaaattgtcacttggacatggatttgaagatttcaggcttaatcgtctcccggtgcggtagcatcagaaaccgataatgcagttatagcctgcacaccaggtggatttggagaaccttcggtccgttcttatgttaacggctgatctcgcttctggtcttttggttgtttgtcctccttaaacttcagatgcatgaagggtccttgctggttatggagagatcatttgaagggtggaggtttgctattatggttcattcgccgtttctcattcctattcatcatattgtcggaagattagcaccgaacttactctaagcttcgttggaaatgctgcctctagatctgcagaggcaacctaatattggaaatagattggggcgttgattggactgcaattcgtagtattggcgagaagatcgtttggatatatttacctatcgcccatcatattattaaatttctatccgttgcagttttaatttcttacattggggtgatggttttctccagcaactcgattaaatggatggattggtggaggcgagtttgatcctgcttctgcttgtgtaatcagtagttcggaattgttcagagttccttgtgtttgttcactaaccatccttctgtcaatgttcttcgaaaactaacttcacacataggctccctttaatgtttcgttagtgtatctgcagttttgggagacatcactacagagttcatccccctaaatgcataatggaagtccttgctgttttgggagatgccactccagagttggtccccctagatgcaaaatggaaggtccttgctggtttgtcctagatgcaaaaggaagatcccttggttatggatagatcggttgaagggtggagaggcaactgaggtgatgttttggacgtagattgaagctttgaccggactaagttcatgtcatgcagataacatcgttgggatatatgtatctctcactcttctattggcactcttaaatttcttatttcttatatttcggctgatgtttttctccagcaactggattacaacatctggattgtatatggatggattggagcctgagtttggttctgcttctgcatgagcaataataagttctgaactattcaggggtccctttttgttcaaagaacaattctatcctgtcaaatggtaagtttggcaattggaaatccctgtagcgaagaactgatatttaaaactggggcaggttagaaatcattccggttgtgttggttccatcacttgttttcagtgatttcatatctgaatgattggctaacattctgactctccaatgatatcgctggaacagtagtagtagtattagcagcaaggttcgagatgcggacattggaggtggattttccttgcactctggtttttcttctcttcgtgtcggtgttgctattcaagcaccttgcctgtcccgtcttgccctttgtcacttcgtcactggcgtgtttgcgttttccatttcttccttctctgtactctctgtttcgacttcgagctgggatggtttcttctccggctgatctgttctgctgctgttgcggttacgtgctcttgcagatccccttggggcattctgctttcgtgccacgcgggagtgggcctgtgtttggtggcgggattgttggatttgcggtttatttttaaggcaaatcgtctagttatcgtcgatcttgtttcgtcttcgccttctcagcatgtcggttgcaggattggatctgatctgagttcgtcatgacgttgtgtggcgatctgtttgtctgagttcggagataggttagtattctgtcagatccaatggttcattggttttgtcacttggacatggattcggtggtttcaggctcaattgttcatctcctgttgtggtaccatcagaaaccgatagtgcagttgtagcctgcataccagatgcaaggagggtccttgctggttatggaaagatcagttgaatggtggaggtttgcttatggttcattcgtcgtttctcattctgatatcatcatattggtgcaaagattagcaccagacttgctctaagcttgattggaaatgctgctggctagatctgcagaggcaacataattttggaggtagattgaggcgttgactggagtggagtttgtagcatcggcgaggatatcagttggatatatttacctatcgctcttcatattattaaatttctatctgctgcaattttaatttcttacattggggtgatggttttctccagcaactcgattatatggatggatgggttggaggcgagttttgatcctgcttgtgcaatcagaagttcggaattgttcagagttccttatgtttgttcactaaccatcctgctgtcgatgttctttgaaaatcaacttcacacacaggctcccttaatgctttgttagtgaatctgcggttttgggagaggttgaagggtggaggtttgcttacatccgttggttttgaaatgttttatggctatttttatgtcaatcatggtgccgtgaagattgccacggactaattagaagcttgattgtccttaattgaaaaaatgctgtagagggctaaaggtaacagaggtgatgttttggacgtagattgaagctttgactggactaagttcatggcatgccgataacatcatttggatatatgtatctcactttttattggtactcaaatttcttgtttcttatattcgggctggtgtttttttccagcaactgcattgtatatggatagaagtcttctcatattcttggatgggcttgtcactcggaatgtgttgagtaaacttatccaatttataaaatgctagtatatgaaccatgataaaatttagataattcttatttaatctgcagtgatagaaggcactgtgcaagtttgggatgtggtgggagatttaagcagatatgggtagaattacagcactaactttcatttaatcaaacttgtttctgctttatcattctatatgcttcaactgaagctttaactcttgtgctgctggaatttctgtgttctgcagatcatttagctcaaataattggtagtgggtcacgatacttgttttggtttgggatttctatggatgcttttgtctagcttatctatgttgttgtggttgcttttacatgtggttgtagggtaagtttggcaattaaaaatcctgtatttaaaactggggacaggtcagaatgtcattccggttgtgttgatgcaaaatgaaaggtgggctggttttgtcctcctagatgcggaaggaaaggtctgctggttatggagagatcggttgaagggtggagatttgtttacgttcgttggttttgatttgttacatggatattcttatgtcaatcatgggggtgtgaagatagccacctgattaattagaagcttgatgattgtccttgattggaaaaatgatgtagaggcaacataggtgatgttttggacgtagattgaagctttgactgaactaacttcatggcatgctctcttttattggtactcttaaatttcttgtttcttatttctgggcgggtgttcttctccagcaactggattacagcaactggattgcatatggatggatttggggcctgatttggattctgcttctgcgtcagcaataataattctgaactattcagggttccctgtgtttgttcaataactaacctaccctgtcaaatgttctttgaaaatttagttccctcataaactatctactcttcttgttttttatatttgggctggtgtttctctccaacaactggagttacaacatctggattgtatatgaatggattggagcctgagctcgattctgcttttgcatgagcaataataataagttctaaactattcagggttcaaaaaaaatcatcctatcctgtcaaatgttctttgaaatttagttcactcgtaggctaccttcaaagatatgattgtaatctgcagttttggaggcatcgcaatggagataggactttgcagttgaacttggcggcaaatgatcggacttcgtatcccacattatttgatgaatgttcatgttgtttaagtgttctcggttctcactatcaaattgatagttaccagagggggtggtcttgctgattgcagatctctaggtgggatacttgcatgggcaccgaaagatccagatctattcaaacctacaacaacctttagctcattgtgtttgttcagtgtcttctacctggaagtagataatgattggggtcattgttgcaggtcttctcatatttttgcatgggcttgttacacggaatatgtgttgggagtactaaacttatctaatttacaaaatgcaatgctagtatatgaaccatgatgaaaattcggttacttctaatttaatctgtagtggtagaaggcactggacatgtttgggacttgggagattcaagcagagatgggtagaactacaacactacaacttccattcaatcaaactgtttctgctttatcatgctatatgcttctgtggaagctttaaattcttgtgctgcaggtcatttagctcaagtaattgatagtccaacggtcatgatatttggtttgggattcctgtggatgctttcgtctggctttagctatgtttttctggttgcttttacatgtggttgcagaataattttggcaattggaaatccatgtatcaaacaactgatattcgaaactgggggcaggtcagagataattccggttgtgttggtttcgtcacttgtgttatcagtgatttaagatctgactggttggctaacattctggctctccatggatattgctgatgtagtgatgtagtaaagcaaggtttttgatacctgggtttattcgtatatcaaatgatcgtagtgtgtgttttgtgtcatttagggatgcaggctgacattggaggcggattttcctcaattggagatataacaatttggaaataaattgtgacacttgacctctcacttataacttctgtctttggcctgtaatcacttgttatgtttccagccactttaactatagcatacggcattgacgcctaggagttcttttgtgctacaacaatctaaattacaaggatgcttctaattcttcatttctgtcaacagtcctatccagttactttcttcaaccagtaactctctgtgctgcaacaatctaaattacaaggattcttctaattcttcatttctgctgccaacagtcgtatccagttacttccttcaacctgttactcttcaagtttgtgcagatgtgacacacagaagctgagatagaatttccaaccatctatgccgtcttcaaagcccatcactgttccactggccatttatttgatttgccttggatttgaaggttttttaaggctatcactgaaccaaaatagacaaaccatagatggtctctttggaaaatgtagatttagcacttgaaattttaaagttcagtctgatcctgatcataatatgtgcctatcttccgaattctactacctccaattttgctagccagagaactttcagatagtgtgcattgaagttcaagcttgattacttgtactgatctgctgtttcggatgctttggatgctccatgctagttatataatccacatgatcacaaccaagacgatacattgttcagagattgcactaactactgttcctgaatattgactgcatatcactttccatttcacttgtgatttggattgttggtggtttgcttggtttccagttatttgaaagcattaatgcttggatgttaggagtgatgaggcactcattacgatactcttcaatctaaccatttatattggatccacttggagctaaggttaggttactcctttgcactacctttattttgaagctgtccttgttaatctgcatgcctcatctgatggctcaggtccactatttgcgccgatatccagcaagaactctttcttgacaatacataacttcattgtgcaaaattggtttgttactgaaattgtaggttctttacttgagcatatgtggtcatcgtatactttttggtccaattacccaaattttctgttaggacccctactaatgtttaatctagtttctggttcgcttctaattttacttccatctgttatgtattgtttatgtcttgactttcatctggtgcatcttatctgttgtggatcaaaactaagaaaaaggatgttgctgcttctgtgcatgccaaaagaaaatctctctgaacaaacttgtcttctatgtgcttattgtttgaccatttctatcgtggactagcagtagtgccttatgatgtccatgttggcgctaagaaatgtattgcggtcagttttttgtgatatgctggatgtcttaactgtacataagattgcacgagtgtacactggctgttttttagctgtccacttgcttatcttttttttcaaattatgtctgggagcacgatcttctttgtgtgtaattgtttgtgtttcctgatttgttgtttgtttgcggtttaacactgcctttgccggtcccaagcccggatgagaaaatgtggagggaactgcagggtttcttcttagtcccatgaatggtatcagggtactgggaagaaatgttgtttggtcaaaacagctggactctgagagctcagacgggcgtaacctaaccatcaagcgcaagcggcagtacggtcacgtctccagacgggcgttacctaaccatcaactgcaagctggtagcctggtagtaatactggttcacggctgcctgcatgcaagttcttttttcccctgttgaacaagtttatttatctcattacccgctgaagaactcaacgcacagcaagctacagctacctgaagccgtttggttaatcatcgaaacaatggatacctctaatcttcttcaaagtaagccatgtacaaaagggacttaggtccttccctgggagatgtctgtaccgatggactagcttgactttagtgatgtagctgttacctggtcttaatttgttcttgtccttccgttcttgtttccatgttgatttctgttccccactcgctcctcgcagcccatttgaagttcgtcagacttacgcacagcagagagcagacacaaacttggacgagaatcggccactgcttgccatgcgaccctgagcgcagcatgcccaattcggggattctaaccgaggtcgagctagtaaac

SEQ ID NO: 76777 - DNA, 6487 bp, Zea Mays
cataaatagggcctacccgactactccttcccctcgcgctctgccctttgcgccttcgtcaccgcgacgcgcttgcgttttccaatccttgtcttatactccgtttcgacttcgagctgggtcgatttcttcttcagctgattccttgttctcgcagatctccatcgggcgttccgctttcgtgcgacgcggggagcgagcctgtgttcggtggcggggttattgagtttgccgtttatttttttcctgcaattcgtctagttatcgtgtgcaattcgtctagtcatcgtgtcgatcttgtttcgtctcgcctcctcagcgtgtgggttgcaggattggatccgatctggtgtggggagttcgtcatgttcgcctggactcggaggcagggtaagtttggcaattggaaatccctgtagcgaagaactgatatttaaaactggggcaggttagaaatcattccggttgtgttggttccatcacttgttttcagtgatttcatatctgaatgattggctaacattctgactctccaatgatatcgctggaacagtagtagtagtattagcagcaaggttcgagatgcggacattggaggtggattttccttgcactctggtttttcttctcttcgtgtcggtgttgctattcaagcaccttgcctgtcccgtcttgccctttgtcacttcgtcactggcgtgtttgcgttttccatttcttccttctctgtactctctgtttcgacttcgagctgggatggtttcttctccggctgatctgttctgctgctgttgcggttacgtgctcttgcagatccccttggggcattctgctttcgtgccacgcgggagtgggcctgtgtttggtggcgggattgttggatttgcggtttatttttaaggcaaatcgtctagttatcgtcgatcttgtttcgtcttcgccttctcagcatgtcggttgcaggattggatctgatctgagttcgtcatgacgttgtgtggcgatctgtttgtctgagttcggagataggttagtattctgtcagatccaatggttcattggttttgtcacttggacatggattcggtggtttcaggctcaattgttcatctcctgttgtggtaccatcagaaaccgatagtgcagttgtagcctgcataccagatgcaaggagggtccttgctggttatggaaagatcagttgaatggtggaggtttgcttatggttcattcgtcgtttctcattctgatatcatcatattggtgcaaagattagcaccagacttgctctaagcttgattggaaatgctgctggctagatctgcagaggcaacataattttggaggtagattgaggcgttgactggagtggagtttgtagcatcggcgaggatatcagttggatatatttacctatcgctcttcatattattaaatttctatctgctgcaattttaatttcttacattggggtgatggttttctccagcaactcgattatatggatggatgggttggaggcgagttttgatcctgcttgtgcaatcagaagttcggaattgttcagagttccttatgtttgttcactaaccatcctgctgtcgatgttctttgaaaatcaacttcacacacaggctcccttaatgctttgttagtgaatctgcggttttgggagaggttgaagggtggaggtttgcttacatccgttggttttgaaatgttttatggctatttttatgtcaatcatggtgccgtgaagattgccacggactaattagaagcttgattgtccttaattgaaaaaatgctgtagagggctaaaggtaacagaggtgatgttttggacgtagattgaagctttgactggactaagttcatggcatgccgataacatcatttggatatatgtatctcactttttattggtactcaaatttcttgtttcttatattcgggctggtgtttttttccagcaactgcattgtatatggatagaagtcttctcatattcttggatgggcttgtcactcggaatgtgttgagtaaacttatccaatttataaaatgctagtatatgaaccatgataaaatttagataattcttatttaatctgcagtgatagaaggcactgtgcaagtttgggatgtggtgggagatttaagcagatatgggtagaattacagcactaactttcatttaatcaaacttgtttctgctttatcattctatatgcttcaactgaagctttaactcttgtgctgctggaatttctgtgttctgcagatcatttagctcaaataattggtagtgggtcacgatacttgttttggtttgggatttctatggatgcttttgtctagcttatctatgttgttgtggttgcttttacatgtggttgtagggtaagtttggcaattaaaaatcctgtatttaaaactggggacaggtcagaatgtcattccggttgtgttgatgcaaaatgaaaggtgggctggttttgtcctcctagatgcggaaggaaaggtctgctggttatggagagatcggttgaagggtggagatttgtttacgttcgttggttttgatttgttacatggatattcttatgtcaatcatgggggtgtgaagatagccacctgattaattagaagcttgatgattgtccttgattggaaaaatgatgtagaggcaacataggtgatgttttggacgtagattgaagctttgactgaactaacttcatggcatgctctcttttattggtactcttaaatttcttgtttcttatttctgggcgggtgttcttctccagcaactggattacagcaactggattgcatatggatggatttggggcctgatttggattctgcttctgcgtcagcaataataattctgaactattcagggttccctgtgtttgttcaataactaacctaccctgtcaaatgttctttgaaaatttagttccctcataaactatctactcttcttgttttttatatttgggctggtgtttctctccaacaactggagttacaacatctggattgtatatgaatggattggagcctgagctcgattctgcttttgcatgagcaataataataagttctaaactattcagggttcaaaaaaaatcatcctatcctgtcaaatgttctttgaaatttagttcactcgtaggctaccttcaaagatatgattgtaatctgcagttttggaggcatcgcaatggagataggactttgcagttgaacttggcggcaaatgatcggacttcgtatcccacattatttgatgaatgttcatgttgtttaagtgttctcggttctcactatcaaattgatagttaccagagggggtggtcttgctgattgcagatctctaggtgggatacttgcatgggcaccgaaagatccagatctattcaaacctacaacaacctttagctcattgtgtttgttcagtgtcttctacctggaagtagataatgattggggtcattgttgcaggtcttctcatatttttgcatgggcttgttacacggaatatgtgttgggagtactaaacttatctaatttacaaaatgcaatgctagtatatgaaccatgatgaaaattcggttacttctaatttaatctgtagtggtagaaggcactggacatgtttgggacttgggagattcaagcagagatgggtagaactacaacactacaacttccattcaatcaaactgtttctgctttatcatgctatatgcttctgtggaagctttaaattcttgtgctgcaggtcatttagctcaagtaattgatagtccaacggtcatgatatttggtttgggattcctgtggatgctttcgtctggctttagctatgtttttctggttgcttttacatgtggttgcagaataattttggcaattggaaatccatgtatcaaacaactgatattcgaaactgggggcaggtcagagataattccggttgtgttggtttcgtcacttgtgttatcagtgatttaagatctgactggttggctaacattctggctctccatggatattgctgatgtagtgatgtagtaaagcaaggtttttgatacctgggtttattcgtatatcaaatgatcgtagtgtgtgttttgtgtcatttagggatgcaggctgacattggaggcggattttcctcaattggagatataacaatttggaaataaattgtgacacttgacctctcacttataacttctgtctttggcctgtaatcacttgttatgtttccagccactttaactatagcatacggcattgacgcctaggagttcttttgtgctacaacaatctaaattacaaggatgcttctaattcttcatttctgtcaacagtcctatccagttactttcttcaaccagtaactctctgtgctgcaacaatctaaattacaaggattcttctaattcttcatttctgctgccaacagtcgtatccagttacttccttcaacctgttactcttcaagtttgtgcagatgtgacacacagaagctgagatagaatttccaaccatctatgccgtcttcaaagcccatcactgttccactggccatttatttgatttgccttggatttgaaggttttttaaggctatcactgaaccaaaatagacaaaccatagatggtctctttggaaaatgtagatttagcacttgaaattttaaagttcagtctgatcctgatcataatatgtgcctatcttccgaattctactacctccaattttgctagccagagaactttcagatagtgtgcattgaagttcaagcttgattacttgtactgatctgctgtttcggatgctttggatgctccatgctagttatataatccacatgatcacaaccaagacgatacattgttcagagattgcactaactactgttcctgaatattgactgcatatcactttccatttcacttgtgatttggattgttggtggtttgcttggtttccagttatttgaaagcattaatgcttggatgttaggagtgatgaggcactcattacgatactcttcaatctaaccatttatattggatccacttggagctaaggttaggttactcctttgcactacctttattttgaagctgtccttgttaatctgcatgcctcatctgatggctcaggtccactatttgcgccgatatccagcaagaactctttcttgacaatacataacttcattgtgcaaaattggtttgttactgaaattgtaggttctttacttgagcatatgtggtcatcgtatactttttggtccaattacccaaattttctgttaggacccctactaatgtttaatctagtttctggttcgcttctaattttacttccatctgttatgtattgtttatgtcttgactttcatctggtgcatcttatctgttgtggatcaaaactaagaaaaaggatgttgctgcttctgtgcatgccaaaagaaaatctctctgaacaaacttgtcttctatgtgcttattgtttgaccatttctatcgtggactagcagtagtgccttatgatgtccatgttggcgctaagaaatgtattgcggtcagttttttgtgatatgctggatgtcttaactgtacataagattgcacgagtgtacactggctgttttttagctgtccacttgcttatcttttttttcaaattatgtctgggagcacgatcttctttgtgtgtaattgtttgtgtttcctgatttgttgtttgtttgcggtttaacactgcctttgccggtcccaagcccggatgagaaaatgtggagggaactgcagggtttcttcttagtcccatgaatggtatcagggtactgggaagaaatgttgtttggtcaaaacagctggactctgagagctcagacgggcgtaacctaaccatcaagcgcaagcggcagtacggtcacgtctccagacgggcgttacctaaccatcaactgcaagctggtagcctggtagtaatactggttcacggctgcctgcatgcaagttcttttttcccctgttgaacaagtttatttatctcattacccgctgaagaactcaacgcacagcaagctacagctacctgaagccgtttggttaatcatcgaaacaatggatacctctaatcttcttcaaagtaagccatgtacaaaagggacttaggtccttccctgggagatgtctgtaccgatggactagcttgactttagtgatgtagctgttacctggtcttaatttgttcttgtccttccgttcttgtttccatgttgatttctgttccccactcgctcctcgcagcccatttgaagttcgtcagacttacgcacagcagagagcagacacaaacttggacgagaatcggccactgcttgccatgcgaccctgagcgcagcatgcccaattcggggattctaaccgaggtcgagctagtaaac

SEQ ID NO: 76778 - DNA, 5775 bp, Zea Mays
cataaatagggcctacccgactactccttcccctcgcgctctgccctttgcgccttcgtcaccgcgacgcgcttgcgttttccaatccttgtcttatactccgtttcgacttcgagctgggtcgatttcttcttcagctgattccttgttctcgcagatctccatcgggcgttccgctttcgtgcgacgcggggagcgagcctgtgttcggtggcggggttattgagtttgccgtttatttttttcctgcaattcgtctagttatcgtgtgcaattcgtctagtcatcgtgtcgatcttgtttcgtctcgcctcctcagcgtgtgggttgcaggattggatccgatctggtgtggggagttcgtcatgttcgcctggactcggaggcaggtcagtattctgtcagatccaacggttcattggttgtcacttggacatggattcggtggtttcaggcccaatcatctcccggtggggtaccaccagaaattgtcacttggacatggatttgaagatttcaggcttaatcgtctcccggtgcggtagcatcagaaaccgataatgcagttatagcctgcacaccaggtggatttggagaaccttcggtccgttcttatgttaacggctgatctcgcttctggtcttttggttgtttgtcctccttaaacttcagatgcatgaagggtccttgctggttatggagagatcatttgaagggtggaggtttgctattatggttcattcgccgtttctcattcctattcatcatattgtcggaagattagcaccgaacttactctaagcttcgttggaaatgctgcctctagatctgcagaggcaacctaatattggaaatagattggggcgttgattggactgcaattcgtagtattggcgagaagatcgtttggatatatttacctatcgcccatcatattattaaatttctatccgttgcagttttaatttcttacattggggtgatggttttctccagcaactcgattaaatggatggattggtggaggcgagtttgatcctgcttctgcttgtgtaatcagtagttcggaattgttcagagttccttgtgtttgttcactaaccatccttctgtcaatgttcttcgaaaactaacttcacacataggctccctttaatgtttcgttagtgtatctgcagttttgggagacatcactacagagttcatccccctaaatgcataatggaagtccttgctggtattgtcctcctagatgcaaaaggaaagatcccttggttatgaatagatcggttgaagggtggaggtttgcttatgttccttggttttgatctgctatatggctatttttatgttagcaagtttgatccagcttctgcttgtgcaatcagaacttctgaattgtttagagttccttgtgtttgttcactaaccatcctcctgtcgatgttctttgaaaattaacttcacacataggctcccttaatgcttcgttagtgtctgcagttttgggagatgccactccagagttggtccccctagatgcaaaatggaaggtccttgctggtttgtcctagatgcaaaaggaagatcccttggttatggatagatcggttgaagggtggaggtttgcttacgttccttggttttggtctgatatatggctatttttatgtcaatcacggtggcgtgaagatcgccaccggactaattagaagcttggttgtccttaattggaataatgtagaggcaactgaggtgatgttttggacgtagattgaagctttgaccggactaagttcatgtcatgcagataacatcgttgggatatatgtatctctcactcttctattggcactcttaaatttcttatttcttatatttcggctgatgtttttctccagcaactggattacaacatctggattgtatatggatggattggagcctgagtttggttctgcttctgcatgagcaataataagttctgaactattcaggggtccctttttgttcaaagaacaattctatcctgtcaaatggtaagtttggcaattggaaatccctgtagcgaagaactgatatttaaaactggggcagccagcaactggattacagcaactggattgcatatggatggatttggggcctgatttggattctgcttctgcgtcagcaataataattctgaactattcagggttccctgtgtttgttcaataactaacctaccctgtcaaatgttctttgaaaatttagttccctcataaactatctactcttcttgttttttatatttgggctggtgtttctctccaacaactggagttacaacatctggattgtatatgaatggattggagcctgagctcgattctgcttttgcatgagcaataataataagttctaaactattcagggttcaaaaaaaatcatcctatcctgtcaaatgttctttgaaatttagttcactcgtaggctaccttcaaagatatgattgtaatctgcagttttggaggcatcgcaatggagataggactttgcagttgaacttggcggcaaatgatcggacttcgtatcccacattatttgatgaatgttcatgttgtttaagtgttctcggttctcactatcaaattgatagttaccagagggggtggtcttgctgattgcagatctctaggtgggatacttgcatgggcaccgaaagatccagatctattcaaacctacaacaacctttagctcattgtgtttgttcagtgtcttctacctggaagtagataatgattggggtcattgttgcaggtcttctcatatttttgcatgggcttgttacacggaatatgtgttgggagtactaaacttatctaatttacaaaatgcaatgctagtatatgaaccatgatgaaaattcggttacttctaatttaatctgtagtggtagaaggcactggacatgtttgggacttgggagattcaagcagagatgggtagaactacaacactacaacttccattcaatcaaactgtttctgctttatcatgctatatgcttctgtggaagctttaaattcttgtgctgcaggtcatttagctcaagtaattgatagtccaacggtcatgatatttggtttgggattcctgtggatgctttcgtctggctttagctatgtttttctggttgcttttacatgtggttgcagaataattttggcaattggaaatccatgtatcaaacaactgatattcgaaactgggggcaggtcagagataattccggttgtgttggtttcgtcacttgtgttatcagtgatttaagatctgactggttggctaacattctggctctccatggatattgctgatgtagtgatgtagtaaagcaaggtttttgatacctgggtttattcgtatatcaaatgatcgtagtgtgtgttttgtgtcatttagggatgcaggctgacattggaggcggattttcctcaattggagatataacaatttggaaataaattgtgacacttgacctctcacttataacttctgtctttggcctgtaatcacttgttatgtttccagccactttaactatagcatacggcattgacgcctaggagttcttttgtgctacaacaatctaaattacaaggatgcttctaattcttcatttctgtcaacagtcctatccagttactttcttcaaccagtaactctctgtgctgcaacaatctaaattacaaggattcttctaattcttcatttctgctgccaacagtcgtatccagttacttccttcaacctgttactcttcaagtttgtgcagatgtgacacacagaagctgagatagaatttccaaccatctatgccgtcttcaaagcccatcactgttccactggccatttatttgatttgccttggatttgaaggttttttaaggctatcactgaaccaaaatagacaaaccatagatggtctctttggaaaatgtagatttagcacttgaaattttaaagttcagtctgatcctgatcataatatgtgcctatcttccgaattctactacctccaattttgctagccagagaactttcagatagtgtgcattgaagttcaagcttgattacttgtactgatctgctgtttcggatgctttggatgctccatgctagttatataatccacatgatcacaaccaagacgatacattgttcagagattgcactaactactgttcctgaatattgactgcatatcactttccatttcacttgtgatttggattgttggtggtttgcttggtttccagttatttgaaagcattaatgcttggatgttaggagtgatgaggcactcattacgatactcttcaatctaaccatttatattggatccacttggagctaaggttaggttactcctttgcactacctttattttgaagctgtccttgttaatctgcatgcctcatctgatggctcaggtccactatttgcgccgatatccagcaagaactctttcttgacaatacataacttcattgtgcaaaattggtttgttactgaaattgtaggttctttacttgagcatatgtggtcatcgtatactttttggtccaattacccaaattttctgttaggacccctactaatgtttaatctagtttctggttcgcttctaattttacttccatctgttatgtattgtttatgtcttgactttcatctggtgcatcttatctgttgtggatcaaaactaagaaaaaggatgttgctgcttctgtgcatgccaaaagaaaatctctctgaacaaacttgtcttctatgtgcttattgtttgaccatttctatcgtggactagcagtagtgccttatgatgtccatgttggcgctaagaaatgtattgcggtcagttttttgtgatatgctggatgtcttaactgtacataagattgcacgagtgtacactggctgttttttagctgtccacttgcttatcttttttttcaaattatgtctgggagcacgatcttctttgtgtgtaattgtttgtgtttcctgatttgttgtttgtttgcggtttaacactgcctttgccggtcccaagcccggatgagaaaatgtggagggaactgcagggtttcttcttagtcccatgaatggtatcagggtactgggaagaaatgttgtttggtcaaaacagctggactctgagagctcagacgggcgtaacctaaccatcaagcgcaagcggcagtacggtcacgtctccagacgggcgttacctaaccatcaactgcaagctggtagcctggtagtaatactggttcacggctgcctgcatgcaagttcttttttcccctgttgaacaagtttatttatctcattacccgctgaagaactcaacgcacagcaagctacagctacctgaagccgtttggttaatcatcgaaacaatggatacctctaatcttcttcaaagtaagccatgtacaaaagggacttaggtccttccctgggagatgtctgtaccgatggactagcttgactttagtgatgtagctgttacctggtcttaatttgttcttgtccttccgttcttgtttccatgttgatttctgttccccactcgctcctcgcagcccatttgaagttcgtcagacttacgcacagcagagagcagacacaaacttggacgagaatcggccactgcttgccatgcgaccctgagcgcagcatgcccaattcggggattctaaccgaggtcgagctagtaaac

SEQ ID NO: 76779 - DNA, 6361 bp, Zea Mays
cataaatagggcctacccgactactccttcccctcgcgctctgccctttgcgccttcgtcaccgcgacgcgcttgcgttttccaatccttgtcttatactccgtttcgacttcgagctgggtcgatttcttcttcagctgattccttgttctcgcagatctccatcgggcgttccgctttcgtgcgacgcggggagcgagcctgtgttcggtggcggggttattgagtttgccgtttatttttttcctgcaattcgtctagttatcgtgtgcaattcgtctagtcatcgtgtcgatcttgtttcgtctcgcctcctcagcgtgtgggttgcaggattggatccgatctggtgtggggagttcgtcatgttcgcctggactcggaggcaggtcagtattctgtcagatccaacggttcattggttgtcacttggacatggattcggtggtttcaggcccaatcatctcccggtggggtaccaccagaaattgtcacttggacatggatttgaagatttcaggcttaatcgtctcccggtgcggtagcatcagaaaccgataatgcagttatagcctgcacaccaggtggatttggagaaccttcggtccgttcttatgttaacggctgatctcgcttctggtcttttggttgtttgtcctccttaaacttcagatgcatgaagggtccttgctggttatggagagatcatttgaagggtggaggtttgctattatggttcattcgccgtttctcattcctattcatcatattgtcggaagattagcaccgaacttactctaagcttcgttggaaatgctgcctctagatctgcagaggcaacctaatattggaaatagattggggcgttgattggactgcaattcgtagtattggcgagaagatcgtttggatatatttacctatcgcccatcatattattaaatttctatccgttgcagttttaatttcttacattggggtgatggttttctccagcaactcgattaaatggatggattggtggaggcgagtttgatcctgcttctgcttgtgtaatcagtagttcggaattgttcagagttccttgtgtttgttcactaaccatccttctgtcaatgttcttcgaaaactaacttcacacataggctccctttaatgtttcgttagtgtatctgcagttttgggagacatcactacagagttcatccccctaaatgcataatggaagtccttgctggtattgtcctcctagatgcaaaaggaaagatcccttggttatgaatagatcggttgaagggtggaggtttgcttatgttccttggttttgatctgctatatggctatttttatgttagcaagtttgatccagcttctgcttgtgcaatcagaacttctgaattgtttagagttccttgtgtttgttcactaaccatcctcctgtcgatgttctttgaaaattaacttcacacataggctcccttaatgcttcgttagtgtctgcagttttgggagatgccactccagagttggtccccctagatgcaaaatggaaggtccttgctggtttgtcctagatgcaaaaggaagatcccttggttatggatagatcggttgaagggtggaggtttgcttacgttccttggttttggtctgatatatggctatttttatgtcaatcacggtggcgtgaagatcgccaccggactaattagaagcttggttgtccttaattggaataatgtagaggcaactgaggtgatgttttggacgtagattgaagctttgaccggactaagttcatgtcatgcagataacatcgttgggatatatgtatctctcactcttctattggcactcttaaatttcttatttcttatatttcggctgatgtttttctccagcaactggattacaacatctggattgtatatggatggattggagcctgagtttggttctgcttctgcatgagcaataataagttctgaactattcaggggtccctttttgttcaaagaacaattctatcctgtcaaatgttagttcactcaggctacctaatgatcggactttatcctatcccacattatttgatgaacgttcatgctgtttgagtgttctaagttctcactaccaaatagatagttaccagagggtggtcctgctgattgcagatctctaggtgggatatttgcatgggcacagaaggaaccagatctattcaaacctacaacgaactttaactctcattgtgtttgttcagtggttctaccttgaagtagataaacttatccaatttacaaaatgctagtatatgaaccatgatgaaaatttggatacttctattttaatctgcacttctgcagtggtagaaggcactggatatgtttgggacgtaggagattcaagctgatatgggtagaactacaacttcgatttaatcgaacttgtttctgctttatcatgctatatgcattaactgaagctttaattcttgtgctgctgtcatttctgtgttctgcagatcatttagctcaagtaattggtagtccaacggtcatgatacttgttttggtttgggattagctttatctacatttttgtcctcgcttttacatgtgtttgcagggtaagtttggcaattggaaatccctgtagcgaagaactgatatttaaaactggggcagcaactggattacagcaactggattgcatatggatggatttggggcctgatttggattctgcttctgcgtcagcaataataattctgaactattcagggttccctgtgtttgttcaataactaacctaccctgtcaaatgttctttgaaaatttagttccctcataaactatctactcttcttgttttttatatttgggctggtgtttctctccaacaactggagttacaacatctggattgtatatgaatggattggagcctgagctcgattctgcttttgcatgagcaataataataagttctaaactattcagggttcaaaaaaaatcatcctatcctgtcaaatgttctttgaaatttagttcactcgtaggctaccttcaaagatatgattgtaatctgcagttttggaggcatcgcaatggagataggactttgcagttgaacttggcggcaaatgatcggacttcgtatcccacattatttgatgaatgttcatgttgtttaagtgttctcggttctcactatcaaattgatagttaccagagggggtggtcttgctgattgcagatctctaggtgggatacttgcatgggcaccgaaagatccagatctattcaaacctacaacaacctttagctcattgtgtttgttcagtgtcttctacctggaagtagataatgattggggtcattgttgcaggtcttctcatatttttgcatgggcttgttacacggaatatgtgttgggagtactaaacttatctaatttacaaaatgcaatgctagtatatgaaccatgatgaaaattcggttacttctaatttaatctgtagtggtagaaggcactggacatgtttgggacttgggagattcaagcagagatgggtagaactacaacactacaacttccattcaatcaaactgtttctgctttatcatgctatatgcttctgtggaagctttaaattcttgtgctgcaggtcatttagctcaagtaattgatagtccaacggtcatgatatttggtttgggattcctgtggatgctttcgtctggctttagctatgtttttctggttgcttttacatgtggttgcagaataattttggcaattggaaatccatgtatcaaacaactgatattcgaaactgggggcaggtcagagataattccggttgtgttggtttcgtcacttgtgttatcagtgatttaagatctgactggttggctaacattctggctctccatggatattgctgatgtagtgatgtagtaaagcaaggtttttgatacctgggtttattcgtatatcaaatgatcgtagtgtgtgttttgtgtcatttagggatgcaggctgacattggaggcggattttcctcaattggagatataacaatttggaaataaattgtgacacttgacctctcacttataacttctgtctttggcctgtaatcacttgttatgtttccagccactttaactatagcatacggcattgacgcctaggagttcttttgtgctacaacaatctaaattacaaggatgcttctaattcttcatttctgtcaacagtcctatccagttactttcttcaaccagtaactctctgtgctgcaacaatctaaattacaaggattcttctaattcttcatttctgctgccaacagtcgtatccagttacttccttcaacctgttactcttcaagtttgtgcagatgtgacacacagaagctgagatagaatttccaaccatctatgccgtcttcaaagcccatcactgttccactggccatttatttgatttgccttggatttgaaggttttttaaggctatcactgaaccaaaatagacaaaccatagatggtctctttggaaaatgtagatttagcacttgaaattttaaagttcagtctgatcctgatcataatatgtgcctatcttccgaattctactacctccaattttgctagccagagaactttcagatagtgtgcattgaagttcaagcttgattacttgtactgatctgctgtttcggatgctttggatgctccatgctagttatataatccacatgatcacaaccaagacgatacattgttcagagattgcactaactactgttcctgaatattgactgcatatcactttccatttcacttgtgatttggattgttggtggtttgcttggtttccagttatttgaaagcattaatgcttggatgttaggagtgatgaggcactcattacgatactcttcaatctaaccatttatattggatccacttggagctaaggttaggttactcctttgcactacctttattttgaagctgtccttgttaatctgcatgcctcatctgatggctcaggtccactatttgcgccgatatccagcaagaactctttcttgacaatacataacttcattgtgcaaaattggtttgttactgaaattgtaggttctttacttgagcatatgtggtcatcgtatactttttggtccaattacccaaattttctgttaggacccctactaatgtttaatctagtttctggttcgcttctaattttacttccatctgttatgtattgtttatgtcttgactttcatctggtgcatcttatctgttgtggatcaaaactaagaaaaaggatgttgctgcttctgtgcatgccaaaagaaaatctctctgaacaaacttgtcttctatgtgcttattgtttgaccatttctatcgtggactagcagtagtgccttatgatgtccatgttggcgctaagaaatgtattgcggtcagttttttgtgatatgctggatgtcttaactgtacataagattgcacgagtgtacactggctgttttttagctgtccacttgcttatcttttttttcaaattatgtctgggagcacgatcttctttgtgtgtaattgtttgtgtttcctgatttgttgtttgtttgcggtttaacactgcctttgccggtcccaagcccggatgagaaaatgtggagggaactgcagggtttcttcttagtcccatgaatggtatcagggtactgggaagaaatgttgtttggtcaaaacagctggactctgagagctcagacgggcgtaacctaaccatcaagcgcaagcggcagtacggtcacgtctccagacgggcgttacctaaccatcaactgcaagctggtagcctggtagtaatactggttcacggctgcctgcatgcaagttcttttttcccctgttgaacaagtttatttatctcattacccgctgaagaactcaacgcacagcaagctacagctacctgaagccgtttggttaatcatcgaaacaatggatacctctaatcttcttcaaagtaagccatgtacaaaagggacttaggtccttccctgggagatgtctgtaccgatggactagcttgactttagtgatgtagctgttacctggtcttaatttgttcttgtccttccgttcttgtttccatgttgatttctgttccccactcgctcctcgcagcccatttgaagttcgtcagacttacgcacagcagagagcagacacaaacttggacgagaatcggccactgcttgccatgcgaccctgagcgcagcatgcccaattcggggattctaaccgaggtcgagctagtaaac

SEQ ID NO: 76780 - DNA, 5778 bp, Zea Mays
cataaatagggcctacccgactactccttcccctcgcgctctgccctttgcgccttcgtcaccgcgacgcgcttgcgttttccaatccttgtcttatactccgtttcgacttcgagctgggtcgatttcttcttcagctgattccttgttctcgcagatctccatcgggcgttccgctttcgtgcgacgcggggagcgagcctgtgttcggtggcggggttattgagtttgccgtttatttttttcctgcaattcgtctagttatcgtgtgcaattcgtctagtcatcgtgtcgatcttgtttcgtctcgcctcctcagcgtgtgggttgcaggattggatccgatctggtgtggggagttcgtcatgttcgcctggactcggaggcaggtcagtattctgtcagatccaacggttcattggttgtcacttggacatggattcggtggtttcaggcccaatcatctcccggtggggtaccaccagaaattgtcacttggacatggatttgaagatttcaggcttaatcgtctcccggtgcggtagcatcagaaaccgataatgcagttatagcctgcacaccaggtggatttggagaaccttcggtccgttcttatgttaacggctgatctcgcttctggtcttttggttgtttgtcctccttaaacttcagatgcatgaagggtccttgctggttatggagagatcatttgaagggtggaggtttgctattatggttcattcgccgtttctcattcctattcatcatattgtcggaagattagcaccgaacttactctaagcttcgttggaaatgctgcctctagatctgcagaggcaacctaatattggaaatagattggggcgttgattggactgcaattcgtagtattggcgagaagatcgtttggatatatttacctatcgcccatcatattattaaatttctatccgttgcagttttaatttcttacattggggtgatggttttctccagcaactcgattaaatggatggattggtggaggcgagtttgatcctgcttctgcttgtgtaatcagtagttcggaattgttcagagttccttgtgtttgttcactaaccatccttctgtcaatgttcttcgaaaactaacttcacacataggctccctttaatgtttcgttagtgtatctgcagttttgggagacatcactacagagttcatccccctaaatgcataatggaagtccttgctggtattgtcctcctagatgcaaaaggaaagatcccttggttatgaatagatcggttgaagggtggaggtttgcttatgttccttggttttgatctgctatatggctatttttatgttagcaagtttgatccagcttctgcttgtgcaatcagaacttctgaattgtttagagttccttgtgtttgttcactaaccatcctcctgtcgatgttctttgaaaattaacttcacacataggctcccttaatgcttcgttagtgtctgcagttttgggagatgccactccagagttggtccccctagatgcaaaatggaaggtccttgctggtttgtcctagatgcaaaaggaagatcccttggttatggatagatcggttgaagggtggaggtttgcttacgttccttggttttggtctgatatatggctatttttatgtcaatcacggtggcgtgaagatcgccaccggactaattagaagcttggttgtccttaattggaataatgtagaggcaactgaggtgatgttttggacgtagattgaagctttgaccggactaagttcatgtcatgcagataacatcgttgggatatatgtatctctcactcttctattggcactcttaaatttcttatttcttatatttcggctgatgtttttctccagcaactggattacaacatctggattgtatatggatggattggagcctgagtttggttctgcttctgcatgagcaataataagttctgaactattcaggggtccctttttgttcaaagaacaattctatcctgtcaaatgttagttggtaagtttggcaattggaaatccctgtagcgaagaactgatatttaaaactggggcagcaactggattacagcaactggattgcatatggatggatttggggcctgatttggattctgcttctgcgtcagcaataataattctgaactattcagggttccctgtgtttgttcaataactaacctaccctgtcaaatgttctttgaaaatttagttccctcataaactatctactcttcttgttttttatatttgggctggtgtttctctccaacaactggagttacaacatctggattgtatatgaatggattggagcctgagctcgattctgcttttgcatgagcaataataataagttctaaactattcagggttcaaaaaaaatcatcctatcctgtcaaatgttctttgaaatttagttcactcgtaggctaccttcaaagatatgattgtaatctgcagttttggaggcatcgcaatggagataggactttgcagttgaacttggcggcaaatgatcggacttcgtatcccacattatttgatgaatgttcatgttgtttaagtgttctcggttctcactatcaaattgatagttaccagagggggtggtcttgctgattgcagatctctaggtgggatacttgcatgggcaccgaaagatccagatctattcaaacctacaacaacctttagctcattgtgtttgttcagtgtcttctacctggaagtagataatgattggggtcattgttgcaggtcttctcatatttttgcatgggcttgttacacggaatatgtgttgggagtactaaacttatctaatttacaaaatgcaatgctagtatatgaaccatgatgaaaattcggttacttctaatttaatctgtagtggtagaaggcactggacatgtttgggacttgggagattcaagcagagatgggtagaactacaacactacaacttccattcaatcaaactgtttctgctttatcatgctatatgcttctgtggaagctttaaattcttgtgctgcaggtcatttagctcaagtaattgatagtccaacggtcatgatatttggtttgggattcctgtggatgctttcgtctggctttagctatgtttttctggttgcttttacatgtggttgcagaataattttggcaattggaaatccatgtatcaaacaactgatattcgaaactgggggcaggtcagagataattccggttgtgttggtttcgtcacttgtgttatcagtgatttaagatctgactggttggctaacattctggctctccatggatattgctgatgtagtgatgtagtaaagcaaggtttttgatacctgggtttattcgtatatcaaatgatcgtagtgtgtgttttgtgtcatttagggatgcaggctgacattggaggcggattttcctcaattggagatataacaatttggaaataaattgtgacacttgacctctcacttataacttctgtctttggcctgtaatcacttgttatgtttccagccactttaactatagcatacggcattgacgcctaggagttcttttgtgctacaacaatctaaattacaaggatgcttctaattcttcatttctgtcaacagtcctatccagttactttcttcaaccagtaactctctgtgctgcaacaatctaaattacaaggattcttctaattcttcatttctgctgccaacagtcgtatccagttacttccttcaacctgttactcttcaagtttgtgcagatgtgacacacagaagctgagatagaatttccaaccatctatgccgtcttcaaagcccatcactgttccactggccatttatttgatttgccttggatttgaaggttttttaaggctatcactgaaccaaaatagacaaaccatagatggtctctttggaaaatgtagatttagcacttgaaattttaaagttcagtctgatcctgatcataatatgtgcctatcttccgaattctactacctccaattttgctagccagagaactttcagatagtgtgcattgaagttcaagcttgattacttgtactgatctgctgtttcggatgctttggatgctccatgctagttatataatccacatgatcacaaccaagacgatacattgttcagagattgcactaactactgttcctgaatattgactgcatatcactttccatttcacttgtgatttggattgttggtggtttgcttggtttccagttatttgaaagcattaatgcttggatgttaggagtgatgaggcactcattacgatactcttcaatctaaccatttatattggatccacttggagctaaggttaggttactcctttgcactacctttattttgaagctgtccttgttaatctgcatgcctcatctgatggctcaggtccactatttgcgccgatatccagcaagaactctttcttgacaatacataacttcattgtgcaaaattggtttgttactgaaattgtaggttctttacttgagcatatgtggtcatcgtatactttttggtccaattacccaaattttctgttaggacccctactaatgtttaatctagtttctggttcgcttctaattttacttccatctgttatgtattgtttatgtcttgactttcatctggtgcatcttatctgttgtggatcaaaactaagaaaaaggatgttgctgcttctgtgcatgccaaaagaaaatctctctgaacaaacttgtcttctatgtgcttattgtttgaccatttctatcgtggactagcagtagtgccttatgatgtccatgttggcgctaagaaatgtattgcggtcagttttttgtgatatgctggatgtcttaactgtacataagattgcacgagtgtacactggctgttttttagctgtccacttgcttatcttttttttcaaattatgtctgggagcacgatcttctttgtgtgtaattgtttgtgtttcctgatttgttgtttgtttgcggtttaacactgcctttgccggtcccaagcccggatgagaaaatgtggagggaactgcagggtttcttcttagtcccatgaatggtatcagggtactgggaagaaatgttgtttggtcaaaacagctggactctgagagctcagacgggcgtaacctaaccatcaagcgcaagcggcagtacggtcacgtctccagacgggcgttacctaaccatcaactgcaagctggtagcctggtagtaatactggttcacggctgcctgcatgcaagttcttttttcccctgttgaacaagtttatttatctcattacccgctgaagaactcaacgcacagcaagctacagctacctgaagccgtttggttaatcatcgaaacaatggatacctctaatcttcttcaaagtaagccatgtacaaaagggacttaggtccttccctgggagatgtctgtaccgatggactagcttgactttagtgatgtagctgttacctggtcttaatttgttcttgtccttccgttcttgtttccatgttgatttctgttccccactcgctcctcgcagcccatttgaagttcgtcagacttacgcacagcagagagcagacacaaacttggacgagaatcggccactgcttgccatgcgaccctgagcgcagcatgcccaattcggggattctaaccgaggtcgagctagtaaac

SEQ ID NO: 76781 - DNA, 8012 bp, Zea Mays
cataaatagggcctacccgactactccttcccctcgcgctctgccctttgcgccttcgtcaccgcgacgcgcttgcgttttccaatccttgtcttatactccgtttcgacttcgagctgggtcgatttcttcttcagctgattccttgttctcgcagatctccatcgggcgttccgctttcgtgcgacgcggggagcgagcctgtgttcggtggcggggttattgagtttgccgtttatttttttcctgcaattcgtctagttatcgtgtgcaattcgtctagtcatcgtgtcgatcttgtttcgtctcgcctcctcagcgtgtgggttgcaggattggatccgatctggtgtggggagttcgtcatgttcgcctggactcggaggcaggtcagtattctgtcagatccaacggttcattggttgtcacttggacatggattcggtggtttcaggcccaatcatctcccggtggggtaccaccagaaattgtcacttggacatggatttgaagatttcaggcttaatcgtctcccggtgcggtagcatcagaaaccgataatgcagttatagcctgcacaccaggtggatttggagaaccttcggtccgttcttatgttaacggctgatctcgcttctggtcttttggttgtttgtcctccttaaacttcagatgcatgaagggtccttgctggttatggagagatcatttgaagggtggaggtttgctattatggttcattcgccgtttctcattcctattcatcatattgtcggaagattagcaccgaacttactctaagcttcgttggaaatgctgcctctagatctgcagaggcaacctaatattggaaatagattggggcgttgattggactgcaattcgtagtattggcgagaagatcgtttggatatatttacctatcgcccatcatattattaaatttctatccgttgcagttttaatttcttacattggggtgatggttttctccagcaactcgattaaatggatggattggtggaggcgagtttgatcctgcttctgcttgtttttgggagacatcactacagagttcatccccctaaatgcataatggaagtccttgctggtattgtcctcctagatgcaaaaggaaagatcccttggttatgaatagatcggttgaagggtggaggtttgcttatgttccttggttttgatctgctatatggctatttttatgttagcaagtttgatccagcttctgcttgtgcaatcagaacttctgaattgtttagagttccttgtgtttgttcactaaccatcctcctgtcgatgttctttgaaaattaacttcacacataggctcccttaatgcttcgttagtgtctgcagttttgggagatgccactccagagttggtccccctagatgcaaaatggaaggtccttgctggtttgtcctagatgcaaaaggaagatcccttggttatggatagatcggttgaagggtggaggtttgcttacgttccttggttttggtctgatatatggctatttttatgtcaatcacggtggcgtgaagatcgccaccggactaattagaagcttggttgtccttaattggaataatgtagaggcaactgaggtgatgttttggacgtagattgaagctttgaccggactaagttcatgtcatgcagataacatcgttgggatatatgtatctctcactcttctattggcactcttaaatttcttatttcttatatttcggctgatgtttttctccagcaactggattacaacatctggattgtatatggatggattggagcctgagtttggttctgcttctgcatgagcaataataagttctgaactattcaggggtccctttttgttcaaagaacaattctatcctgtcaaatgtggtaagtttggcaattggaaatccctgtagcgaagaactgatatttaaaactggggcaggttagaaatcattccggttgtgttggttccatcacttgttttcagtgatttcatatctgaatgattggctaacattctgactctccaatgatatcgctggaacagtagtagtagtattagcagcaaggttcgagatgcggacattggaggtggattttccttgcactctggtttttcttctcttcgtgtcggtgttgctattcaagcaccttgcctgtcccgtcttgccctttgtcacttcgtcactggcgtgtttgcgttttccatttcttccttctctgtactctctgtttcgacttcgagctgggatggtttcttctccggctgatctgttctgctgctgttgcggttacgtgctcttgcagatccccttggggcattctgctttcgtgccacgcgggagtgggcctgtgtttggtggcgggattgttggatttgcggtttatttttaaggcaaatcgtctagttatcgtcgatcttgtttcgtcttcgccttctcagcatgtcggttgcaggattggatctgatctgagttcgtcatgacgttgtgtggcgatctgtttgtctgagttcggagataggttagtattctgtcagatccaatggttcattggttttgtcacttggacatggattcggtggtttcaggctcaattgttcatctcctgttgtggtaccatcagaaaccgatagtgcagttgtagcctgcataccagatgcaaggagggtccttgctggttatggaaagatcagttgaatggtggaggtttgcttatggttcattcgtcgtttctcattctgatatcatcatattggtgcaaagattagcaccagacttgctctaagcttgattggaaatgctgctggctagatctgcagaggcaacataattttggaggtagattgaggcgttgactggagtggagtttgtagcatcggcgaggatatcagttggatatatttacctatcgctcttcatattattaaatttctatctgctgcaattttaatttcttacattggggtgatggttttctccagcaactcgattatatggatggatgggttggaggcgagttttgatcctgcttgtgcaatcagaagttcggaattgttcagagttccttatgtttgttcactaaccatcctgctgtcgatgttctttgaaaatcaacttcacacacaggctcccttaatgctttgttagtgaatctgcggttttgggagaggttgaagggtggaggtttgcttacatccgttggttttgaaatgttttatggctatttttatgtcaatcatggtgccgtgaagattgccacggactaattagaagcttgattgtccttaattgaaaaaatgctgtagagggctaaaggtaacagaggtgatgttttggacgtagattgaagctttgactggactaagttcatggcatgccgataacatcatttggatatatgtatctcactttttattggtactcaaatttcttgtttcttatattcgggctggtgtttttttccagcaactgcattgtatatggatagaagtcttctcatattcttggatgggcttgtcactcggaatgtgttgagtaaacttatccaatttataaaatgctagtatatgaaccatgataaaatttagataattcttatttaatctgcagtgatagaaggcactgtgcaagtttgggatgtggtgggagatttaagcagatatgggtagaattacagcactaactttcatttaatcaaacttgtttctgctttatcattctatatgcttcaactgaagctttaactcttgtgctgctggaatttctgtgttctgcagatcatttagctcaaataattggtagtgggtcacgatacttgttttggtttgggatttctatggatgcttttgtctagcttatctatgttgttgtggttgcttttacatgtggttgtagggtaagtttggcaattaaaaatcctgtatttaaaactggggacaggtcagaatgtcattccggttgtgttgatgcaaaatgaaaggtgggctggttttgtcctcctagatgcggaaggaaaggtctgctggttatggagagatcggttgaagggtggagatttgtttacgttcgttggttttgatttgttacatggatattcttatgtcaatcatgggggtgtgaagatagccacctgattaattagaagcttgatgattgtccttgattggaaaaatgatgtagaggcaacataggtgatgttttggacgtagattgaagctttgactgaactaacttcatggcatgctctcttttattggtactcttaaatttcttgtttcttatttctgggcgggtgttcttctccagcaactggattacagcaactggattgcatatggatggatttggggcctgatttggattctgcttctgcgtcagcaataataattctgaactattcagggttccctgtgtttgttcaataactaacctaccctgtcaaatgttctttgaaaatttagttccctcataaactatctactcttcttgttttttatatttgggctggtgtttctctccaacaactggagttacaacatctggattgtatatgaatggattggagcctgagctcgattctgcttttgcatgagcaataataataagttctaaactattcagggttcaaaaaaaatcatcctatcctgtcaaatgttctttgaaatttagttcactcgtaggctaccttcaaagatatgattgtaatctgcagttttggaggcatcgcaatggagataggactttgcagttgaacttggcggcaaatgatcggacttcgtatcccacattatttgatgaatgttcatgttgtttaagtgttctcggttctcactatcaaattgatagttaccagagggggtggtcttgctgattgcagatctctaggtgggatacttgcatgggcaccgaaagatccagatctattcaaacctacaacaacctttagctcattgtgtttgttcagtgtcttctacctggaagtagataatgattggggtcattgttgcaggtcttctcatatttttgcatgggcttgttacacggaatatgtgttgggagtactaaacttatctaatttacaaaatgcaatgctagtatatgaaccatgatgaaaattcggttacttctaatttaatctgtagtggtagaaggcactggacatgtttgggacttgggagattcaagcagagatgggtagaactacaacactacaacttccattcaatcaaactgtttctgctttatcatgctatatgcttctgtggaagctttaaattcttgtgctgcaggtcatttagctcaagtaattgatagtccaacggtcatgatatttggtttgggattcctgtggatgctttcgtctggctttagctatgtttttctggttgcttttacatgtggttgcagaataattttggcaattggaaatccatgtatcaaacaactgatattcgaaactgggggcaggtcagagataattccggttgtgttggtttcgtcacttgtgttatcagtgatttaagatctgactggttggctaacattctggctctccatggatattgctgatgtagtgatgtagtaaagcaaggtttttgatacctgggtttattcgtatatcaaatgatcgtagtgtgtgttttgtgtcatttagggatgcaggctgacattggaggcggattttcctcaattggagatataacaatttggaaataaattgtgacacttgacctctcacttataacttctgtctttggcctgtaatcacttgttatgtttccagccactttaactatagcatacggcattgacgcctaggagttcttttgtgctacaacaatctaaattacaaggatgcttctaattcttcatttctgtcaacagtcctatccagttactttcttcaaccagtaactctctgtgctgcaacaatctaaattacaaggattcttctaattcttcatttctgctgccaacagtcgtatccagttacttccttcaacctgttactcttcaagtttgtgcagatgtgacacacagaagctgagatagaatttccaaccatctatgccgtcttcaaagcccatcactgttccactggccatttatttgatttgccttggatttgaaggttttttaaggctatcactgaaccaaaatagacaaaccatagatggtctctttggaaaatgtagatttagcacttgaaattttaaagttcagtctgatcctgatcataatatgtgcctatcttccgaattctactacctccaattttgctagccagagaactttcagatagtgtgcattgaagttcaagcttgattacttgtactgatctgctgtttcggatgctttggatgctccatgctagttatataatccacatgatcacaaccaagacgatacattgttcagagattgcactaactactgttcctgaatattgactgcatatcactttccatttcacttgtgatttggattgttggtggtttgcttggtttccagttatttgaaagcattaatgcttggatgttaggagtgatgaggcactcattacgatactcttcaatctaaccatttatattggatccacttggagctaaggttaggttactcctttgcactacctttattttgaagctgtccttgttaatctgcatgcctcatctgatggctcaggtccactatttgcgccgatatccagcaagaactctttcttgacaatacataacttcattgtgcaaaattggtttgttactgaaattgtaggttctttacttgagcatatgtggtcatcgtatactttttggtccaattacccaaattttctgttaggacccctactaatgtttaatctagtttctggttcgcttctaattttacttccatctgttatgtattgtttatgtcttgactttcatctggtgcatcttatctgttgtggatcaaaactaagaaaaaggatgttgctgcttctgtgcatgccaaaagaaaatctctctgaacaaacttgtcttctatgtgcttattgtttgaccatttctatcgtggactagcagtagtgccttatgatgtccatgttggcgctaagaaatgtattgcggtcagttttttgtgatatgctggatgtcttaactgtacataagattgcacgagtgtacactggctgttttttagctgtccacttgcttatcttttttttcaaattatgtctgggagcacgatcttctttgtgtgtaattgtttgtgtttcctgatttgttgtttgtttgcggtttaacactgcctttgccggtcccaagcccggatgagaaaatgtggagggaactgcagggtttcttcttagtcccatgaatggtatcagggtactgggaagaaatgttgtttggtcaaaacagctggactctgagagctcagacgggcgtaacctaaccatcaagcgcaagcggcagtacggtcacgtctccagacgggcgttacctaaccatcaactgcaagctggtagcctggtagtaatactggttcacggctgcctgcatgcaagttcttttttcccctgttgaacaagtttatttatctcattacccgctgaagaactcaacgcacagcaagctacagctacctgaagccgtttggttaatcatcgaaacaatggatacctctaatcttcttcaaagtaagccatgtacaaaagggacttaggtccttccctgggagatgtctgtaccgatggactagcttgactttagtgatgtagctgttacctggtcttaatttgttcttgtccttccgttcttgtttccatgttgatttctgttccccactcgctcctcgcagcccatttgaagttcgtcagacttacgcacagcagagagcagacacaaacttggacgagaatcggccactgcttgccatgcgaccctgagcgcagcatgcccaattcggggattctaaccgaggtcgagctagtaaac

SEQ ID NO: 76782 - DNA, 8396 bp, Zea Mays
cataaatagggcctacccgactactccttcccctcgcgctctgccctttgcgccttcgtcaccgcgacgcgcttgcgttttccaatccttgtcttatactccgtttcgacttcgagctgggtcgatttcttcttcagctgattccttgttctcgcagatctccatcgggcgttccgctttcgtgcgacgcggggagcgagcctgtgttcggtggcggggttattgagtttgccgtttatttttttcctgcaattcgtctagttatcgtgtgcaattcgtctagtcatcgtgtcgatcttgtttcgtctcgcctcctcagcgtgtgggttgcaggattggatccgatctggtgtggggagttcgtcatgttcgcctggactcggaggcaggtcagtattctgtcagatccaacggttcattggttgtcacttggacatggattcggtggtttcaggcccaatcatctcccggtggggtaccaccagaaattgtcacttggacatggatttgaagatttcaggcttaatcgtctcccggtgcggtagcatcagaaaccgataatgcagttatagcctgcacaccaggtggatttggagaaccttcggtccgttcttatgttaacggctgatctcgcttctggtcttttggttgtttgtcctccttaaacttcagatgcatgaagggtccttgctggttatggagagatcatttgaagggtggaggtttgctattatggttcattcgccgtttctcattcctattcatcatattgtcggaagattagcaccgaacttactctaagcttcgttggaaatgctgcctctagatctgcagaggcaacctaatattggaaatagattggggcgttgattggactgcaattcgtagtattggcgagaagatcgtttggatatatttacctatcgcccatcatattattaaatttctatccgttgcagttttaatttcttacattggggtgatggttttctccagcaactcgattaaatggatggattggtggaggcgagtttgatcctgcttctgcttgtgtaatcagtagttcggaattgttcagagttccttgtgtttgttcactaaccatccttctgtcaatgttcttcgaaaactaacttcacacataggctccctttaatgtttcgttagtgtatctgcagttttgggagacatcactacagagttcatccccctaaatgcataatggaagtccttgctggtattgtcctcctagatgcaaaaggaaagatcccttggttatgaatagatcggttgaagggtggaggtttgcttatgttccttggttttgatctgctatatggctatttttatgttagcaagtttgatccagcttctgcttgtgcaatcagaacttctgaattgtttagagttccttgtgtttgttcactaaccatcctcctgtcgatgttctttgaaaattaacttcacacataggctcccttaatgcttcgttagtgtctgcagttttgggagatgccactccagagttggtccccctagatgcaaaatggaaggtccttgctggtttgtcctagatgcaaaaggaagatcccttggttatggatagatcggttgaagggtggagaggcaactgaggtgatgttttggacgtagattgaagctttgaccggactaagttcatgtcatgcagataacatcgttgggatatatgtatctctcactcttctattggcactcttaaatttcttatttcttatatttcggctgatgtttttctccagcaactggattacaacatctggattgtatatggatggattggagcctgagtttggttctgcttctgcatgagcaataataagttctgaactattcaggggtccctttttgttcaaagaacaattctatcctgtcaaatgttagttcactcaggctacctaatgatcggactttatcctatcccacattatttgatgaacgttcatgctgtttgagtgttctaagttctcactaccaaatagatagttaccagagggtggtcctgctgattgcagatctctaggtgggatatttgcatgggcacagaaggaaccagatctattcaaacctacaacgaactttaactctcattgtgtttgttcagtggttctaccttgaagtagataaacttatccaatttacaaaatgctagtatatgaaccatgatgaaaatttggatacttctattttaatctgcacttctgcagtggtagaaggcactggatatgtttgggacgtaggagattcaagctgatatggggtaagtttggcaattggaaatccctgtagcgaagaactgatatttaaaactggggcaggttagaaatcattccggttgtgttggttccatcacttgttttcagtgatttcatatctgaatgattggctaacattctgactctccaatgatatcgctggaacagtagtagtagtattagcagcaaggttcgagatgcggacattggaggtggattttccttgcactctggtttttcttctcttcgtgtcggtgttgctattcaagcaccttgcctgtcccgtcttgccctttgtcacttcgtcactggcgtgtttgcgttttccatttcttccttctctgtactctctgtttcgacttcgagctgggatggtttcttctccggctgatctgttctgctgctgttgcggttacgtgctcttgcagatccccttggggcattctgctttcgtgccacgcgggagtgggcctgtgtttggtggcgggattgttggatttgcggtttatttttaaggcaaatcgtctagttatcgtcgatcttgtttcgtcttcgccttctcagcatgtcggttgcaggattggatctgatctgagttcgtcatgacgttgtgtggcgatctgtttgtctgagttcggagataggttagtattctgtcagatccaatggttcattggttttgtcacttggacatggattcggtggtttcaggctcaattgttcatctcctgttgtggtaccatcagaaaccgatagtgcagttgtagcctgcataccagatgcaaggagggtccttgctggttatggaaagatcagttgaatggtggaggtttgcttatggttcattcgtcgtttctcattctgatatcatcatattggtgcaaagattagcaccagacttgctctaagcttgattggaaatgctgctggctagatctgcagaggcaacataattttggaggtagattgaggcgttgactggagtggagtttgtagcatcggcgaggatatcagttggatatatttacctatcgctcttcatattattaaatttctatctgctgcaattttaatttcttacattggggtgatggttttctccagcaactcgattatatggatggatgggttggaggcgagttttgatcctgcttgtgcaatcagaagttcggaattgttcagagttccttatgtttgttcactaaccatcctgctgtcgatgttctttgaaaatcaacttcacacacaggctcccttaatgctttgttagtgaatctgcggttttgggagaggttgaagggtggaggtttgcttacatccgttggttttgaaatgttttatggctatttttatgtcaatcatggtgccgtgaagattgccacggactaattagaagcttgattgtccttaattgaaaaaatgctgtagagggctaaaggtaacagaggtgatgttttggacgtagattgaagctttgactggactaagttcatggcatgccgataacatcatttggatatatgtatctcactttttattggtactcaaatttcttgtttcttatattcgggctggtgtttttttccagcaactgcattgtatatggatagaagtcttctcatattcttggatgggcttgtcactcggaatgtgttgagtaaacttatccaatttataaaatgctagtatatgaaccatgataaaatttagataattcttatttaatctgcagtgatagaaggcactgtgcaagtttgggatgtggtgggagatttaagcagatatgggtagaattacagcactaactttcatttaatcaaacttgtttctgctttatcattctatatgcttcaactgaagctttaactcttgtgctgctggaatttctgtgttctgcagatcatttagctcaaataattggtagtgggtcacgatacttgttttggtttgggatttctatggatgcttttgtctagcttatctatgttgttgtggttgcttttacatgtggttgtagggtaagtttggcaattaaaaatcctgtatttaaaactggggacaggtcagaatgtcattccggttgtgttgatgcaaaatgaaaggtgggctggttttgtcctcctagatgcggaaggaaaggtctgctggttatggagagatcggttgaagggtggagatttgtttacgttcgttggttttgatttgttacatggatattcttatgtcaatcatgggggtgtgaagatagccacctgattaattagaagcttgatgattgtccttgattggaaaaatgatgtagaggcaacataggtgatgttttggacgtagattgaagctttgactgaactaacttcatggcatgctctcttttattggtactcttaaatttcttgtttcttatttctgggcgggtgttcttctccagcaactggattacagcaactggattgcatatggatggatttggggcctgatttggattctgcttctgcgtcagcaataataattctgaactattcagggttccctgtgtttgttcaataactaacctaccctgtcaaatgttctttgaaaatttagttccctcataaactatctactcttcttgttttttatatttgggctggtgtttctctccaacaactggagttacaacatctggattgtatatgaatggattggagcctgagctcgattctgcttttgcatgagcaataataataagttctaaactattcagggttcaaaaaaaatcatcctatcctgtcaaatgttctttgaaatttagttcactcgtaggctaccttcaaagatatgattgtaatctgcagttttggaggcatcgcaatggagataggactttgcagttgaacttggcggcaaatgatcggacttcgtatcccacattatttgatgaatgttcatgttgtttaagtgttctcggttctcactatcaaattgatagttaccagagggggtggtcttgctgattgcagatctctaggtgggatacttgcatgggcaccgaaagatccagatctattcaaacctacaacaacctttagctcattgtgtttgttcagtgtcttctacctggaagtagataatgattggggtcattgttgcaggtcttctcatatttttgcatgggcttgttacacggaatatgtgttgggagtactaaacttatctaatttacaaaatgcaatgctagtatatgaaccatgatgaaaattcggttacttctaatttaatctgtagtggtagaaggcactggacatgtttgggacttgggagattcaagcagagatgggtagaactacaacactacaacttccattcaatcaaactgtttctgctttatcatgctatatgcttctgtggaagctttaaattcttgtgctgcaggtcatttagctcaagtaattgatagtccaacggtcatgatatttggtttgggattcctgtggatgctttcgtctggctttagctatgtttttctggttgcttttacatgtggttgcagaataattttggcaattggaaatccatgtatcaaacaactgatattcgaaactgggggcaggtcagagataattccggttgtgttggtttcgtcacttgtgttatcagtgatttaagatctgactggttggctaacattctggctctccatggatattgctgatgtagtgatgtagtaaagcaaggtttttgatacctgggtttattcgtatatcaaatgatcgtagtgtgtgttttgtgtcatttagggatgcaggctgacattggaggcggattttcctcaattggagatataacaatttggaaataaattgtgacacttgacctctcacttataacttctgtctttggcctgtaatcacttgttatgtttccagccactttaactatagcatacggcattgacgcctaggagttcttttgtgctacaacaatctaaattacaaggatgcttctaattcttcatttctgtcaacagtcctatccagttactttcttcaaccagtaactctctgtgctgcaacaatctaaattacaaggattcttctaattcttcatttctgctgccaacagtcgtatccagttacttccttcaacctgttactcttcaagtttgtgcagatgtgacacacagaagctgagatagaatttccaaccatctatgccgtcttcaaagcccatcactgttccactggccatttatttgatttgccttggatttgaaggttttttaaggctatcactgaaccaaaatagacaaaccatagatggtctctttggaaaatgtagatttagcacttgaaattttaaagttcagtctgatcctgatcataatatgtgcctatcttccgaattctactacctccaattttgctagccagagaactttcagatagtgtgcattgaagttcaagcttgattacttgtactgatctgctgtttcggatgctttggatgctccatgctagttatataatccacatgatcacaaccaagacgatacattgttcagagattgcactaactactgttcctgaatattgactgcatatcactttccatttcacttgtgatttggattgttggtggtttgcttggtttccagttatttgaaagcattaatgcttggatgttaggagtgatgaggcactcattacgatactcttcaatctaaccatttatattggatccacttggagctaaggttaggttactcctttgcactacctttattttgaagctgtccttgttaatctgcatgcctcatctgatggctcaggtccactatttgcgccgatatccagcaagaactctttcttgacaatacataacttcattgtgcaaaattggtttgttactgaaattgtaggttctttacttgagcatatgtggtcatcgtatactttttggtccaattacccaaattttctgttaggacccctactaatgtttaatctagtttctggttcgcttctaattttacttccatctgttatgtattgtttatgtcttgactttcatctggtgcatcttatctgttgtggatcaaaactaagaaaaaggatgttgctgcttctgtgcatgccaaaagaaaatctctctgaacaaacttgtcttctatgtgcttattgtttgaccatttctatcgtggactagcagtagtgccttatgatgtccatgttggcgctaagaaatgtattgcggtcagttttttgtgatatgctggatgtcttaactgtacataagattgcacgagtgtacactggctgttttttagctgtccacttgcttatcttttttttcaaattatgtctgggagcacgatcttctttgtgtgtaattgtttgtgtttcctgatttgttgtttgtttgcggtttaacactgcctttgccggtcccaagcccggatgagaaaatgtggagggaactgcagggtttcttcttagtcccatgaatggtatcagggtactgggaagaaatgttgtttggtcaaaacagctggactctgagagctcagacgggcgtaacctaaccatcaagcgcaagcggcagtacggtcacgtctccagacgggcgttacctaaccatcaactgcaagctggtagcctggtagtaatactggttcacggctgcctgcatgcaagttcttttttcccctgttgaacaagtttatttatctcattacccgctgaagaactcaacgcacagcaagctacagctacctgaagccgtttggttaatcatcgaaacaatggatacctctaatcttcttcaaagtaagccatgtacaaaagggacttaggtccttccctgggagatgtctgtaccgatggactagcttgactttagtgatgtagctgttacctggtcttaatttgttcttgtccttccgttcttgtttccatgttgatttctgttccccactcgctcctcgcagcccatttgaagttcgtcagacttacgcacagcagagagcagacacaaacttggacgagaatcggccactgcttgccatgcgaccctgagcgcagcatgcccaattcggggattctaaccgaggtcgagctagtaaac

SEQ ID NO: 76783 - DNA, 8110 bp, Zea Mays
ataaacacccgcccgtcccgtgtccgccagggattcgacctgctcctccaccgcctctcctcgcccataaatagggcctacccgactactccttcccctcgcgctctgccctttgcgccttcgtcaccgcgacgcgcttgcgttttccaatccttgtcttatactccgtttcgacttcgagctgggtcgatttcttcttcagctgattccttgttctcgcagatctccatcgggcgttccgctttcgtgcgacgcggggagcgagcctgtgttcggtggcggggttattgagtttgccgtttatttttttcctgcaattcgtctagttatcgtgtgcaattcgtctagtcatcgtgtcgatcttgtttcgtctcgcctcctcagcgtgtgggttgcaggattggatccgatctggtgtggggagttcgtcatgttcgcctggactcggaggcaggtcagtattctgtcagatccaacggttcattggttgtcacttggacatggattcggtggtttcaggcccaatcatctcccggtggggtaccaccagaaattgtcacttggacatggatttgaagatttcaggcttaatcgtctcccggtgcggtagcatcagaaaccgataatgcagttatagcctgcacaccaggtggatttggagaaccttcggtccgttcttatgttaacggctgatctcgcttctggtcttttggttgtttgtcctccttaaacttcagatgcatgaagggtccttgctggttatggagagatcatttgaagggtggaggtttgctattatgatctgcagaggcaacctaatattggaaatagattggggcgttgattggactgcaattcgtagtattggcgagaagatcgtttggatatatttacctatcgcccatcatattattaaatttctatccgttgcagttttaatttcttacattggggtgatggttttctccagcaactcgattaaatggatggattggtggaggcgagtttgatcctgcttctgcttgtgtaatcagtagttcggaattgttcagagttccttgtgtttgttcactaaccatccttctgtcaatgttcttcgaaaactaacttcacacataggctccctttaatgtttcgttagtgtatctgcagttttgggagacatcactacagagttcatccccctaaatgcataatggaagtccttgctggtattgtcctcctagatgcaaaaggaaagatcccttggttatgaatagatcggttgaagggtggaggtttgcttatgttccttggttttgatctgctatatggctatttttatgttagcaagtttgatccagcttctgcttgtgcaatcagaacttctgaattgtttagagttccttgtgtttgttcactaaccatcctcctgtcgatgttctttgaaaattaacttcacacataggctcccttaatgcttcgttagtgtctgcagttttgggagatgccactccagagttggtccccctagatgcaaaatggaaggtccttgctggtttgtcctagatgcaaaaggaagatcccttggttatggatagatcggttgaagggtggaggtttgcttacgttccttggttttggtctgatatatggctatttttatgtcaatcacggtggcgtgaagatcgccaccggactaattagaagcttggttgtccttaattggaataatgtagaggcaactgaggtgatgttttggacgtagattgaagctttgaccggactaagttcatgtcatgcagataacatcgttgggatatatgtatctctcactcttctattggcactcttaaatttcttatttcttatatttcggctgatgtttttctccagcaactggattacaacatctggattgtatatggatggattggagcctgagtttggttctgcttctgcatgagcaataataagttctgaactattcaggggtccctttttgttcaaagaacaattctatcctgtcaaatggtaagtttggcaattggaaatccctgtagcgaagaactgatatttaaaactggggcaggttagaaatcattccggttgtgttggttccatcacttgttttcagtgatttcatatctgaatgattggctaacattctgactctccaatgatatcgctggaacagtagtagtagtattagcagcaaggttcgagatgcggacattggaggtggattttccttgcactctggtttttcttctcttcgtgtcggtgttgctattcaagcaccttgcctgtcccgtcttgccctttgtcacttcgtcactggcgtgtttgcgttttccatttcttccttctctgtactctctgtttcgacttcgagctgggatggtttcttctccggctgatctgttctgctgctgttgcggttacgtgctcttgcagatccccttggggcattctgctttcgtgccacgcgggagtgggcctgtgtttggtggcgggattgttggatttgcggtttatttttaaggcaaatcgtctagttatcgtcgatcttgtttcgtcttcgccttctcagcatgtcggttgcaggattggatctgatctgagttcgtcatgacgttgtgtggcgatctgtttgtctgagttcggagataggttagtattctgtcagatccaatggttcattggttttgtcacttggacatggattcggtggtttcaggctcaattgttcatctcctgttgtggtaccatcagaaaccgatagtgcagttgtagcctgcataccagatgcaaggagggtccttgctggttatggaaagatcagttgaatggtggaggtttgcttatggttcattcgtcgtttctcattctgatatcatcatattggtgcaaagattagcaccagacttgctctaagcttgattggaaatgctgctggctagatctgcagaggcaacataattttggaggtagattgaggcgttgactggagtggagtttgtagcatcggcgaggatatcagttggatatatttacctatcgctcttcatattattaaatttctatctgctgcaattttaatttcttacattggggtgatggttttctccagcaactcgattatatggatggatgggttggaggcgagttttgatcctgcttgtgcaatcagaagttcggaattgttcagagttccttatgtttgttcactaaccatcctgctgtcgatgttctttgaaaatcaacttcacacacaggctcccttaatgctttgttagtgaatctgcggttttgggagaggttgaagggtggaggtttgcttacatccgttggttttgaaatgttttatggctatttttatgtcaatcatggtgccgtgaagattgccacggactaattagaagcttgattgtccttaattgaaaaaatgctgtagagggctaaaggtaacagaggtgatgttttggacgtagattgaagctttgactggactaagttcatggcatgccgataacatcatttggatatatgtatctcactttttattggtactcaaatttcttgtttcttatattcgggctggtgtttttttccagcaactgcattgtatatggatagaagtcttctcatattcttggatgggcttgtcactcggaatgtgttgagtaaacttatccaatttataaaatgctagtatatgaaccatgataaaatttagataattcttatttaatctgcagtgatagaaggcactgtgcaagtttgggatgtggtgggagatttaagcagatatgggtagaattacagcactaactttcatttaatcaaacttgtttctgctttatcattctatatgcttcaactgaagctttaactcttgtgctgctggaatttctgtgttctgcagatcatttagctcaaataattggtagtgggtcacgatacttgttttggtttgggatttctatggatgcttttgtctagcttatctatgttgttgtggttgcttttacatgtggttgtagggtaagtttggcaattaaaaatcctgtatttaaaactggggacaggtcagaatgtcattccggttgtgttgatgcaaaatgaaaggtgggctggttttgtcctcctagatgcggaaggaaaggtctgctggttatggagagatcggttgaagggtggagatttgtttacgttcgttggttttgatttgttacatggatattcttatgtcaatcatgggggtgtgaagatagccacctgattaattagaagcttgatgattgtccttgattggaaaaatgatgtagaggcaacataggtgatgttttggacgtagattgaagctttgactgaactaacttcatggcatgctctcttttattggtactcttaaatttcttgtttcttatttctgggcgggtgttcttctccagcaactggattacagcaactggattgcatatggatggatttggggcctgatttggattctgcttctgcgtcagcaataataattctgaactattcagggttccctgtgtttgttcaataactaacctaccctgtcaaatgttctttgaaaatttagttccctcataaactatctactcttcttgttttttatatttgggctggtgtttctctccaacaactggagttacaacatctggattgtatatgaatggattggagcctgagctcgattctgcttttgcatgagcaataataataagttctaaactattcagggttcaaaaaaaatcatcctatcctgtcaaatgttctttgaaatttagttcactcgtaggctaccttcaaagatatgattgtaatctgcagttttggaggcatcgcaatggagataggactttgcagttgaacttggcggcaaatgatcggacttcgtatcccacattatttgatgaatgttcatgttgtttaagtgttctcggttctcactatcaaattgatagttaccagagggggtggtcttgctgattgcagatctctaggtgggatacttgcatgggcaccgaaagatccagatctattcaaacctacaacaacctttagctcattgtgtttgttcagtgtcttctacctggaagtagataatgattggggtcattgttgcaggtcttctcatatttttgcatgggcttgttacacggaatatgtgttgggagtactaaacttatctaatttacaaaatgcaatgctagtatatgaaccatgatgaaaattcggttacttctaatttaatctgtagtggtagaaggcactggacatgtttgggacttgggagattcaagcagagatgggtagaactacaacactacaacttccattcaatcaaactgtttctgctttatcatgctatatgcttctgtggaagctttaaattcttgtgctgcaggtcatttagctcaagtaattgatagtccaacggtcatgatatttggtttgggattcctgtggatgctttcgtctggctttagctatgtttttctggttgcttttacatgtggttgcagaataattttggcaattggaaatccatgtatcaaacaactgatattcgaaactgggggcaggtcagagataattccggttgtgttggtttcgtcacttgtgttatcagtgatttaagatctgactggttggctaacattctggctctccatggatattgctgatgtagtgatgtagtaaagcaaggtttttgatacctgggtttattcgtatatcaaatgatcgtagtgtgtgttttgtgtcatttagggatgcaggctgacattggaggcggattttcctcaattggagatataacaatttggaaataaattgtgacacttgacctctcacttataacttctgtctttggcctgtaatcacttgttatgtttccagccactttaactatagcatacggcattgacgcctaggagttcttttgtgctacaacaatctaaattacaaggatgcttctaattcttcatttctgtcaacagtcctatccagttactttcttcaaccagtaactctctgtgctgcaacaatctaaattacaaggattcttctaattcttcatttctgctgccaacagtcgtatccagttacttccttcaacctgttactcttcaagtttgtgcagatgtgacacacagaagctgagatagaatttccaaccatctatgccgtcttcaaagcccatcactgttccactggccatttatttgatttgccttggatttgaaggttttttaaggctatcactgaaccaaaatagacaaaccatagatggtctctttggaaaatgtagatttagcacttgaaattttaaagttcagtctgatcctgatcataatatgtgcctatcttccgaattctactacctccaattttgctagccagagaactttcagatagtgtgcattgaagttcaagcttgattacttgtactgatctgctgtttcggatgctttggatgctccatgctagttatataatccacatgatcacaaccaagacgatacattgttcagagattgcactaactactgttcctgaatattgactgcatatcactttccatttcacttgtgatttggattgttggtggtttgcttggtttccagttatttgaaagcattaatgcttggatgttaggagtgatgaggcactcattacgatactcttcaatctaaccatttatattggatccacttggagctaaggttaggttactcctttgcactacctttattttgaagctgtccttgttaatctgcatgcctcatctgatggctcaggtccactatttgcgccgatatccagcaagaactctttcttgacaatacataacttcattgtgcaaaattggtttgttactgaaattgtaggttctttacttgagcatatgtggtcatcgtatactttttggtccaattacccaaattttctgttaggacccctactaatgtttaatctagtttctggttcgcttctaattttacttccatctgttatgtattgtttatgtcttgactttcatctggtgcatcttatctgttgtggatcaaaactaagaaaaaggatgttgctgcttctgtgcatgccaaaagaaaatctctctgaacaaacttgtcttctatgtgcttattgtttgaccatttctatcgtggactagcagtagtgccttatgatgtccatgttggcgctaagaaatgtattgcggtcagttttttgtgatatgctggatgtcttaactgtacataagattgcacgagtgtacactggctgttttttagctgtccacttgcttatcttttttttcaaattatgtctgggagcacgatcttctttgtgtgtaattgtttgtgtttcctgatttgttgtttgtttgcggtttaacactgcctttgccggtcccaagcccggatgagaaaatgtggagggaactgcagggtttcttcttagtcccatgaatggtatcagggtactgggaagaaatgttgtttggtcaaaacagctggactctgagagctcagacgggcgtaacctaaccatcaagcgcaagcggcagtacggtcacgtctccagacgggcgttacctaaccatcaactgcaagctggtagcctggtagtaatactggttcacggctgcctgcatgcaagttcttttttcccctgttgaacaagtttatttatctcattacccgctgaagaactcaacgcacagcaagctacagctacctgaagccgtttggttaatcatcgaaacaatggatacctctaatcttcttcaaagtaagccatgtacaaaagggacttaggtccttccctgggagatgtctgtaccgatggactagcttgactttagtgatgtagctgttacctggtcttaatttgttcttgtccttccgttcttgtttccatgttgatttctgttccccactcgctcctcgcagcccatttgaagttcgtcagacttacgcacagcagagagcagacacaaacttggacgagaatcggccactgcttgccatgcgaccctgagcgcagcatgcccaattcggggattctaaccgaggtcgagctagtaaac

SEQ ID NO: 76784 - DNA, 3294 bp, Zea Mays
gacagcactccggagctccaccattcgattgggcaactcgtcaccgtaccaaccaaaccatcattccagccgcggcgggacacaccgcctccgccgaactaacgcgacgacgacgcacggcggcctcgtccggcaccggcaggagcgcgatggggcagaagcgcgccttgctggtgggcatcaactacctgggcacggacggggagctgaagggatgcctcaacgacgtggcccgcatgcgccgctgcctggtgggccgcttcgggttcgacgaggccgacatccgtgtcctggccgacgccgacccgtccacgccgccgcccactggggccaacatccggctggagctcgagcggctcgtggcgggcgcgcgccccggggacgcgctcttcttccactacagcggccacggcctgcagctccccgccgagactggggaggacgacgacaccgggtacgacgagtgcatcgtgccatgcgacctcaacttgatcaaaggtgtgctctcccatctgtttttctctgcgtttagcagcgagcacttaggatcgagcgttagttgcattcgtaggcacaccgttggtatctgatggttaggttccgctagccttcatacagtatcccctccgaagacgagcttagtaacaagggttgcatgtatgggtcgcaaatctatcatgtaattaacaaacgactagataattttgtgggctgccatatgcaccttttcctgatctccatgcagaccaagatttcacggatctcgtggccaaggtccctgacggctgccgcttcaccatggtctcggactcgtgccacagcggcggcctgatcgacaagaccaaggagcaaatcgggaacagcaccaagcagaacagaacccagcagcgccgagagcgcgaaatgaagcctcctcctcccgctcccggttccgcactccgcgtctccctcgcgcgaatcgtccgtggcgtgctggagtctctgggtgtgcaagtgcgaaggggcggcgatccaagatcacacaaaggacaggggaaatcgaagccaccgagcccccacacgtcgccatcgccgtgatcgattataccgccgtctcctccccccgcagcccgcacccaccccaccggaaccgtcgtcccgacctctcgccagcgataagcaaatccccgcctcactctctcgtccacagacaaagccacgacccacaagtgcccccctcctcccgcgctcccaaatcactccctctctgtctctccactccactcgccgccgccgccgcccgaatctcaatggcgtccgcggccgccccgccaacctccctctccctcgcggcccgtgcggcaagcagggcggccgccgccccgctccgcaggggaggcctcgccgcggcgcgccagccggcgcggtcgctggcgttcgcggcgggcgacgcgcggctcgcggtccacgtcgcgtcgcggtgccggcaggcgtcctccgcgcgcggcacgcgggccatggccaccatggcgaagaagagcgtcggggacctcacggaggccgacctcaaggggaagcgcgtcttcgtgcgtgccgacctcaacgtgccgctcgacgagaaccagaacatcaccgacgacacccgcatccgggccgccatccccaccatccagtacctcctcggcaagggcgccaaagtcatcctctcaagccacttgggtcgccctaagggttttacacccaagtttagcttagccccccttgttgcacggttgtctgagcttcttggcattcagcgtgtgtactatacccacgaataggtgcaaaaagccgacgatgttattggccctgaagttgagaagctggtggccgccttgcccaatggtggggttttgctccttgagaacgtaagattctacaaggaagaggagaagaatgacccagagtttgcgcagaagcttgcctccgtagcagatctttacgttaatgacgcgtttggaacagcccacagggcacatgcatcgactgagggagttacaaagttcttgaagccttctgttgcagggttccttttgcagaaggagcttgactaccttgtcggagctgtttcaagccctacacgcccatttgctgccatcgtgggtggttcaaaggtgtcatccaagatcggggttattgaatccttgttggagaagtgtgatatccttctcttgggtggtggtatgatcttcacattttacaaggcacaaggtctttctgtcggtgcttcgttggttgaggaagacaaactcgatcttgcaacatctctacttgcaaaggctaaggaaaagggtgtctcccttatgttgccaaccgatgttgtcatcgctgataagtttgctcctgatgctaacagccagattgttccagcatctgcaattcctgatggttggatggggctggatattggcccagattccattgctgcattcaacgcagccctggaaacaacccagactgtcatctggaacgggcccatgggtgtttttgaatatgacaagttcgctataggaactgaggctgtggcaaagaagttggcagaacttagccgcaagggtgtgacaactatcatcggaggtggagactctgtcgccgccgttgagaaggtcggagttgctgacgttatgagccacatttccaccggaggtggtgccagcttggaattgttggaaggaaaggagcttccaggagttactgcattggatgaagcagccactgtgactgtatgaagcaagttttcattttgtttcatcttcttttttggaagttaccgggggagggactcccacctgaataaggtgcgcaaggccaggattgttggctcaaccacagggagcgcacgccaccgcatcatcttcatgtaccattgtatacttgctacattcttgcttgctcctcctcagccgctcgaaatgtaggagatcaatgatttatagagctctggaaatcgtttgaacaaggagtaagcgacccaagtaatatgcttactgagtcatctttcctttgtgacgtaacaaattacataaaaacccttcgaaggtaacctagcctattcaaccattggtaactaggagttttatcctttgtgcaccaggaccagctttgccgagctaagtgtgaattttcttttctgttctttgtcaaagaagcaaactctagcgtcatgcctcgttagaatctagattttacgttatggagttctgctgctgaatctttttctgggccatgacattgtaaaattactgtttggtctctggcacaattttttttcgcttt

SEQ ID NO: 76785 - DNA, 1345 bp, Zea Mays
ataactcgcattaaaagattctccccctatgtctggtatgtctccaataattcacagtatctgtattcccctataccaactacctcaaacaaaagaaaattaaaaaatgaaaaaaaatacagccgacgtcttcactagcaccttctcgtacagcgaagtagcgaacaatgcttaccgggaggacttggtcaccggaaacatatgtgcattttcttcctcttcctcacctcaagttcgggcaatatttacgggctgcgttggagccgttcgggagacactgtgccccctacgttcggtccggggagatcccggagatataaggagcaccgttggagagagcctaacagcgttgattggtgggtggaggttagacaccagaggctgatggagcagaggtcgtaggcacaaataggtggaggccatggaggcgcagtaggagccgtgaattggtggagcggaaggggctggagtgacttgatgaggcagcaggacttgccgctggattccaggaagcagttcatacgaacatagtatgtttatgactgcttgggggaagtagtcagcgaagttccagacatcggtgcatctgatgttattgctgatgataagcttggcaaagggaagcagaaaccatataagcaatgaagaggccgtgcgaggggttgtgtgagaggctgccgcagtggactgtggaacttggcggaggttgtcacaactcatgaacatttcgtcgagaaccaatctagcaagctagccggcctagaagtggagatagctgatgaggtctccggtgcaactgaagcaaaagaggttactacaccaatgagcagtgccagggcttttccctaagaaacattgacatgaatgtagatccaactgatgaagaggatgagattacagtgccacccccaagccccagtcatcaggtccagcaactaagttagctgcagccagtttaggactaactgctccagcgactagttccattgcaggcattgcaggactatctgtcccactttctgggtgcttgggaactgcctgacatgaacgatatggagatgtgccatgtccagtttgctttgtcaaaaaaaaaatattggagaggatggggattttgacaatcaagacttgttccacctctatagcttcagaggggataagtaggatagctccagtttgttttgtcagccttgcggctgaactgtggaaagctgagcaccgtggtgttcgatgttcttagcaggttctccttatgggttagccaatttcaactgtgtcttgaagcctgaatgtacctttcatttcaattgctctcacatgtggtgctcatggccttccgaggctg

SEQ ID NO: 76786 - DNA, 589 bp, Zea Mays
accaactagtactaggagcacataaagaaaaagattataaatgtgacgagtttgactttcaggcttttctgagagttaaaagaaaaagatacataattcatgtacatctgcttattttttggaagataacaacaactaacatacttgcacacatgtattctatggaatttgctggtttcctattttgtagcaaatattaataataacctgacatctaataacagtaaggatccttggggaacttgctcagcaagatagcctcttttgtatggcttttcttcctctcttttatataagatgtgcagttctcctgcgcgttcgagaaaaaaaaaacagtaacatctaactacaattgaaagttaagttatcagaagagaacccgtccaaaataaagaggaactctgaaaatgaaaagcaagttgacaaagatatcattacctaggcatatagggcattgcacttccttccgaacatccactaatttcacaagcgtaaacctgtagtaagaaaacattcaggtagcagtatgaatcttttgaccgtagcgaggacaaatcctttattattcatttttattaaaaaaacattc

SEQ ID NO: 76787 - DNA, 1668 bp, Zea Mays
atggggctgctgagctccgccaacagatgcggctgcaagaacatcctgagctgcaacctactaaggtgcgcgtgctgctgctcgtggatccgctccgtctgcggcggcaggacgacgacgagcaataaggcggccgcgcagcaggaggcgtcggacgcggagaggaaggcgaagaggaagttggcccgtggcttgtgcggcggagcggtgcgagaggcggaggagcccctgacgtcggaggcgaagaagaagaggacgaacacggcggcgacgatccccgagccgcagaagtgcaagtggacgaagaaggcgcggaagaaaaagaagacgaagaatgagcagaacgggctggcagccctagtggaggagatctcgctctcgaacagtcccaagcacagggcagcagcaggggagatactgcggatcggcaaccacaacatccccagcagggtgtttacgttccgtgaactggtggacgccaccaactctttctgcccagaaaacctgctgggcgagggcggcttcgggagggtgtacaagggatgcattccagacaccatggaagtcatagcggttaagcagctcgacaaagatgggctgcaaggtaaccgtgagttcctcgtcgaggtgctgatgcttagcctgctgcaccatccaaacctagtcaccttggtcgggtacagcacagactgtgaccagaggatcctagtgtacgagtacatgtcactcggttcactgcaagaccatctcctcgatctcagtccgaaatcccagccactttcctggcacacacggatgaagatcgcagtgggtgcagctagaggcatcgagtacttgcacgaggtagccaacccgccagtgatctaccgcgatctcaaggcatccaacatcctcttggacgcaagcttcaacgcgaagctgtcggacttcggtctggccaagcttggtccgagcggcgacaacacccatgtcagcacaagggtgatgggcacgtacggctactgcgctccagagtacgccatgactggcaagctgaccaagacatctgacatctatagctttggcgtggttctcttggagctcatcactgggaggcgagcgatcgacaccacgaaaccaactcgggagcagatccttgttcactgggcagcaccattcttcagggataagaggaagtttgtgaagatggccgacccattgcttgacatgaagtttcctctgaaaggtctgtaccaagcactcgcgatctcatccatgtgcttgcaagaagaagcaagcagtaggccgctgatcagcgatgtcgtgaccgcccttacatttcttgctgatccaaactatgaccctccggatgacatcaaggatcctctgcccataacagttccaaacctagacatggaaacaactggccaaaacggaacagaaggaggtaaagaacaattgcagcaaaacgaaggagaaagccgccattccacaaaaaacgaagaagaaggtagctgaaatgtggctttctctggaattacgaaatgttaaatcaagccagagctagctccttgaatgaaactaacaggtggacgtggtttggttaggtgtaatcaatttctcaacattcttgaaaccggtgtatgtcatataggcaaagatgtaatatcagctcattttcttgaatga

SEQ ID NO: 76788 - DNA, 2402 bp, Zea Mays
ctttaaccagaaattgttatagcattgttattttgtgaagctgcatgtgaggtattgcgtcaagtctgacatgcaggtagaagttgacagccttgcagtggcagtgcccccatgccaccatgtcaccgcatctgtacattatttgtggtccaaaggcagaaacaaacaactggacgtgaagttggcagcctctggttttacagatagagtgtttaactgagagttcataggtcaatgaacataagacatgcatctactccatatatttgattactgcccacgagattagcaggctggcttgcgcatccaacctaccgcttgatttaatcaaagtagcaagacagctcttgcagcagtcttgctgctcctcaaaaaaggctcggaccaatacaagctgcagcaacagccatggcttcagcgaagcagagcaagaagatgcgcatacttctgatcccattcttcgccaccagccacatcgggccctacatcgacttcgccgtccgtctcgcggcagccaggccaggagccgtcgagcccaccgtcgccgtgaccccggccaatgttgcggtggtccggtcggcgctcgagcgccacggccccgcggcgagcggcacggtcaggatcgtcacgtacccgttcccgcgcgtggatggcctcgctccgggcgtggagaacctctccaccgccggagacgacgcgtggcgcatcgacgccgccgccatcgacgaggccctctcgcggccggcgcaggaggcgctcctcagggagcggtcccccgacgccgtcgtgtcggactaccacttcttctggaccagcagcatcgccgccgagctgggcctgccggccggagatacggatccccgtcagcgagctgccggagttcctgagacgcccggcgaaggaccaaggcacgttcagcccctgcaacgcggcgcaggccaggtgtttgggcgtcgcctacaacacgttcgcaggcatggagcaggagtaccgcgaggcgaacgtgcgcgccaaatccttgaagcgctgctacttcgtcggccccgtctcactgccgctgccggcggcagcggcaggcaccagcgagtctccatgcatcaggtggctcgactccaggccaagctgctcggtggtgtacgtgtgcttcggcacctacgccgccatctcggaggaccagctccgggagctggcgctcggcctggaggcctcaggggagccgttcctgtgggtggtgagggccgacgggtggacgccgccggagggctgggagcagcgcgtcggggagagggggatgctggtgagagggtgggctccgcagacggcggtgctggcccatccagcggtgggcgcgttcctgacgcactgcgggtcgagctcgttgctggaggcggcggcggccggcgtgccgatgctgacgtggccgctggtgttcgaccagttcatcgaggagaggctggtgacggacgtgctcgggatcggggagcgggtctggagtggggcgcggagcacgaggtacgaggagagggagctcgtgccggcggaggcggtggctcgggcggtggcgaggttcttggagccaggcgggccgggggaggcggcgaggggcagggcgcgggatctcgcagtgaaggcccacgctgccgtagcggagggcggctcgtcgtcccgtgatctgcatcgcctcatcgacgacctggtcgaagccagagcggcaacgagcagctgcaacgctgacagcgagtaagagatggaattgctggagatgtctcgatctggcgagcaactggaagaaggtctcgaacagccttcacggacaagtacgccatctgcaacgtacgtacgttctcggagtcgaagaaaacacttatggaaataatatggtactgcaccacctcgatttctgtcactcgtgcttgctttgcttcccaagatattgtgccagcaggagctgtcgccatctccgatccaccgcaaaccaaaccgcttggtagttggcagctatttatttttctgaggaacaaaagaatggttcaaaaggttacgaacagtttcaggggcgtgcctgtaaaaaccgaggaccttaccaaactacggtcttctcacaaccaaagctagaaaaagcaaacacctggcctggcctaaagaagaatggtccaattttaatctcttgtttatttaggttggtttctagaaccacgtattggatcactccagtgcggcacgaagccgctgacgctgagtaggctcctatgccactagcacggtggagtagcgcgggttgaccaactcagggcctattcgtttttcacgcattaaaggcctggaacaatttttgctcggattgtttctctaatttatgtaaattttgataagttggaataaatactggtctaattctggac

SEQ ID NO: 76789 - DNA, 2235 bp, Zea Mays
agggccgggtagtttcttccgcacatagggtgtgccggtgtagtgtcggggaagctcttagagctccatttccttatagtgatagtacacggtagcataggtggagggggtgtgaggtgtgtgtggttggagtggggctaacaattgagcctgccgcgcacaatcaatggccgcgctcgagtccaacaagaagctgcgcctccttctcgtgcccttcttcgccaccagtcacataggcccgttcaccgacttcgccgtccgtctagccacagccaacccggacgccgtcgagctcactctcgccgtcaccccggcgaacgtccacgtggttcgctcggccctcgggcggtacggcgccgaggcgggcggcgtggtcaagattgccacctacccgttcccgcgcgtggacggcctcgctccgggcgtggagaacctctcggccgccggggacgacgggtggcgcattgatgccgtcgccgtcgacgaggcctcgacgcgaccggcgcaggaggcgctcatcagggaacagtcccctgacgccgtcatcaccgacgtccacttcatctggaacaacgccgtggccggcgagctcggcgtgccgtgcgttacgttcagcgtcgttggcatcttctcgacgctcgtcatgtaccacctcggccgtgacgtcgtcatcagagatggccaggaggtgaccgtccctgggttgccgcttgccggggccggagatacggatccccgtatccgagttgccggagttcctgagacgccggcaggagcacgacggggtcaggcggtgccatgtggagatgggcaggtgcttcggcgtcaccctcaactcgttcgtggatctggagcagccatactgcgacatgtgcgtgagcagcggatacctgaagcgcgcctacttcgtcgggcccctctcgctgccgttaccaccggccggagcaagcaccagagattcgccatgcctcgcgtggctcgacaccaagccgaggttttcagtggtgtacgtatgcttcggcaccttcgctgccatctcggaggaccagctccgggaactggcgcttgggctagaagcttcaaagaagccattcctgtgggtggtgagggcggacggatggacgccgccggaggggtgggaggagcgcgtcggagagagggggatgctagtgagagggtgggcgccgcagacggcgatactgtcccatccagcggttggcgcgttcctgacgcactgcgggtcgagctcgctgctggaggcggcggcggccggcgtgccgatgctgacgtggccgctggtgttcgaccagttcatcgaggagagactggtgacggaggtcctcaagatcggggagagggtgtggagcgggacacggagcacgagatacgaggagcaaaaggtcgtggcatggcagcagaggtagtggcgcgagcggtggcaaggttcttggagccgggtggcaccggcgaggcggcgaggagcaaggcgggggtgctcgctgcgaaggcgcgctcggctgtggcggagggtggctcgtcattctgtgatctgcgccgtctcgtcaatgacctgatcgaagcaagaacggctgccggaaccaacgcctgagttacaaaaatcacgacaaggctctccactcgctttcctgcagagcatcagggcgaaatgtcagtggcagagtcaatatgcagaggatccactccggttcaaatgggatttttttctcataaataaatgtaagtaaagttaatcgacaaaaatcgctggaattctaaagtgagacttcgacaaaaaccgctatgcactcaagattctcgatgtaatcgatgtacaataaaattattaatcgatgtaggactaaatattacccttgtgttgtaaccagagcaacaaaaaatatttgttatttttgtacccaagtttaaattaaggccatgatcagtggcggagctccgtaaaaataacgttccgggccactctacaaatataacgatatactacatgtcttttaatttttcacactttaggggtagaaacatttaaaacaattcagtgtaactgtggcagatagggaaagcgaatcagacattcaggaacaattactcacaatagaggagaatcacgaacacatggcagcaggcagtcaacactcagcacacagcgctcgccgctcaggtggtcactgcccatttgctagggaggcgctccgccctcgcctatgaataaaaaagaaa

SEQ ID NO: 76790 - DNA, 2230 bp, Zea Mays
agggccgggtagtttcttccgcacatagggtgtgccggtgtagtgtcggggaagctcttagagctccatttccttatagtgatagtacacggtagcataggtggagggggtgtgaggtgtgtgtggttggagtggggctaacaattgagcctgccgcgcacaatcaatggccgcgctcgagtccaacaagaagctgcgcctccttctcgtgcccttcttcgccaccagtcacataggcccgttcaccgacttcgccgtccgtctagccacagccaacccggacgccgtcgagctcactctcgccgtcaccccggcgaacgtccacgtggttcgctcggccctcgggcggtacggcgccgaggcgggcggcgtggtcaagattgccacctacccgttcccgcgcgtggacggcctcgctccgggcgtggagaacctctcggccgccggggacgacgggtggcgcattgatgccgtcgccgtcgacgaggcctcgacgcgaccggcgcaggaggcgctcatcagggaacagtcccctgacgccgtcatcaccgacgtccacttcatctggaacaacgccgtggccggcgagctcggcgtgccgtgcgttacgttcagcgtcgttggcatcttctcgacgctcgtcatgtaccacctcggccgtgacgtcgtcatcagagatggccaggaggtgaccgtccctgggttgccgcttgccggggccggagatacggatccccgtatccgagttgccggagttcctgagacgccggcaggagcacgacggggtcaggcggtgccatgtggagatgggcaggtgcttcggcgtcaccctcaactcgttcgtggatctggagcagccatactgcgacatgtgcgtgagcagcggatacctgaagcgcgcctacttcgtcgggcccctctcgctgccgttaccaccggccggagcaagcaccagagattcgccatgcctcgcgtggctcgacaccaagccgaggttttcagtggtgtacgtatgcttcggcaccttcgctgccatctcggaggaccagctccgggaactggcgcttgggctagaagcttcaaagaagccattcctgtgggtggtgagggcggacggatggacgccgccggaggggtgggaggagcgcgtcggagagagggggatgctagtgagagggtgggcgccgcagacggcgatactgtcccatccagcggttggcgcgttcctgacgcactgcgggtcgagctcgctgctggaggcggcggcggccggcgtgccgatgctgacgtggccgctggtgttcgaccagttcatcgaggagagactggtgacggaggtcctcaagatcggggagagggtgtggagcgggacacggagcacgagatacgaggagcaaaaggtcgtggcatggcagcagaggtagtggcgcgagcggtggcaaggttcttggagccgggtggcaccggcgaggcggcgaggagcaaggcgggggtgctcgctgcgaaggcgcgctcggctgtggcggagggtggctcgtcattctgtgatctgcgccgtctcgtcaatgacctgatcgaagcaagaacggctgccggaaccaacgcctgagttacaaaaatcacggctctccactcgctttcctgcagagcatcagggcgaaatgtcagtggcagagtcaatatgcagaggatccactccggttcaaatgggatttttttctcataaataaatgtaagtaaagttaatcgacaaaaatcgctggaattctaaagtgagacttcgacaaaaaccgctatgcactcaagattctcgatgtaatcgatgtacaataaaattattaatcgatgtaggactaaatattacccttgtgttgtaaccagagcaacaaaaaatatttgttatttttgtacccaagtttaaattaaggccatgatcagtggcggagctccgtaaaaataacgttccgggccactctacaaatataacgatatactacatgtcttttaatttttcacactttaggggtagaaacatttaaaacaattcagtgtaactgtggcagatagggaaagcgaatcagacattcaggaacaattactcacaatagaggagaatcacgaacacatggcagcaggcagtcaacactcagcacacagcgctcgccgctcaggtggtcactgcccatttgctagggaggcgctccgccctcgcctatgaataaaaaagaaa

SEQ ID NO: 76791 - DNA, 916 bp, Zea Mays
cacactgcatcccatcccacgaaaacaagcagagagagaaccccagcgggcaaacgcctccccccccccccccccccccccccttgcctccaggccccagatccggccatccgggtagctccagcccttctccaatggcagtcaaggtctacgtcgtgttttactccacctacgggcacgttgccaagcttgctgaggagatgaagaaaggcgccgcttcagttgaaggcgtggaggtcaaagtatggcaggtcccggagattctgtccgaggaggtgctcggcaagatgggcgcgccacccaagaccgacgcgccggtcatcaccccgcaggagctggcggaggccgacggcgtcctcttcgggttccccacgcggttcggcatgatggcggcgcagatgaaggccttcttcgacgcgaccggcgggctgtggcgcgagcagagcctggccggcaagcccgccggcctcttcttcagcaccggctcccagggtggcggccaggagaccacgccgctgacggcggtgacgcagctgacgcaccacgggatggtgttcgtgcctgtggggtacacgttcggcgccaagatattcgacatggagagcgtgcacggcggcagcccgtacggcgcgggcacgttcgccggggacgggtcgcggtggccgacggaactggagctggagcacgccttccaccagggcaagtacttcgccggcatcgccaagaggctcaagggcggctccgcctgatatcgctcgcaccctcctatacgtatacatacagatatgtcctcgttattacatgtacacgaggtatgatatgcattccatgttttcgtggtggtttcgattgtattgttgtgtgaaatttggtaatcggacccatattaattaataattatggcgtcattcatgtg

SEQ ID NO: 76792 - DNA, 1677 bp, Zea Mays
taatatttgaagtgctctcttactgattgctgcagagcattcttaacaatggatggaatactttgttgcatcaagtaatctatgcagcctttgcttgttgataactggatacaatgggatcaactacagttggtgatcgtgtcctgctcaattatcaaaacctttaaatttgtggtccaggcaccatgacggcttcagtgtgatcttccttgcagcgatgcaatttctcaagttcttagccgcaggcttgcagcagacagagaggcaaacatttcaggaagccaggaagctgtagtctcttgtttgattttgactcgtaatgagaagaaagagaccccggccgaaacttctctaccgttcccccacgtttggttggttggttggtactgatccgttgcatgtttcattattgttgtgcgtcacggcggtcccatggaaacctgaccaccatcgctcttctcgccattgccggcttcgtccccgtgaaccacgcgacatggtttcgcgtcacgcgggtcacggaaatgtcgtgctgatatccgcagggccgaggcctgggcctgggactgggactgggactgggactgggactgggcggtgctggaataatcatgcagttgctagcagcagctagcacgctatagagctaaaccgacatctgatgggcatgggcacactatgaaagctacgtcgttgaaatcaactgtactgtgccgtcacgtgcagcagtgtggatcacgaactgtgtggtgtgtccgcgtgatgattacgacaggcaccagaattgagtcttctcgagagagccggaattggttagaaattggaaaatggaatctgtttcgttcgctgggttggaacatcaggtgacgttggtcggggatggatcatggacgcactcgcatctgaaaggcgatacggatggatgactggcttgtagactcggaggactggcgtacaacatcagttgtctgttagttatacttgactcaaaactgaatttaggctatgtgtgtcagaaaactgaatttaggctatggacagctgattgtgtatatggccgtgtcaaacacagtttcatgctatagattgccctaattatatagtgaaatttgaaatatgagatagatttagctggctatttgccaaacgtatggctgtacggcctaccaaatgggcaaatggcaagttactattgccatctgctaggtgtcgatggcagaggattgtgcatccaaataatgacgatgaccgtagcacgtactgaaggggacgtgcgaacagtatgttggtgttccttcgtcacagattgatggggacaaactacagaatggtccggatcagacggtactaacgagtctctctatttttcttcttgctaatgatactagcgagtctctaatttttcttcttgctaatgatactaacgagtctctctattttccctttgcatcattgcacgacagaacgaacgaacgtactctcctgtccgctaaggccgtttgcagcagtctacctaaattttactcaaaagtactgttttgcactgtagactataatgttcgcagagtaaagtttgaatatgtgtatagagatggacaagctgttggagatagtttaaaactaagtgtcattcttctatccagatgttttaaatttggtcaaatatatataagaaat

SEQ ID NO: 76793 - DNA, 1594 bp, Zea Mays
ctcattcgctcgaatatcatgcagttctggggatgcgcaggaggagatagcggattattggtctcttggcaccgcctgcaatgcaatatgagttgaggcaccatgacggcttcagtgtgatcttccttgcagcgatgcaatttctcaagttcttagccgcaggcttgcagcagacagagaggcaaacatttcaggaagccaggaagctgtagtctcttgtttgattttgactcgtaatgagaagaaagagaccccggccgaaacttctctaccgttcccccacgtttggttggttggttggtactgatccgttgcatgtttcattattgttgtgcgtcacggcggtcccatggaaacctgaccaccatcgctcttctcgccattgccggcttcgtccccgtgaaccacgcgacatggtttcgcgtcacgcgggtcacggaaatgtcgtgctgatatccgcagggccgaggcctgggcctgggactgggactgggactgggactgggactgggcggtgctggaataatcatgcagttgctagcagcagctagcacgctatagagctaaaccgacatctgatgggcatgggcacactatgaaagctacgtcgttgaaatcaactgtactgtgccgtcacgtgcagcagtgtggatcacgaactgtgtggtgtgtccgcgtgatgattacgacaggcaccagaattgagtcttctcgagagagccggaattggttagaaattggaaaatggaatctgtttcgttcgctgggttggaacatcaggtgacgttggtcggggatggatcatggacgcactcgcatctgaaaggcgatacggatggatgactggcttgtagactcggaggactggcgtacaacatcagttgtctgttagttatacttgactcaaaactgaatttaggctatgtgtgtcagaaaactgaatttaggctatggacagctgattgtgtatatggccgtgtcaaacacagtttcatgctatagattgccctaattatatagtgaaatttgaaatatgagatagatttagctggctatttgccaaacgtatggctgtacggcctaccaaatgggcaaatggcaagttactattgccatctgctaggtgtcgatggcagaggattgtgcatccaaataatgacgatgaccgtagcacgtactgaaggggacgtgcgaacagtatgttggtgttccttcgtcacagattgatggggacaaactacagaatggtccggatcagacggtactaacgagtctctctatttttcttcttgctaatgatactagcgagtctctaatttttcttcttgctaatgatactaacgagtctctctattttccctttgcatcattgcacgacagaacgaacgaacgtactctcctgtccgctaaggccgtttgcagcagtctacctaaattttactcaaaagtactgttttgcactgtagactataatgttcgcagagtaaagtttgaatatgtgtatagagatggacaagctgttggagatagtttaaaactaagtgtcattcttctatccagatgttttaaatttggtcaaatatatataagaaat

SEQ ID NO: 76794 - DNA, 1985 bp, Zea Mays
cgcgccagggaccaacacccgtcgctgggcacgactgtggcacattgttgttttttttttttggggggggggggatgtttggatggatgatgttggattgtggcgcacatcggagagggatgtggctgcggggcaggaccgcaggagacggacgcgcgaggagaggaggtgaatagctgagcttctcattgtgtagatcggttgatgagacggggaactgaatccaggagatagcggattattggtctcttggcaccgcctgcaatgcaatatgagttgaggcaccatgacggcttcagtgtgatcttccttgcagcgatgcaatttctcaagttcttagccgcaggcttgcagcagacagagaggcaaacatttcaggttttatcctttatacacccaatatatctttatttctttcagtcagacagcacgcattgcaaaatttagctcttttttcccctagttggctagttgaatatcattcacaatacatagctaaaaaaagctgtagtctctatcccccatggcaggaagccaggaagggtattttgactttgactcgtaatgattggttccccatggcaggaagccaggaagctgtagtctcttgtttgattttgactcgtaatgagaagaaagagaccccggccgaaacttctctaccgttcccccacgtttggttggttggttggtactgatccgttgcatgtttcattattgttgtgcgtcacggcggtcccatggaaacctgaccaccatcgctcttctcgccattgccggcttcgtccccgtgaaccacgcgacatggtttcgcgtcacgcgggtcacggaaatgtcgtgctgatatccgcagggccgaggcctgggcctgggactgggactgggactgggactgggactgggcggtgctggaataatcatgcagttgctagcagcagctagcacgctatagagctaaaccgacatctgatgggcatgggcacactatgaaagctacgtcgttgaaatcaactgtactgtgccgtcacgtgcagcagtgtggatcacgaactgtgtggtgtgtccgcgtgatgattacgacaggcaccagaattgagtcttctcgagagagccggaattggttagaaattggaaaatggaatctgtttcgttcgctgggttggaacatcaggtgacgttggtcggggatggatcatggacgcactcgcatctgaaaggcgatacggatggatgactggcttgtagactcggaggactggcgtacaacatcagttgtctgttagttatacttgactcaaaactgaatttaggctatgtgtgtcagaaaactgaatttaggctatggacagctgattgtgtatatggccgtgtcaaacacagtttcatgctatagattgccctaattatatagtgaaatttgaaatatgagatagatttagctggctatttgccaaacgtatggctgtacggcctaccaaatgggcaaatggcaagttactattgccatctgctaggtgtcgatggcagaggattgtgcatccaaataatgacgatgaccgtagcacgtactgaaggggacgtgcgaacagtatgttggtgttccttcgtcacagattgatggggacaaactacagaatggtccggatcagacggtactaacgagtctctctatttttcttcttgctaatgatactagcgagtctctaatttttcttcttgctaatgatactaacgagtctctctattttccctttgcatcattgcacgacagaacgaacgaacgtactctcctgtccgctaaggccgtttgcagcagtctacctaaattttactcaaaagtactgttttgcactgtagactataatgttcgcagagtaaagtttgaatatgtgtatagagatggacaagctgttggagatagtttaaaactaagtgtcattcttctatccagatgttttaaatttggtcaaatatatataagaaat

SEQ ID NO: 76795 - DNA, 1763 bp, Zea Mays
cgcgccagggaccaacacccgtcgctgggcacgactgtggcacattgttgttttttttttttggggggggggggatgtttggatggatgatgttggattgtggcgcacatcggagagggatgtggctgcggggcaggaccgcaggagacggacgcgcgaggagaggaggtgaatagctgagatcggttgatgagacggggaactgaatccaggagatagcggattattggtctcttggcaccgcctgcaatgcaatatgagttgaggcaccatgacggcttcagtgtgatcttccttgcagcgatgcaatttctcaagttcttagccgcaggcttgcagcagacagagaggcaaacatttcaggaagccaggaagctgtagtctcttgtttgattttgactcgtaatgagaagaaagagaccccggccgaaacttctctaccgttcccccacgtttggttggttggttggtactgatccgttgcatgtttcattattgttgtgcgtcacggcggtcccatggaaacctgaccaccatcgctcttctcgccattgccggcttcgtccccgtgaaccacgcgacatggtttcgcgtcacgcgggtcacggaaatgtcgtgctgatatccgcagggccgaggcctgggcctgggactgggactgggactgggactgggactgggcggtgctggaataatcatgcagttgctagcagcagctagcacgctatagagctaaaccgacatctgatgggcatgggcacactatgaaagctacgtcgttgaaatcaactgtactgtgccgtcacgtgcagcagtgtggatcacgaactgtgtggtgtgtccgcgtgatgattacgacaggcaccagaattgagtcttctcgagagagccggaattggttagaaattggaaaatggaatctgtttcgttcgctgggttggaacatcaggtgacgttggtcggggatggatcatggacgcactcgcatctgaaaggcgatacggatggatgactggcttgtagactcggaggactggcgtacaacatcagttgtctgttagttatacttgactcaaaactgaatttaggctatgtgtgtcagaaaactgaatttaggctatggacagctgattgtgtatatggccgtgtcaaacacagtttcatgctatagattgccctaattatatagtgaaatttgaaatatgagatagatttagctggctatttgccaaacgtatggctgtacggcctaccaaatgggcaaatggcaagttactattgccatctgctaggtgtcgatggcagaggattgtgcatccaaataatgacgatgaccgtagcacgtactgaaggggacgtgcgaacagtatgttggtgttccttcgtcacagattgatggggacaaactacagaatggtccggatcagacggtactaacgagtctctctatttttcttcttgctaatgatactagcgagtctctaatttttcttcttgctaatgatactaacgagtctctctattttccctttgcatcattgcacgacagaacgaacgaacgtactctcctgtccgctaaggccgtttgcagcagtctacctaaattttactcaaaagtactgttttgcactgtagactataatgttcgcagagtaaagtttgaatatgtgtatagagatggacaagctgttggagatagtttaaaactaagtgtcattcttctatccagatgttttaaatttggtcaaatatatataagaaat

SEQ ID NO: 76796 - DNA, 1970 bp, Zea Mays
cgcgccagggaccaacacccgtcgctgggcacgactgtggcacattgttgttttttttttttggggggggggggatgtttggatggatgatgttggattgtggcgcacatcggagagggatgtggctgcggggcaggaccgcaggagacggacgcgcgaggagaggaggtgaatagctgagatcggttgatgagacggggaactgaatccaggagatagcggattattggtctcttggcaccgcctgcaatgcaatatgagttgaggcaccatgacggcttcagtgtgatcttccttgcagcgatgcaatttctcaagttcttagccgcaggcttgcagcagacagagaggcaaacatttcaggttttatcctttatacacccaatatatctttatttctttcagtcagacagcacgcattgcaaaatttagctcttttttcccctagttggctagttgaatatcattcacaatacatagctaaaaaaagctgtagtctctatcccccatggcaggaagccaggaagggtattttgactttgactcgtaatgattggttccccatggcaggaagccaggaagctgtagtctcttgtttgattttgactcgtaatgagaagaaagagaccccggccgaaacttctctaccgttcccccacgtttggttggttggttggtactgatccgttgcatgtttcattattgttgtgcgtcacggcggtcccatggaaacctgaccaccatcgctcttctcgccattgccggcttcgtccccgtgaaccacgcgacatggtttcgcgtcacgcgggtcacggaaatgtcgtgctgatatccgcagggccgaggcctgggcctgggactgggactgggactgggactgggactgggcggtgctggaataatcatgcagttgctagcagcagctagcacgctatagagctaaaccgacatctgatgggcatgggcacactatgaaagctacgtcgttgaaatcaactgtactgtgccgtcacgtgcagcagtgtggatcacgaactgtgtggtgtgtccgcgtgatgattacgacaggcaccagaattgagtcttctcgagagagccggaattggttagaaattggaaaatggaatctgtttcgttcgctgggttggaacatcaggtgacgttggtcggggatggatcatggacgcactcgcatctgaaaggcgatacggatggatgactggcttgtagactcggaggactggcgtacaacatcagttgtctgttagttatacttgactcaaaactgaatttaggctatgtgtgtcagaaaactgaatttaggctatggacagctgattgtgtatatggccgtgtcaaacacagtttcatgctatagattgccctaattatatagtgaaatttgaaatatgagatagatttagctggctatttgccaaacgtatggctgtacggcctaccaaatgggcaaatggcaagttactattgccatctgctaggtgtcgatggcagaggattgtgcatccaaataatgacgatgaccgtagcacgtactgaaggggacgtgcgaacagtatgttggtgttccttcgtcacagattgatggggacaaactacagaatggtccggatcagacggtactaacgagtctctctatttttcttcttgctaatgatactagcgagtctctaatttttcttcttgctaatgatactaacgagtctctctattttccctttgcatcattgcacgacagaacgaacgaacgtactctcctgtccgctaaggccgtttgcagcagtctacctaaattttactcaaaagtactgttttgcactgtagactataatgttcgcagagtaaagtttgaatatgtgtatagagatggacaagctgttggagatagtttaaaactaagtgtcattcttctatccagatgttttaaatttggtcaaatatatataagaaat

SEQ ID NO: 76797 - DNA, 819 bp, Zea Mays
ctctgctcctcacaatactgctgcctgtactggctctcggtgcatttttcttctttgcaggacaagatatactgcagggcgattgtccgaactgtggaaaaagcttccagatactgaagtcagctttgaaggatggcccacaactctgtccctattgcactcaacctttctccgttcaaggcaacaaatttgttagagaatctgctagattttcatctgggagggctgctactgctacaaatggtccagtgttcaatgagttcttcaaccgcaacatgagaggaggaaacgcggcgccttctgagacgatcgtggatgtggaggctgaagtcaaggacgtggagtgatgtttcttctcagcagaagaagagcacgatttgcttctgaatctgtgagaaatggggagaaaactgaaactgtgagagactaggcaaacgtgcatatagatagatgggtatcggggatgggtagttgtgtagtgcccgcgcgcatgagaaactggacaaggcccctgtttgtttcagcttctggcagcttctggccaccaaaagctgctgcggactgtcaaacgctcagcttttcagccagcttctataaaattcgttggggcaaaaaccatccaaaatcaacataaacacataatcggttgagtcgttgtaatagtaggaatctatcactttctagatcctgagccctatgaacaactttatcttcctccatacgtaatcgtaatgatacttagattctccccacagctagattttcagaaaagctggtcagaaaaaagctgaagcattgctttgtggtctacgctccatt

SEQ ID NO: 76798 - DNA, 1213 bp, Zea Mays
aagaaatcttccccacttgttccctcgcgtccatggccttgctccagcctactcttctcactcctcccccgctctgctgctgctcgcatggcctcctctacccagggttcctgaaactgcctcccaaattctcaaatggggcctgctgttccacggcgagggcgtcggaccggagcgagctggcgggtaaaagcgggggcttggcttggagagcggcggggagaaaggggcggctgcttggcgtcaccggagctgggcgaggccccttctttggcggcggcgggaggcgtatggacaagggcactagccgggtcgtggggaacctcgccttcgccgccgtcgtgacgtacctcgccgtgaccggccagctccggtgggttattgacgccatcgtctctctctggctcctcacaatactgctgcctgtactggctctcggtgcatttttcttctttgcaggacaagatatactgcagggcgattgtccgaactgtggaaaaagcttccagatactgaactttgaaggatggcccacaactctgtccctattgcactcaacctttctccgttcaaggcaacaaatttgttagagaatctgctagattttcatctgggagggctgctactgctacaaatggtccagtgttcaatgagttcttcaaccgcaacatgagaggaggaaacgcggcgccttctgagacgatcgtggatgtggaggctgaagtcaaggacgtggagtgatgtttcttctcagcagaagaagagcacgatttgcttctgaatctgtgagaaatggggagaaaactgaaactgtgagagactaggcaaacgtgcatatagatagatgggtatcggggatgggtagttgtgtagtgcccgcgcgcatgagaaactggacaaggcccctgtttgtttcagcttctggcagcttctggccaccaaaagctgctgcggactgtcaaacgctcagcttttcagccagcttctataaaattcgttggggcaaaaaccatccaaaatcaacataaacacataatcggttgagtcgttgtaatagtaggaatctatcactttctagatcctgagccctatgaacaactttatcttcctccatacgtaatcgtaatgatacttagattctccccacagctagattttcagaaaagctggtcagaaaaaagctgaagcattgctttgtggtctacgctccatt

SEQ ID NO: 76799 - DNA, 1380 bp, Zea Mays
cttctcttcccagtccggacttccggttgcttcaagttccaggcttccagcgttccaatttccaaggccatgtctgccgctgcacacccctgctgcgtttttaccacaaaaatgtcgaaacatacaacccagtagcaaaaaagcacgaaaaaaaaacggttttacaagaccatttgcgggatatactttcttcaagaaatcttccccacttgttccctcgcgtccatggccttgctccagcctactcttctcactcctcccccgctctgctgctgctcgcatggcctcctctacccagggttcctgaaactgcctcccaaattctcaaatggggcctgctgttccacggcgagggcgtcggaccggagcgagctggcgggtaaaagcgggggcttggcttggagagcggcggggagaaaggggcggctgcttggcgtcaccggagctgggcgaggccccttctttggcggcggcgggaggcgtatggacaagggcactagccgggtcgtggggaacctcgccttcgccgccgtcgtgacgtacctcgccgtgaccggccagctccgctcctcacaatactgctgcctgtactggctctcggtgcatttttcttctttgcaggacaagatatactgcagggcgattgtccgaactgtggaaaaagcttccagatactgaagtcagctttgaaggatggcccacaactctgtccctattgcactcaacctttctccgttcaaggcaacaaatttgttagagaatctgctagattttcatctgggagggctgctactgctacaaatggtccagtgttcaatgagttcttcaaccgcaacatgagaggaggaaacgcggcgccttctgagacgatcgtggatgtggaggctgaagtcaaggacgtggagtgatgtttcttctcagcagaagaagagcacgatttgcttctgaatctgtgagaaatggggagaaaactgaaactgtgagagactaggcaaacgtgcatatagatagatgggtatcggggatgggtagttgtgtagtgcccgcgcgcatgagaaactggacaaggcccctgtttgtttcagcttctggcagcttctggccaccaaaagctgctgcggactgtcaaacgctcagcttttcagccagcttctataaaattcgttggggcaaaaaccatccaaaatcaacataaacacataatcggttgagtcgttgtaatagtaggaatctatcactttctagatcctgagccctatgaacaactttatcttcctccatacgtaatcgtaatgatacttagattctccccacagctagattttcagaaaagctggtcagaaaaaagctgaagcattgctttgtggtctacgctccatt

SEQ ID NO: 76800 - DNA, 1097 bp, Zea Mays
gtccgcgaacgtcgccgtccgggacggagagcctcgctcgcaacccacccctcctctctcggcgactcggttctccctcccgcgggacgccaccggaactgactgccgctgctggggcctggccgttctctcatggtcatggagacgccttcgcagaggacaattggacaccaaaggccaaagccacggaggacagcacgataacaagcaaataaccatacgctaatgatagagaagagaaatgatttctgagagaatgtgggcagattgttaaaaccaccgcgacaactaaaatatgtagtgctttatgtaatagtgaactagcaatggcatggactttgccctgcttgttttctttatgtgatatactagtgatgttgtggacaaatcttcagtattctcattgaagtaattgaccctgtttaggggagcttttggcagcttttgcttctccagaaagctcgaagctctctcaaactggatagcttctccaagctgacaaaagctgcactttgtagtaaaagcagagaagctccctcaaagcagcttcccgagctttatccagaaagcttctcttggaggcgcttttggaaaagctacagctcccccagacaaggaaatttatcttggtgttcattgtcattttttataacttacacaggagatggacccagagcaacatggggacaacatggcaggcaagggtggagctggacaggtctattggtccaacgcaatgtctagtttcgtgctcaaatatttgtccgacctagttgcgagtggaactaaaaccacgagcggcttcaagcaagctcatcttaacagctgtggtagagctttgtatgagaagctaggtgtccagtgttggggacttgttctcaaatgctaagaattaagaacaaggcaacataaaaagtgttaagtgttaaagtccttcgtccttcgaagcattatgtcccttcgggaaataatgagtttcggacgaaggtcataagagacataccttcgtaaacataacaagtaatgacgaaggattcatataaagcatgaaatataatataagcatcatcatagaatcatttctattttattaacat

SEQ ID NO: 76801 - DNA, 2462 bp, Zea Mays
catcatcccgtccgcgaacgtcgccgtccgggacggagagcctcgctcgcaacccacccctcctctctcggcgactcggttctccctcccgcgggacgccaccggaactgactgccgctgctggggcctggccgttctctcatggtcatggagacgccttcgcaggtgattgccccctcctcgtcgtcacactccctagctgctaaggggtcacgtggtggtgtgctgcccgattggaattgggtgaatcggatgcccaaggggctcacctgggggattcgttctgaacttaacacaggttgatttgctggattgaaggtcccggattattctccctggtttctcatgtgtttgcatcagtgcagatgcaagttagtccttgttaacagaggattatacatttatactcacctctctctctctctcaaaaaaaaaaaaacttatatggtgtgtgcattcccttggagattgtagttggaggacatgcagcttagacgaaaaaaaatgtactcataaccctctgctacttatctagctgcctgtatggtggttttgtttctttgggttaggttgagaagacaaaggccctgtttgtttcggcttctggcagcttctggccaccaaaagctgttgcagactgccaaacactcagcttttcagccagcttctataaaattcgttgggggcaaaaaaccatccaaaatcaacataaacacataatcgtttgagtcgttgtaatagtaggaatccatcactttctagatcctgagccctatgaacaattttatcttcctccacacgtaatcgtaatgatacttagattctccccacagccagattctctccacagccagattttcagaaaagctggtcagaaaaaagctgaaccaaacacacccaaaggcagactattgcttaatggtccaatggaggaaagggataagaataggatcgactatctaaacacaacaatttacaaggatgatacaacatacaacctgcgctaaaatgataaggctcaagagagggtcctttctttcagttgcgtcaagttttacatgaatgctccttgttccatgacgctatccatgtaatactgaggaataagtagctatgttcttgaatgcaatcggacacaacctaagaaataagctaagctgggactaatttcagtaggtcaggtgaaacagttagcagatatttgaacctcgtaatacatgcaatcggggaactaggcaattagcttattcgaccagcgtttttgtataccctggccaaaattgcagggaactcaagatgggatccatgttttaaggtatggcattccaaattgtcctgacacatatgcggtcaaaattttgagttttttttttgtaatatgttgaccgtataggatcgtcgtattggagcaattgatgggtcagatataagagcatctatggagactgcctttcgtcgtaggaagttatttgcatcccaaaatgtgttggcagctacaaatttttattttcattctaccagaggacaattggacaccaaaggccaaagccacggaggacagcacgataacaagcaaataaccatacgctaatgatagagaagagaaatgatttctgagagaatgtgggcagattgttaaaaccaccgcgacaactaaaatatgtagtgctttatgtaatagtgaactagcaatggcatggactttgccctgcttgttttctttatgtgatatactagtgatgttgtggacaaatcttcagtattctcattgaagtaattgaccctgtttaggggagcttttggcagcttttgcttctccagaaagctcgaagctctctcaaactggatagcttctccaagctgacaaaagctgcactttgtagtaaaagcagagaagctccctcaaagcagcttcccgagctttatccagaaagcttctcttggaggcgcttttggaaaagctacagctcccccagacaaggaaatttatcttggtgttcattgtcattttttataacttacacaggagatggacccagagcaacatggggacaacatggcaggcaagggtggagctggacaggtctattggtccaacgcaatgtctagtttcgtgctcaaatatttgtccgacctagttgcgagtggaactaaaaccacgagcggcttcaagcaagctcatcttaacagctgtggtagagctttgtatgagaagctaggtgtccagtgttggggacttgttctcaaatgctaagaattaagaacaaggcaacataaaaagtgttaagtgttaaagtccttcgtccttcgaagcattatgtcccttcgggaaataatgagtttcggacgaaggtcataagagacataccttcgtaaacataacaagtaatgacgaaggattcatataaagcatgaaatataatataagcatcatcatagaatcatttctattttattaacat

SEQ ID NO: 76802 - DNA, 1241 bp, Zea Mays
gatgccgcatcatcccgtccgcgaacgtcgccgtccgggacggagagcctcgctcgcaacccacccctcctctctcggcgactcggttctccctcccgcgggacgccaccggaactgactgccgctgctggggcctggccgttctctcatggtcatggagacgccttcgcaggatcgtcgtattggagcaattgatgggtcagatataagagcatctatggagactgcctttcgtcgtaggaagttatttgcatcccaaaatgtgttggcagctacaaatttttattttcattctaccagaggacaattggacaccaaaggccaaagccacggaggacagcacgataacaagcaaataaccatacgctaatgatagagaagagaaatgatttctgagagaatgtgggcagattgttaaaaccaccgcgacaactaaaatatgtagtgctttatgtaatagtgaactagcaatggcatggactttgccctgcttgttttctttatgtgatatactagtgatgttgtggacaaatcttcagtattctcattgaagtaattgaccctgtttaggggagcttttggcagcttttgcttctccagaaagctcgaagctctctcaaactggatagcttctccaagctgacaaaagctgcactttgtagtaaaagcagagaagctccctcaaagcagcttcccgagctttatccagaaagcttctcttggaggcgcttttggaaaagctacagctcccccagacaaggaaatttatcttggtgttcattgtcattttttataacttacacaggagatggacccagagcaacatggggacaacatggcaggcaagggtggagctggacaggtctattggtccaacgcaatgtctagtttcgtgctcaaatatttgtccgacctagttgcgagtggaactaaaaccacgagcggcttcaagcaagctcatcttaacagctgtggtagagctttgtatgagaagctaggtgtccagtgttggggacttgttctcaaatgctaagaattaagaacaaggcaacataaaaagtgttaagtgttaaagtccttcgtccttcgaagcattatgtcccttcgggaaataatgagtttcggacgaaggtcataagagacataccttcgtaaacataacaagtaatgacgaaggattcatataaagcatgaaatataatataagcatcatcatagaatcatttctattttattaacat

SEQ ID NO: 76803 - DNA, 662 bp, Zea Mays
aaaaaatttagggggaatgggaccgaaccatccacgcaacgaatattctctctagatgccgcatcatcccgtccgcgaacgtcgccgtccgggacggagagcctcgctcgcaacccacccctcctctctcggcgactcggttctccctcccgcgggacgccaccggaactgactgccgctgctggggcctggccgttctctcatggtcatggagacgccttcgcaggagatggacccagagcaacatggggacaacatggcaggcaagggtggagctggacaggtctattggtccaacgcaatgtctagtttcgtgctcaaatatttgtccgacctagttgcgagtggaactaaaaccacgagcggcttcaagcaagctcatcttaacagctgtggtagagctttgtatgagaagctaggtgtccagtgttggggacttgttctcaaatgctaagaattaagaacaaggcaacataaaaagtgttaagtgttaaagtccttcgtccttcgaagcattatgtcccttcgggaaataatgagtttcggacgaaggtcataagagacataccttcgtaaacataacaagtaatgacgaaggattcatataaagcatgaaatataatataagcatcatcatagaatcatttctattttattaacat

SEQ ID NO: 76804 - DNA, 2303 bp, Zea Mays
atggtagaaatttagtattttcaaacggagaaattgctgggccttggttggacggtggacgctgtccctttcccaatcccaaacgagaacaacaagagagcagcccgcatcacttcctcgctctcctctcctctacgctcctcgtcgcgagcccgcgtctcccacgcctccctcgctggctccccctccctccggacctccccactccagatccagtctggcccgccgccgccgatgtccgaggatcccgcgtgctcccgccgctcgcggtgcgacctcggcggcgacgagcgctggctctcggggcccgccggcgacgaccacttcgaccgcctcccggacgcgcttctcctcgtcatcttcaaccgcatcggcgacgtcaaggcgctcggccgctgctccctcgtctccctccgcttccacgagctcgtccccctcgtcgactccgtcctcgtccgcgtcgactgcgtcatccccgacgagcccccctcctcgtcctcgccgtcgacgccgttctctcctacggcgtccgtgcgagcccgtggggtcttctcacagatcgcgcgcatcgtgctcggcggcatcgtgaagcccatacaggcgctcggtcagatcctctcccccgccaactccgcctctggctttccggcatcctccgattcctcgccatcgtcgtcctcctcatctttgccactgcctcttgcggatgtgtcgcaccactctccctcggaggtgctccgctccttcaaagagctccgccaccttcgcatcgagctcccggcgggcgagctcgatatggacgacggcgtgatgctcaagtggaaggccgactttgggtccacactgggcagctgcgtcatccttggagcatcctcggcctcggcctcggcctcggtctcgccctcctccgctgactcagatagcacgagcaccgctccctctgttgacggtggccgcactgaacctgatgaatgtgtcgattcaggaagcatcccggagtcgttctacacaaacggggggtttaagctgcgggtggtttggacaatcagctcattgattgcggccgccgccaggcattacttgctgcagccgatcattgctgatcacaagacgctcgagaggttggacctgacagatgctgatggccagggagtgctcaccatggacaagtgccaactgcaggagctgagggtgagaccgctatcaacatctaggggctcacaccggacgctcatgccagagcttagcatgtggctgtggtacgcaccatgtattgagctgcctggggggctggtgctaaatggcgcaacgcttgtggccatcaagccaagtgaggaaggaacatgggacacagtttggaatggggctgctggtgcagcctgggtgttggatgcattcgaggagccgtataggacagcggtgaggatgcttctcaagcagaggacctacagtcttgagatgaattcgttctaactatggggagatgacattttgaaagcttcagatgtgagaggatgctataactactgatgtcctggatgccttttatgcaccaatctgcacctacttcagatgtgccaaaacagcatccagcgtgctctgtacctcaatgtgtgtcaagagtgggctcgaagatttggcgtcagcggaagctacaaaattgttattccaaacgagttcggaaatgttgtatccttgcacagttgcaccgtgaatctggaaacgttgtagccctatatgatgtgaatctgtgcaagtccttcagtattttatgtgaaatttcgtgctataactccatggatcggggaggtcagctcagctctggcttcacgatgaacaacgcgacacattgacaccttattactgctgtcctgtctaaaggctgaaatgaactactcctgaatggacggatcaacaggaaatgaaaaccagcaagggagaaccgacagatgggtccgcctgtcatgagcgcacacgtcattcatctccgagctccagcacgaggacaagctaaggaatgcccgcttggagacgcggcttcgaagctactgatcagtgtctgaatactcaatgcaccttgggcatggagactggaagcgaaggatgagcgtgagcgagacgtaggctacctgatcggtgtctgaatcctgaacacaccttggggccggatgaaatggaagatgaacatgtgttgcgaaatacgatcatacgagcactgttgtttgggtgtgttgtgaaagtatggccctatttgaagtactctctctttctttctctctctgtataccctggttgagaagagg

SEQ ID NO: 76805 - DNA, 991 bp, Zea Mays
gttggactgctgatagacttagaaggagagggttgcatcaccctcttgtctgtgttttatgtgaccaagaacaagaaacagttcagcatcttttgtgcacttgcagttttgccagacagttttggcatgatatcctattgccccggagacaaggggatctcacccctgctgctgatgaaatatcttttgctgaatggtggaaaaaggcttgcagagttagctaattctgagcttcggatgtctgtatggacggatgatgtctacagctttatgcgctcgcaaaagaggcgtcgaattcaaagttctgacatttctcaagattttgatgcaatgagaaagcagctagtatcagatgctgcaagagtatgtaggtcaaaagttccggagtcgctgatggaaaatcttattaaacgcctgagatcatactttgaggacaaatatccaccaaaagcgtagtttttcatgcagcagttctttagaagctacttaggtgtcaattggatcttggtggtggtcaactccctaactcctcgcgcggcttaattttgaggacatttttgtattctttgctgagacagagacgaggtgttctaaattgcatgtacaaatatacttttcgttgttatccctgatgttataggtaccacaccaccatccccaccacttttctgtagaatgtagatccctttttatcctggcagattaaagcatgagtttatggtgtttttgacacgtatttttgccccgaccagacccagttttagtcaatgtttttcttttcattcttttttgtcctgattttggtttctgtctggccttgctcagcatggccttcttgtaaatatctttgctttcttcctatataatgatacgcagtgctcttgcgggatcgaaaaaaaatgttttgttatgggggttgattcaataacaacattttttagtttttggagcgtaatctccggaagcaaattgacttgacagtatatttatt

SEQ ID NO: 76806 - DNA, 935 bp, Zea Mays
atgtgttgtgatgcagtcctgcttcttttccttgcaagtatctggggctgcccatctctgataagaagttgaggaagtgtgatcttattttgtggattgagaagattgcagaaggctcaacccctcaatctggctggacggacaatattggcttgcagagttagctaattctgagcttcggatgtctgtatggacggatgatgtctacagctttatgcgctcgcaaaagaggcgtcgaattcaaagttctgacatttctcaagattttgatgcaatgagaaagcagctagtatcagatgctgcaagagtatgtaggtcaaaagttccggagtcgctgatggaaaatcttattaaacgcctgagatcatactttgaggacaaatatccaccaaaagcgtagtttttcatgcagcagttctttagaagctacttaggtgtcaattggatcttggtggtggtcaactccctaactcctcgcgcggcttaattttgaggacatttttgtattctttgctgagacagagacgaggtgttctaaattgcatgtacaaatatacttttcgttgttatccctgatgttataggtaccacaccaccatccccaccacttttctgtagaatgtagatccctttttatcctggcagattaaagcatgagtttatggtgtttttgacacgtatttttgccccgaccagacccagttttagtcaatgtttttcttttcattcttttttgtcctgattttggtttctgtctggccttgctcagcatggccttcttgtaaatatctttgctttcttcctatataatgatacgcagtgctcttgcgggatcgaaaaaaaatgttttgttatgggggttgattcaataacaacattttttagtttttggagcgtaatctccggaagcaaattgacttgacagtatatttatt

SEQ ID NO: 76807 - DNA, 1444 bp, Zea Mays
cttcccttcgcccatctctcttccaagctctgagttctgattctgacccagacggggaataatcagactcctcgcatcccctctcttctctcttcaccccgtcgccgtcccgttactcgattcgagggcgcgacccttccccatctctcttgcctcgccttgccggcggcgccaatcccagggctcgcgtcgggagtgcccaacttctccacagtggccgttccgccgcggcgcccgcaggtgggcgatgcgatcggatgagttggcggcggcggcggcgcttcgtggaaaggaggaggaggggggccttgtgctttcccgcggcggtgctatccccgccgcatccgcccctcggagccggtgatggccccgaccgcggagccgtcttcgcggccgccccaatggcgcccccgcacgggcccacccccggggctgaagaacctcggcaacacatgctacctcaacagcgtcctacagtgcctcgcgtccacgccgcccctcgccacgttctgcctcgcctctcgccactccaaccagtgcaagaaggtgttcccgaatagggacaatgactgcgcgctatgcgtgcttgagcggcagattgctcggctgcttcgggcagatgctggggcgctcgattccccagcaaaggttatccgctgcatgcccctatttgccgagcacttcaggtgggggcgccaggaggatgcacacgagttcctccgctatgtcgtagatgcctgtcacactgctgacctccgcatgcgcaaggggttacgtgcagcagctgccagtggaaactgtggtgaggatgtccgggggcagggggtttgtctggttatgagggagacatttggcggggcattactgagtcaagtgaagtgccttgagtgcaagggagaatctaacaagactgatgagataatggatatcagtctcgatctacctgggagcagttctgttgctgatgccctttcccgcttctttcatccggagaccttggatggcgcaaacaaatattgctgtgaaaggtcgtgatccaaacaatacacaaagctgctgtcatatcttcctccacgaagctgctggatgtaatggctagtcggccggtggggcacgcgccgcatgccacgaagccgcgggcgagtgtgcacgaccagtgtcatgacggcgacggcagatgcggatggccaacggcatgacaatggcggatgtgcacagcctggagcacggcagcgttgtaaaaagctcacctcagcacggaagcaaatgtttatgctcagggcacctaaggtgctcgtcatacaactcaagaggtttgaggggataaatggtggaaagatcaacaggaatatagaattcaaggaggcacttgatctttctgattgcatgtacaataaaaaccaggtatatgatgtttgaacatcaatacggtttccaacatgca

SEQ ID NO: 76808 - DNA, 1237 bp, Zea Mays
cttcccttcgcccatctctcttccaagctctgagttctgattctgacccagacggggaataatcagactcctcgcatcccctctcttctctcttcaccccgtcgccgtcccgttactcgattcgagggcgcgacccttccccatctctcttgcctcgccttgccggcggcgccaatcccagggctcgcgtcgggagtgcccaacttctccacagtggccgttccgccgcggcgcccgcaggtgggcgatgcgatcggatgagttggcggcggcggcggcgcttcgtggaaaggaggaggaggggggccttgtgctttcccgcggcggtgctatccccgccgcatccgcccctcggagccggtgatggccccgaccgcggagccgtcttcgcggccgccccaatggcgcccccgcacgggcccacccccggggctgaagaacctcggcaacacatgctacctcaacagcgtcctacagtgcctcgcgtccacgccgcccctcgccacgttctgcctcgcctctcgccactccaaccagtgcaagaaggtgttcccgaatagggacaatgactgcgcgctatgcgtgcttgagcggcagattgctcggctgcttcgggcagatgctggggcgctcgattccccagcaaaggttatccgctgcatgcccctatttgccgagcacttcaggtgggggcgccaggaggatgcacacgagttcctccgctatgtcgtagatgcctgtcacactgctgacctccgcatgcgcaaggggttacgtgcagcagctgccagtggaaactgtggtgaggatgtccgggggcagggggtttgtctggttatgagggagacatttggcggggcattactgagtcaagtgaagtgccttgagtgcaagggagaatctaacaagactgatgagataatggatatcagtctcgatctacctgggagcagttctgttgctgatgccctttcccgcttctttcatccggagaccttggatggcgcaaacaaatattgctgtgaaagttgtaaaaagctcacctcagcacggaagcaaatgtttatgctcagggcacctaaggtgctcgtcatacaactcaagaggtttgaggggataaatggtggaaagatcaacaggaatatagaattcaaggaggcacttgatctttctgattgcatgtacaataaaaaccaggtatatgatgtttgaacatcaatacggtttccaacatgca

SEQ ID NO: 76809 - DNA, 494 bp, Zea Mays
ccaagctcaaggggtctacgatcccggatcattgtattgggacgaaggtcgtgatccaaacaatacacaaagctgctgtcatatcttcctccacgaagctgctggatgtaatggctagtcggccggtggggcacgcgccgcatgccacgaagccgcgggcgagtgtgcacgaccagtgtcatgacggcgacggcagatgcggatggccaacggcatgacaatggcggatgtgcacagcctggagcacggcagcgttgtaaaaagctcacctcagcacggaagcaaatgtttatgctcagggcacctaaggtgctcgtcatacaactcaagaggtttgaggggataaatggtggaaagatcaacaggaatatagaattcaaggaggcacttgatctttctgattgcatgtacaataaaaaccaggttgctcattgatgaaaccacatgttaactgccatcagttgctagtttgtttaagatcattgtttccaatt

SEQ ID NO: 76810 - DNA, 1267 bp, Zea Mays
ttcccttcgcccatctctcttccaagctctgagttctgattctgacccagacggggaataatcagactcctcgcatcccctctcttctctcttcaccccgtcgccgtcccgttactcgattcgagggcgcgacccttccccatctctcttgcctcgccttgccggcggcgccaatcccagggctcgcgtcgggagtgcccaacttctccacagtggccgttccgccgcggcgcccgcaggtgggcgatgcgatcggatgagttggcggcggcggcggcgcttcgtggaaaggaggaggaggggggccttgtgctttcccgcggcggtgctatccccgccgcatccgcccctcggagccggtgatggccccgaccgcggagccgtcttcgcggccgccccaatggcgcccccgcacgggcccacccccggggctgaagaacctcggcaacacatgctacctcaacagcgtcctacagtgcctcgcgtccacgccgcccctcgccacgttctgcctcgcctctcgccactccaaccagtgcaagaaggtgttcccgaatagggacaatgactgcgcgctatgcgtgcttgagcggcagattgctcggctgcttcgggcagatgctggggcgctcgattccccagcaaaggttatccgctgcatgcccctatttgccgagcacttcaggtgggggcgccaggaggatgcacacgagttcctccgctatgtcgtagatgcctgtcacactgctgacctccgcatgcgcaaggggttacgtgcagcagctgccagtggaaactgtggtgaggatgtccgggggcagggggtttgtctggttatgagggagacatttggcggggcattactgagtcaagtgaagtgccttgagtgcaagggagaatctaacaagactgatgagataatggatatcagtctcgatctacctgggagcagttctgttgctgatgccctttcccgcttctttcatccggagaccttggatggcgcaaacaaatattgctgtgaaagttgtaaaaagctcacctcagcacggaagcaaatgtttatgctcagggcacctaaggtgctcgtcatacaactcaagaggtttgaggggataaatggtggaaagatcaacaggaatatagaattcaaggaggcacttgatctttctgattgcatgtacaataaaaaccaggttgctcattgatgaaaccacatgttaactgccatcagttgctagtttgtttaagatcattgtttccaatt

SEQ ID NO: 76811 - DNA, 1335 bp, Zea Mays
ttcgcccatctctcttccaagctctgagttctgattctgacccagacggggaataatcagactcctcgcatcccctctcttctctcttcaccccgtcgccgtcccgttactcgattcgagggcgcgacccttccccatctctcttgcctcgccttgccggcggcgccaatcccagggctcgcgtcgggagtgcccaacttctccacagtggccgttccgccgcggcgcccgcaggtgggcgatgcgatcggatgagttggcggcggcggcggcgcttcgtggaaaggaggaggaggggggccttgtgctttcccgcggcggtgctatccccgccgcatccgcccctcggagccggtgatggccccgaccgcggagccgtcttcgcggccgccccaatggcgcccccgcacgggcccacccccggggctgaagaacctcggcaacacatgctacctcaacagcgtcctacagtgcctcgcgtccacgccgcccctcgccacgttctgcctcgcctctcgccactccaaccagtgcaagaaggtgttcccgaatagggacaatgactgcgcgctatgcgtgcttgagcggcagattgctcggctgcttcgggcagatgctggggcgctcgattccccagcaaaggttatccgctgcatgcccctatttgccgagcacttcaggtgggggcgccaggaggatgcacacgagttcctccgctatgtcgtagatgcctgtcacactgctgacctccgcatgcgcaaggggttacgtgcagcagctgccagtggaaactgtggtgaggatgtccgggggcagggggtttgtctggttatgagggagacatttggcggggcattactgagtcaagtgaagtgccttgagtgcaagggagaatctaacaagactgatgagataatggatatcagtctcgatctacctgggagcagttctgttgctgatgccctttcccgcttctttcatccggagaccttggatggcgcaaacaaatattgctgtgaaaggcaaatgttgctgttcccttagtattcaaatccataggaatgtaaatgttagtttggacctcttgaaattaccctacttggctacttttttggagaaggaaaagcttactattcctttctcgggaaagtttatatgttgtcattttcaccaaggcaaagctaactctggtaatctctctagcttatgactgcttactatagattttttttaagaatactacagaacaaagttggtgtgaccccaaccatggatccttgtgattgttccaaaactggtgaaaatgccttttaagctcttttgagtctctttcca

SEQ ID NO: 76812 - DNA, 1546 bp, Zea Mays
cttcccttcgcccatctctcttccaagctctgagttctgattctgacccagacggggaataatcagactcctcgcatcccctctcttctctcttcaccccgtcgccgtcccgttactcgattcgagggcgcgacccttccccatctctcttgcctcgccttgccggcggcgccaatcccagggctcgcgtcgggagtgcccaacttctccacagtggccgttccgccgcggcgcccgcaggtgggcgatgcgatcggatgagttggcggcggcggcggcgcttcgtggaaaggaggaggaggggggccttgtgctttcccgcggcggtgctatccccgccgcatccgcccctcggagccggtgatggccccgaccgcggagccgtcttcgcggccgccccaatggcgcccccgcacgggcccacccccggggctgaagaacctcggcaacacatgctacctcaacagcgtcctacagtgcctcgcgtccacgccgcccctcgccacgttctgcctcgcctctcgccactccaaccagtgcaagaaggtgttcccgaatagggacaatgactgcgcgctatgcgtgcttgagcggcagattgctcggctgcttcgggcagatgctggggcgctcgattccccagcaaaggttatccgctgcatgcccctatttgccgagcacttcaggtgggggcgccaggaggatgcacacgagttcctccgctatgtcgtagatgcctgtcacactgctgacctccgcatgcgcaaggggttacgtgcagcagctgccagtggaaactgtggtgaggatgtccgggggcagggggtttgtctggttatgagggagacatttggcggggcattactgagtcaagtgaagtgccttgagtgcaagggagaatctaacaagactgatgagataatggatatcagtctcgatctacctgggagcagttctgttgctgatgccctttcccgcttctttcatccggagaccttggatggcgcaaacaaatattgctgtgaaaggtatgctgttctttatctaaaaaggaacaaatggttcctagacgaaggttctatgtactgcaagaattttcactgtttacttgctaaagatgcaaaagccgttttacgatgctttagggttgataataatattttcagtggaaacaaaatcatgtaggaagtttcaccagcctcttctcttgcaatctaattttttttcctgtaggcaaatgttgctgttcccttagtattcaaatccataggaatgtaaatgttagtttggacctcttgaaattaccctacttggctacttttttggagaaggaaaagcttactattcctttctcgggaaagtttatatgttgtcattttcaccaaggcaaagctaactctggtaatctctctagcttatgactgcttactatagattttttttaagaatactacagaacaaagttggtgtgaccccaaccatggatccttgtgattgttccaaaactggtgaaaatgccttttaagctcttttgagtctctttcca

SEQ ID NO: 76813 - DNA, 4417 bp, Zea Mays
aggtaacagttgatgtgtccattttgatctttgtgattacttaaattggattgattctcttggggtcatgtaggaactgattggttctgattttactggcttaaaaccagacatagcaaaacctaactataattggaactgaaatgatggttcaatttgaatgttcggcaaaactaatggcttgggttggattgtagtcactgggattgtcatgttctgtgaccccaaaacgtcatgatccatgggtcaaaatcgatgtgggttgctgccaggggcgaagccaggatttaagtttgggagggacaaatcagattgaggggctgttagaagatattttacattatttacctgataattagctaaaaaattagtagctcttatggaatttggggagggtttaggggggacattgtcccccctctgcccctccctggaatcgctcctggttgctaccatgttccccacatggaacgagatgtgtcaatgaacaaaatagggagggggatgttgcttagatgtgggaggcattcatcatcgaagaggggcaccagccactggcagtatacagcaccacaccagtgagagtgtcagttacagctggcatggtggtcgattgcatatccatattgtatgaatggggcactgtacacagcatgatttactttttcttgttcttttgtatttttaattactttgtgttgatcttctgttactattcatccatggcatatcaaagcttatcgaacctgctcatcaacctagattagttggggtcactcgatcatatctagcccctttgatttatttttctagatatctgtggctcacgtccccagccctgacccagtcagcccaaattttgcggtgattattagttggatagagttgtggaaatactactataaatcttatatgaagcctcttcagcttagcttattacaaccatttgcaaaaatatgactgatacatgttcaccaaatatattttgtaaatgctctagagcacatgccaaatatcaaaccaatgttttcaagtcggatgacttgctggtcgttctagctaaccgactagggtgattaatcgtgattaatcacgattagtcggacgatttggacgattaatcgtgattggtccaaactgacttggacgacttgaaaacattgtatcaaactcagaagaggctaaaagacattttctggttatttttatacactaaaaaaagagggcctattttatcgtaaggtttgaatttcaaaaagaaaacttggttagtggaatatctttaaatcgctggctagctgttctctaatggcgatataagctggctgtttcttttgcttcttacattttgtttttgttagtggaattgaagttgcgtaccaagaagctgttgcattgaaaaggcaagaggagcttattcgtgaggaggaggaggaggctgggcttcttgaacatcagatgaaggggaagcgtggtggtggtgtaaatgaaaaggacaagcgtgccaagaaaaagcagaccaagcaaaagaagaaccgtaaggctaaagacaaggaaagagatgagaaatgcgaggttaaaattctggaaaggcttcgtgatgaaactgccattgataatagtgatggcttaccatctcaggtggaagtgatagcaaagattgatgccttggaagaaggttcttcagatgggtcagacatgtcaaatagcgtaacaagggcttaagcattattagctttgccgaggaaggtgatggtcttccctccacctctaatgtcactggtggtttaggccgcaatagttctggctgctgcacagctccaaaactggatcaggatactgttctacttaccttgagagatagacttcgtaagttggggcagcgtctgcatgagaaaaacattgaggggcagaaacttctcaaaaaacattttgaagctagggacgcaaaagcgaaggaagaaccttctgactcatctaattctttggataagccacctgatgttccagagatcccggtgcattcatcagaagataccgttgatcttaaagtgaatggaacaccaaagaaggatgcatctgtggtcaaccctgttctggaggattctgtttcaggcataccagtcactgcaaacaatgaacctgtgccttctcccaccacaacaaaaatggacccagtttcaaacaaagttaatggatcaagtttgaaaatgaaagtcaccatggcatctccttgctccaaatcacatccagctgatatggataaagatgcctctcttccttctaaatcaccacgaaccaatagagctgctccagttcctcctaagctgccttcagctgataaagcaacgctagttccctcaaagctaccttcggttgataaagctactccagttcctcaaaaatctccgttggtaaacaaagtagctcaggcccgtcccaaatctccagcagttgacaaagcaactccacatcgtcccaaatctccagcagttgacaaagcaactccagttcgttctcaatctccagcagttgacaaagccactctagttcgccctcaatctccagcagttgacaaagcaactccagttcgtcctcaatccgcagcagttgacaaagcaactccagttcgcccaaaatctccagccattgataaagcaactccaattgctcccaaatctccaccagttgataaagcctctccagctctgccaaaatcattatcaggtgctaaagatgcgctttttccttctaggtcgctgcagattgataagtttactccagccgccccaaggttatcacaagatgataaggctgctctgccttcttcagaacagtcacatatatctccagctactagttctgaagctcaaggggcaactactaggaaggtcacaactaccacctcactttcagaggctgctgcagcatggaggccttcaagtgctcctgtgttacccacaccaagatcaaccgggccagctgcttcacatattcaaacttccacattgctttcccgctcgatgagtgaagcagctgggagaaggccagtaaatgatccttcattttctgccccatcttatactccacagacctaccggaatgcaataattggtaagtctggtctgtctatgacctccgcaagccttgcgtatcagccgtcttctctggatcaagacactgctccttcacggcctctatcagcatatgcatcaagtacagtcatgatgcctcctgcaggaagatctgatcagtcatcagctaggcatggattcaagtctgggcctggtaagttagaagcacatgacggctggcagcagtggaaaggtgacagtaatgttgatatgcatctctggagggaccacgctccttaccaacaaatgaccaacagtcaagcatatgagcagtctcggagggacgatacttatcagcaagcatgcagcagaggaacagaaaagttcagcaggcatgcaggactgcaagctaggcagcagttccaaaccgagacacccgccagtcatgtatggcatcaaccgcaggggccagtggcagaagaatttccacaccttgacatcataaacgacttgcttgaggaggaccagatcaacggcagtataccggagtcgtttcgtcaagactacaacgtgtttggcctgccgttttcaccgagaggaaacttgtcagacatggaaatggcttctgttagaagtcccgctcggttcaattcacccaagtacgatggtggattgtcgggggcttatgacatgaatgctgtcaatgggttgagggaacggcagtttccctcgttggatatctactctaatggcctgtctgacgtgagtgcttctaagccttggctgaatggctctgccagtccatcggtgagccttggggtcaacacaaatggataccacccccaggtgggtgagtacctgggaggtggggtgaacggggtctccttgtggcgccgccatgccaacggccgctggtaatgcgaggtgcctgtatacaatcatacagtcggaataatgttttgttgtaacagatggtttcgggcctgagctgatgcgccatgtaattaaaagtttttaagttttaaaagggaaagaaagagatacaccctgtaaagtctgcgcctttattaggataatttgagtgcttttctggttgaagttgaactctgacctaactttgttaaatttcaaagctaaatttggcggtggcctgtgggagagagaagaacggtatgaaggttagcctgtccgacgagtgctgacggagcaacctacctaatcgcctacactttgtgcttctgctaaacatgttagtaccctgtccaaaaaatatgtacttactagtttgcaaaagaatgacgttttggaagatctgagtcgactgagtgaaggatcgaaatctg

SEQ ID NO: 76814 - DNA, 3277 bp, Zea Mays
tttcttgctagtttctcatgcttacttgcaggatggaagttctggtgaggtttacaatgtttctatggagcgtgaggaaagacgtctaactgagcttggtcagaagatactagagacatttgtgctatctcatatatttagttgcgtaccaagaagctgttgcattgaaaaggcaagaggagcttattcgtgaggaggaggaggaggctgggcttcttgaacatcagatgaaggggaagcgtggtggtggtgtaaatgaaaaggacaagcgtgccaagaaaaagcagaccaagcaaaagaagaaccgtaaggctaaagacaaggaaagagatgagaaatgcgaggttaaaattctggaaaggcttcgtgatgaaactgccattgataatagtgatggcttaccatctcaggtggaagtgatagcaaagattgatgccttggaagaaggttcttcagatgggtcagacatgtcaaataggttagtgaacacttgaaaacaagttatgcatcactttcttgtaagattggcatttgctccagctagacttatgtgcagagggaaaaatcagcgtaacaagggcttaagcattattagctttgccgaggaaggtgatggtcttccctccacctctaatgtcactggtggtttaggccgcaatagttctggctgctgcacagctccaaaactggatcaggatactgttctacttaccttgagagatagacttcgtaagttggggcagcgtctgcatgagaaaaacattgaggggcagaaacttctcaaaaaacattttgaagctagggacgcaaaagcgaaggaagaaccttctgactcatctaattctttggataagccacctgatgttccagagatcccggtgcattcatcagaagataccgttgatcttaaagtgaatggaacaccaaagaaggatgcatctgtggtcaaccctgttctggaggattctgtttcaggcataccagtcactgcaaacaatgaacctgtgccttctcccaccacaacaaaaatggacccagtttcaaacaaagttaatggatcaagtttgaaaatgaaagtcaccatggcatctccttgctccaaatcacatccagctgatatggataaagatgcctctcttccttctaaatcaccacgaaccaatagagctgctccagttcctcctaagctgccttcagctgataaagcaacgctagttccctcaaagctaccttcggttgataaagctactccagttcctcaaaaatctccgttggtaaacaaagtagctcaggcccgtcccaaatctccagcagttgacaaagcaactccacatcgtcccaaatctccagcagttgacaaagcaactccagttcgttctcaatctccagcagttgacaaagccactctagttcgccctcaatctccagcagttgacaaagcaactccagttcgtcctcaatccgcagcagttgacaaagcaactccagttcgcccaaaatctccagccattgataaagcaactccaattgctcccaaatctccaccagttgataaagcctctccagctctgccaaaatcattatcaggtgctaaagatgcgctttttccttctaggtcgctgcagattgataagtttactccagccgccccaaggttatcacaagatgataaggctgctctgccttcttcagaacagtcacatatatctccagctactagttctgaagctcaaggggcaactactaggaaggtcacaactaccacctcactttcagaggctgctgcagcatggaggccttcaagtgctcctgtgttacccacaccaagatcaaccgggccagctgcttcacatattcaaacttccacattgctttcccgctcgatgagtgaagcagctgggagaaggccagtaaatgatccttcattttctgccccatcttatactccacagacctaccggaatgcaataattggtaagtctggtctgtctatgacctccgcaagccttgcgtatcagccgtcttctctggatcaagacactgctccttcacggcctctatcagcatatgcatcaagtacagtcatgatgcctcctgcaggaagatctgatcagtcatcagctaggcatggattcaagtctgggcctggtaagttagaagcacatgacggctggcagcagtggaaaggtgacagtaatgttgatatgcatctctggagggaccacgctccttaccaacaaatgaccaacagtcaagcatatgagcagtctcggagggacgatacttatcagcaagcatgcagcagaggaacagaaaagttcagcaggcatgcaggactgcaagctaggcagcagttccaaaccgagacacccgccagtcatgtatggcatcaaccgcaggggccagtggcagaagaatttccacaccttgacatcataaacgacttgcttgaggaggaccagatcaacggcagtataccggagtcgtttcgtcaagactacaacgtgtttggcctgccgttttcaccgagaggaaacttgtcagacatggaaatggcttctgttagaagtcccgctcggttcaattcacccaagtacgatggtggattgtcgggggcttatgacatgaatgctgtcaatgggttgagggaacggcagtttccctcgttggatatctactctaatggcctgtctgacgtgagtgcttctaagccttggctgaatggctctgccagtccatcggtgagccttggggtcaacacaaatggataccacccccaggtgggtgagtacctgggaggtggggtgaacggggtctccttgtggcgccgccatgccaacggccgctggtaatgcgaggtgcctgtatacaatcatacagtcggaataatgttttgttgtaacagatggtttcgggcctgagctgatgcgccatgtaattaaaagtttttaagttttaaaagggaaagaaagagatacaccctgtaaagtctgcgcctttattaggataatttgagtgcttttctggttgaagttgaactctgacctaactttgttaaatttcaaagctaaatttggcggtggcctgtgggagagagaagaacggtatgaaggttagcctgtccgacgagtgctgacggagcaacctacctaatcgcctacactttgtgcttctgctaaacatgttagtaccctgtccaaaaaatatgtacttactagtttgcaaaagaatgacgttttggaagatctgagtcgactgagtgaaggatcgaaatctg

SEQ ID NO: 76815 - DNA, 5465 bp, Zea Mays
acaggccccaagccttcagaattgtttggacgttacacttggaggattgaaaacttctcgaaggagaagaaaagagaaatgaaaagtgagccatttgaagctggtggttacaaatggtatattcttgtatatcctcaaggatgtgatgtctctaatcatctttcattattcctttgcgttgctaatcatgacaaacttctcccaggatggagtcattttgcacagttcactatagctgtagccaatatagatcctaaaaagatgaagtactcagatactttgcataggttctggaagaaggagcatgattggggatggaaaaaatttatggagctatcaaagattcaggatggttttcttgttgatgatgttcttgaaatcatagctcaagttcaggttatcagggagaaagtggatagaccttttcgttgccttgatcgtccttaccggagagaattgatccgcatctatatgacaaatgtggaacaaatataccgacgttttattgaggagcgaagaagtaaattaagcaagctcattgaggacaaaataaaatggtccagttttcgtgctttctggtcagcaattgacccaaacaccaggcatcgcatgtccagggaaaagactgacaccatattgaaaatgttagtgaagcaattctttgtagagaaagaagttacttccacattagtgatggactccttgtatacgagtctgaaggcacttgaataccagatgaagggcaggaaaggcaaaacaaaattagcagatttggaagaactacctgcgcctatggtccatgttgacatggacatgtttattttggctgatgatgtcatagctttgcttgagagagctgccttagaacccttgccttgtcaacctttagcccccaaggatgataaaacttcccaaccccgcatgaaggatggaagttctggtgaggtttacaatgtttctatggagcgtgaggaaagacgtctaactgagcttggtcagaagatactagagacatttgtgctatctcatatatttaggtaacagttgatgtgtccattttgatctttgtgattacttaaattggattgattctcttggggtcatgtaggaactgattggttctgattttactggcttaaaaccagacatagcaaaacctaactataattggaactgaaatgatggttcaatttgaatgttcggcaaaactaatggcttgggttggattgtagtcactgggattgtcatgttctgtgaccccaaaacgtcatgatccatgggtcaaaatcgatgtgggttgctgccaggggcgaagccaggatttaagtttgggagggacaaatcagattgaggggctgttagaagatattttacattatttacctgataattagctaaaaaattagtagctcttatggaatttggggagggtttaggggggacattgtcccccctctgcccctccctggaatcgctcctggttgctaccatgttccccacatggaacgagatgtgtcaatgaacaaaatagggagggggatgttgcttagatgtgggaggcattcatcatcgaagaggggcaccagccactggcagtatacagcaccacaccagtgagagtgtcagttacagctggcatggtggtcgattgcatatccatattgtatgaatggggcactgtacacagcatgatttactttttcttgttcttttgtatttttaattactttgtgttgatcttctgttactattcatccatggcatatcaaagcttatcgaacctgctcatcaacctagattagttggggtcactcgatcatatctagcccctttgatttatttttctagatatctgtggctcacgtccccagccctgacccagtcagcccaaattttgcggtgattattagttggatagagttgtggaaatactactataaatcttatatgaagcctcttcagcttagcttattacaaccatttgcaaaaatatgactgatacatgttcaccaaatatattttgtaaatgctctagagcacatgccaaatatcaaaccaatgttttcaagtcggatgacttgctggtcgttctagctaaccgactagggtgattaatcgtgattaatcacgattagtcggacgatttggacgattaatcgtgattggtccaaactgacttggacgacttgaaaacattgtatcaaactcagaagaggctaaaagacattttctggttatttttatacactaaaaaaagagggcctattttatcgtaaggtttgaatttcaaaaagaaaacttggttagtggaatatctttaaatcgctggctagctgttctctaatggcgatataagctggctgtttcttttgcttcttacattttgtttttgttagtggaattgaagttgcgtaccaagaagctgttgcattgaaaaggcaagaggagcttattcgtgaggaggaggaggaggctgggcttcttgaacatcagatgaaggggaagcgtggtggtggtgtaaatgaaaaggacaagcgtgccaagaaaaagcagaccaagcaaaagaagaaccgtaaggctaaagacaaggaaagagatgagaaatgcgaggttaaaattctggaaaggcttcgtgatgaaactgccattgataatagtgatggcttaccatctcaggtggaagtgatagcaaagattgatgccttggaagaaggttcttcagatgggtcagacatgtcaaatagagggaaaaatcagcgtaacaagggcttaagcattattagctttgccgaggaaggtgatggtcttccctccacctctaatgtcactggtggtttaggccgcaatagttctggctgctgcacagctccaaaactggatcaggatactgttctacttaccttgagagatagacttcgtaagttggggcagcgtctgcatgagaaaaacattgaggggcagaaacttctcaaaaaacattttgaagctagggacgcaaaagcgaaggaagaaccttctgactcatctaattctttggataagccacctgatgttccagagatcccggtgcattcatcagaagataccgttgatcttaaagtgaatggaacaccaaagaaggatgcatctgtggtcaaccctgttctggaggattctgtttcaggcataccagtcactgcaaacaatgaacctgtgccttctcccaccacaacaaaaatggacccagtttcaaacaaagttaatggatcaagtttgaaaatgaaagtcaccatggcatctccttgctccaaatcacatccagctgatatggataaagatgcctctcttccttctaaatcaccacgaaccaatagagctgctccagttcctcctaagctgccttcagctgataaagcaacgctagttccctcaaagctaccttcggttgataaagctactccagttcctcaaaaatctccgttggtaaacaaagtagctcaggcccgtcccaaatctccagcagttgacaaagcaactccacatcgtcccaaatctccagcagttgacaaagcaactccagttcgttctcaatctccagcagttgacaaagccactctagttcgccctcaatctccagcagttgacaaagcaactccagttcgtcctcaatccgcagcagttgacaaagcaactccagttcgcccaaaatctccagccattgataaagcaactccaattgctcccaaatctccaccagttgataaagcctctccagctctgccaaaatcattatcaggtgctaaagatgcgctttttccttctaggtcgctgcagattgataagtttactccagccgccccaaggttatcacaagatgataaggctgctctgccttcttcagaacagtcacatatatctccagctactagttctgaagctcaaggggcaactactaggaaggtcacaactaccacctcactttcagaggctgctgcagcatggaggccttcaagtgctcctgtgttacccacaccaagatcaaccgggccagctgcttcacatattcaaacttccacattgctttcccgctcgatgagtgaagcagctgggagaaggccagtaaatgatccttcattttctgccccatcttatactccacagacctaccggaatgcaataattggtaagtctggtctgtctatgacctccgcaagccttgcgtatcagccgtcttctctggatcaagacactgctccttcacggcctctatcagcatatgcatcaagtacagtcatgatgcctcctgcaggaagatctgatcagtcatcagctaggcatggattcaagtctgggcctggtaagttagaagcacatgacggctggcagcagtggaaaggtgacagtaatgttgatatgcatctctggagggaccacgctccttaccaacaaatgaccaacagtcaagcatatgagcagtctcggagggacgatacttatcagcaagcatgcagcagaggaacagaaaagttcagcaggcatgcaggactgcaagctaggcagcagttccaaaccgagacacccgccagtcatgtatggcatcaaccgcaggggccagtggcagaagaatttccacaccttgacatcataaacgacttgcttgaggaggaccagatcaacggcagtataccggagtcgtttcgtcaagactacaacgtgtttggcctgccgttttcaccgagaggaaacttgtcagacatggaaatggcttctgttagaagtcccgctcggttcaattcacccaagtacgatggtggattgtcgggggcttatgacatgaatgctgtcaatgggttgagggaacggcagtttccctcgttggatatctactctaatggcctgtctgacgtgagtgcttctaagccttggctgaatggctctgccagtccatcggtgagccttggggtcaacacaaatggataccacccccaggtgggtgagtacctgggaggtggggtgaacggggtctccttgtggcgccgccatgccaacggccgctggtaatgcgaggtgcctgtatacaatcatacagtcggaataatgttttgttgtaacagatggtttcgggcctgagctgatgcgccatgtaattaaaagtttttaagttttaaaagggaaagaaagagatacaccctgtaaagtctgcgcctttattaggataatttgagtgcttttctggttgaagttgaactctgacctaactttgttaaatttcaaagctaaatttggcggtggcctgtgggagagagaagaacggtatgaaggttagcctgtccgacgagtgctgacggagcaacctacctaatcgcctacactttgtgcttctgctaaacatgttagtaccctgtccaaaaaatatgtacttactagtttgcaaaagaatgacgttttggaagatctgagtcgactgagtgaaggatcgaaatctg

SEQ ID NO: 76816 - DNA, 4156 bp, Zea Mays
ctaaagttttgttttgtgctatccatagctcatttggttgaattatcttaacaggccccaagccttcagaattgtttggacgttacacttggaggattgaaaacttctcgaaggagaagaaaagagaaatgaaaagtgagccatttgaagctggtggttacaaatggtatattcttgtatatcctcaaggatgtgatgtctctaatcatctttcattattcctttgcgttgctaatcatgacaaacttctcccaggatggagtcattttgcacagttcactatagctgtagccaatatagatcctaaaaagatgaagtactcagatactttgcataggttctggaagaaggagcatgattggggatggaaaaaatttatggagctatcaaagattcaggatggttttcttgttgatgatgttcttgaaatcatagctcaagttcaggttatcagggagaaagtggatagaccttttcgttgccttgatcgtccttaccggagagaattgatccgcatctatatgacaaatgtggaacaaatataccgacgttttattgaggagcgaagaagtaaattaagcaagctcattgaggacaaaataaaatggtccagttttcgtgctttctggtcagcaattgacccaaacaccaggcatcgcatgtccagggaaaagactgacaccatattgaaaatgttagtgaagcaattctttgtagagaaagaagttacttccacattagtgatggactccttgtatacgagtctgaaggcacttgaataccagatgaagggcaggaaaggcaaaacaaaattagcagatttggaagaactacctgcgcctatggtccatgttgacatggacatgtttattttggctgatgatgtcatagctttgcttgagagagctgccttagaacccttgccttgtcaacctttagcccccaaggatgataaaacttcccaaccccgcatgaaggatggaagttctggtgaggtttacaatgtttctatggagcgtgaggaaagacgtctaactgagcttggtcagaagatactagagacatttgtgctatctcatatatttagtggaattgaagttgcgtaccaagaagctgttgcattgaaaaggcaagaggagcttattcgtgaggaggaggaggaggctgggcttcttgaacatcagatgaaggggaagcgtggtggtggtgtaaatgaaaaggacaagcgtgccaagaaaaagcagaccaagcaaaagaagaaccgtaaggctaaagacaaggaaagagatgagaaatgcgaggttaaaattctggaaaggcttcgtgatgaaactgccattgataatagtgatggcttaccatctcaggtggaagtgatagcaaagattgatgccttggaagaaggttcttcagatgggtcagacatgtcaaatagagggaaaaatcagcgtaacaagggcttaagcattattagctttgccgaggaaggtgatggtcttccctccacctctaatgtcactggtggtttaggccgcaatagttctggctgctgcacagctccaaaactggatcaggatactgttctacttaccttgagagatagacttcgtaagttggggcagcgtctgcatgagaaaaacattgaggggcagaaacttctcaaaaaacattttgaagctagggacgcaaaagcgaaggaagaaccttctgactcatctaattctttggataagccacctgatgttccagagatcccggtgcattcatcagaagataccgttgatcttaaagtgaatggaacaccaaagaaggatgcatctgtggtcaaccctgttctggaggattctgtttcaggcataccagtcactgcaaacaatgaacctgtgccttctcccaccacaacaaaaatggacccagtttcaaacaaagttaatggatcaagtttgaaaatgaaagtcaccatggcatctccttgctccaaatcacatccagctgatatggataaagatgcctctcttccttctaaatcaccacgaaccaatagagctgctccagttcctcctaagctgccttcagctgataaagcaacgctagttccctcaaagctaccttcggttgataaagctactccagttcctcaaaaatctccgttggtaaacaaagtagctcaggcccgtcccaaatctccagcagttgacaaagcaactccacatcgtcccaaatctccagcagttgacaaagcaactccagttcgttctcaatctccagcagttgacaaagccactctagttcgccctcaatctccagcagttgacaaagcaactccagttcgtcctcaatccgcagcagttgacaaagcaactccagttcgcccaaaatctccagccattgataaagcaactccaattgctcccaaatctccaccagttgataaagcctctccagctctgccaaaatcattatcaggtgctaaagatgcgctttttccttctaggtcgctgcagattgataagtttactccagccgccccaaggttatcacaagatgataaggctgctctgccttcttcagaacagtcacatatatctccagctactagttctgaagctcaaggggcaactactaggaaggtcacaactaccacctcactttcagaggctgctgcagcatggaggccttcaagtgctcctgtgttacccacaccaagatcaaccgggccagctgcttcacatattcaaacttccacattgctttcccgctcgatgagtgaagcagctgggagaaggccagtaaatgatccttcattttctgccccatcttatactccacagacctaccggaatgcaataattggtaagtctggtctgtctatgacctccgcaagccttgcgtatcagccgtcttctctggatcaagacactgctccttcacggcctctatcagcatatgcatcaagtacagtcatgatgcctcctgcaggaagatctgatcagtcatcagctaggcatggattcaagtctgggcctggtaagttagaagcacatgacggctggcagcagtggaaaggtgacagtaatgttgatatgcatctctggagggaccacgctccttaccaacaaatgaccaacagtcaagcatatgagcagtctcggagggacgatacttatcagcaagcatgcagcagaggaacagaaaagttcagcaggcatgcaggactgcaagctaggcagcagttccaaaccgagacacccgccagtcatgtatggcatcaaccgcaggggccagtggcagaagaatttccacaccttgacatcataaacgacttgcttgaggaggaccagatcaacggcagtataccggagtcgtttcgtcaagactacaacgtgtttggcctgccgttttcaccgagaggaaacttgtcagacatggaaatggcttctgttagaagtcccgctcggttcaattcacccaagtacgatggtggattgtcgggggcttatgacatgaatgctgtcaatgggttgagggaacggcagtttccctcgttggatatctactctaatggcctgtctgacgtgagtgcttctaagccttggctgaatggctctgccagtccatcggtgagccttggggtcaacacaaatggataccacccccaggtgggtgagtacctgggaggtggggtgaacggggtctccttgtggcgccgccatgccaacggccgctggtaatgcgaggtgcctgtatacaatcatacagtcggaataatgttttgttgtaacagatggtttcgggcctgagctgatgcgccatgtaattaaaagtttttaagttttaaaagggaaagaaagagatacaccctgtaaagtctgcgcctttattaggataatttgagtgcttttctggttgaagttgaactctgacctaactttgttaaatttcaaagctaaatttggcggtggcctgtgggagagagaagaacggtatgaaggttagcctgtccgacgagtgctgacggagcaacctacctaatcgcctacactttgtgcttctgctaaacatgttagtaccctgtccaaaaaatatgtacttactagtttgcaaaagaatgacgttttggaagatctgagtcgactgagtgaaggatcgaaatctg

SEQ ID NO: 76817 - DNA, 5128 bp, Zea Mays
ataagtcctgcgactgaatgaatattattgcggttggtggtcaaagatagaaaaacaaaagcaattctatactacttcaagggggcatctgcaaacctccctctgcgtcctcggaaacggaaggtggcctggccctggccgggagtggttaacctcggcgagccgctttgtcttctattccccactccatcctactccgccatggcggtgaaggggaagggtaagcaggtggccgccgaatcccctggccctggcgctggcgctggcggtgcctccgggtccggcgggaagcggcggatggcctctagtgacgcgggggcggggccctcgtcgtcatccgctgcgaagcgccgccgccgcgccggggtcctccagttcgtcgacgacgtagctggcgtcgacgacgattatgaggaggacgagctcgagtccgaggatgacaccgatgatggtttctttactggtggggaacatgcacaaaatctgagtcacaaaagaactgaaaggtcacaccctcttccatttcttgtgaaggaagaggagcttagtggcgatgaacttgaggaattcatcaagaaccgatacagtaatcgtgtgaaatacgctgctgatcggagctattctagagaagacgatgacattttctccatggattgtgcactcaaagagccgactatttggagagttaaatgcatggttgggcgtgagcgccaaatggccttctgcttcatgcaaaaatttgttgaccttcgaaaaattggtaccaaagtgccaattattacagcatttgcacttgatcacataagagggtttgtttttgttgaagcggagaaggcctgtgatgttacagaggcatgcaaagggttttgtagtgtgtacacaagcagaatcacttctgttcctgcagctgaagttcctagcttgttatccagccgtacgaaaccatttgaaatctctcgtggtacatggatccgcatgaagaatggaaactataaaggtgatctggcacaggttgttagcgtggatgatggacggaaaaaagtgatgataaaaattgtacccagagttgacctccatgctatttcaaaaaaatttggtggtgcagtttcactaaaaggagctgcagttcctgctccacggttgatcagctcccaagaactagagttcttcaggcctcatattgaaataaagcgcgaccgtcagactggtgaagtttttgaagtacttgatggtttgatgttcaaagatggatttctgtataagaaggttgcacttagttctttgatttattgggggatacaaccgacagaaacagagcttttgaagttctcttctagcccaagcaatagagcttctgctgatgacttggattggctctccggcatgtatggttctaagaaaaggaaccttccagaaaaacgagatatggaatcatcatcttctaaaataagatcctccaaagcatcagaccttaaagcgtcaacttctactgaaaattatgacgagaacgatgaattcaaccttcatgatcttgtactctatgggcgaaaagattttggtgtgattgttgctgttgagaaagatggttttaggatactaaagggtggtcctgaaggatctgcggtgaaagtgagaaagcaggatattaagaaaggctgcgtagataaaatgtttacagctgttgatcatcaaaagaagacaatatccattaacgacactgttaatgttgtggaagggccatttcagggtaagcaaggggtcgttaaacacttgtacttgggaatactgttcatttataatgaaagtgaaagtgagaactgtggatttttctgtgctcaaagcgggtcatgcgaaaagatacgaaagggtctgggaagctctactactgaaagttcggactttacaactcctatgtttcctgaacctgcttatgagcaaaatgggcatcgggacactgaaaggccttacaggagcaccagagaacaacttttctctattgggcagatgctgcgcattagaaagggtcctttgaagggctacctctgtcgagtagttcggatatttcggaatgatgtgactgttaagctagattctctactgaaaattgttacagtacaagctgatcttctctcagtcccagctaacaggggggataacttgtctggtgccccagctagtaaatttggaagtcaagatacatccttctttggttcagaagcaggcaaaacttcatgggacaatgggttgccatcgtttggaagtgactcatggcaacccttttcgagttcaacactatcagttcagaatgcaggtggagaatcagaagctgatccatggtctaagaaaacttctgccaaagatgattctgatccatggggtaagaaaactgatggtgattctgatcgatggggtaagaaaactgatggtgattctgatccatggggcaaggaagcggtatctgctgctgatggtgattccaatccatggggtaaggaaacagtaccttccgctgctggtgattctgatccatggggtaagaaagtggtgtcttctgctgatggtgattctgattcatggggtaagaaagcaacatcatcagctgttgacactgaaaaggaaggttctggtggtactgcatgggacaaacaagctggagttggtggatctgatgctgctggcagctcctgggacagagcggttgtcaatgagagtgaaaagagtgacaactggggagaggcttgcagggttatggacatgggaactggagctgaagctgacactgacccttggggaagcaaggtcaaagcagtagatatggaaggaccaaataactgggaaaaggctacagtgcctccaaacaataagctggaggatgtcagtcaaggatggggccaacctaagggcaactcaactgaagaccaagcaatagacaacgtttctaaagacgtggacaacaacagggcttgtgacagttctttgcctgtcactgaagatggtacctggggcaagtcaaaagacaacagttgtggtggagcaggtggtgcgggaggttgggatgtttctgttggcaactggaataaatcatctgttgtggctgatgcacaggatgaaggttggggcaaaggaaactggtcatctgctgagtctgaagaaacaaacaatcaaagcggaaattggaacaaaactggagcttcggaccaagctggttacaacaattgggataaaccgaaatcctttggtggtaatggttggaacaagggtgatgatcagaatagcagttggaacaggcctgaaaattttggaggtggacgtggctttgggcgtggacaagggagaggtaggggtcaacaatctggatatttcaatggcagaaatgatcaaggaagctggaagaagtcatggggtagtgacaatgctgaaagaccctcttggaggtctgataatcaggtagacaatgaggctggagagtctggtggatataggggaaggggaagaggaggaagggggcaatatggaggacgaggtaaagacaatggttggagaaatgatgatagaagcaattctgggtttggaagggaaaataacagtggcgatggaccaaaatggggtggtggaggtaattggaacgctacaaatccaccaagtagcagtgtaggcaccaagtcatatggtcaaaatcagcctttcacttggaataattctgaggataacaaaccatctgtaggtgaacaaggtgatccttgggcaagcaaggtgtcttctactgaagaacaacagaatgattcttggtcaagcaagatgatttctggtggtgctgaggataccagtggtggctgggacaccaaggtgaaagactcttcctgcaatgatgggggtgaaggactacaaaatgatccatgggcaaacaagattggttctaatgaaggtaaagaacaagaaactgatccttgggccagcaagatgtcttctactgtgtgtgctgatgacaagaaaggtagctggaacactacagcaaagggcattccatctaaggaaaaggctgatgatccatggaatagtaaggggggtaatgatgacagcaagaaaactgacacctggggtgctggctcgtcaggtggggatcaggaactttcttggagcaaacctaatttctctttgggggaccaggaatctacttggaacaacccaaggttcagtgacgatgacaatgcgaataatagaggtggatttggacgtggaaatcgaggcagagggagaggaaggaattttggggatggtggtgggtcatcatggaatggaggcaatagaaacgatgaatcaggtggcggaaggtctggagagccatggaacagaagggactttgatggtggcggaggaagaggcagaggtcgttttgggcgaggtgaccgtaaccagggcaacaacttcgggtcaggagatggtggcagctggggctctggcaggggaaatggtggccgcggtggttacaggaactggaacgataacaatgagcgatccttcggtgaaggtggtggctggtcccagtcccagtcttccgattggaatgccaacaaaggaaatggcgaaggaaatcaagctttctcgaaaagcaagcccagctgggaagcacaaaacacctctggtagagatggtcaggcaggaaagggtgatgcaaacaactcctggagtaagaacagatcatctccatctagcgcttggggcgctcccagtggaggagctggcggccgaggttcttggggaaagagcaacgaggatggctggaactcagcgggaggatcagccaaagagaagcctgcatggggtggtgggtcagaagcgtctaccaagaaagaggacaaaggtggtgaggggaacgggagccaaggaggaggtggtgtcagttcctgggataaaggggcagatgatgcatggaacggcaacacgggtagtgatattgggagtggtggatggtaagatttccgccaaaataatatgaactctgtcggtgcgtgtgtctagttcgtatccgttacttcgccatgtgtactctacactaaaaagaacatggcttgtgaccatttaaacattaccttagtggtggcagtaactagtaaaaaagataaataaa

SEQ ID NO: 76818 - DNA, 5058 bp, Zea Mays
ataagtcctgcgactgaatgaatattattgcggttggtggtcaaagatagaaaaacaaaagcaattctatactacttcaagggggcatctgcaaacctccctctgcgtcctcggaaacggaaggtggcctggccctggccgggagtggttaacctcggcgagccgctttgtcttctattccccactccatcctactccgccatggcggtgaaggggaagggtaagcaggtggccgccgaatcccctggccctggcgctggcgctggcggtgcctccgggtccggcgggaagcggcggatggcctctagtgacgcgggggcggggccctcgtcgtcatccgctgcgaagcgccgccgccgcgccggggtcctccagttcgtcgacgacgtagctggcgtcgacgacgattatgaggaggacgagctcgagtccgaggatgacaccgatgatggtttctttactggtggggaacatgcacaaaatctgagtcacaaaagaactgaaaggtcacaccctcttccatttcttgtgaaggaagaggagcttagtggcgatgaacttgaggaattcatcaagaaccgatacagtaatcgtgtgaaatacgctgctgatcggagctattctagagaagacgatgacattttctccatggattgtgcactcaaagagccgactatttggagagttaaatgcatggttgggcgtgagcgccaaatggccttctgcttcatgcaaaaatttgttgaccttcgaaaaattggtaccaaagtgccaattattacagcatttgcacttgatcacataagagggtttgtttttgttgaagcggagaaggcctgtgatgttacagaggcatgcaaagggttttgtagtgtgtacacaagcagaatcacttctgttcctgcagctgaagttcctagcttgttatccagccgtacgaaaccatttgaaatctctcgtggtacatggatccgcatgaagaatggaaactataaaggtgatctggcacaggttgttagcgtggatgatggacggaaaaaagtgatgataaaaattgtacccagagttgacctccatgctatttcaaaaaaatttggtggtgcagtttcactaaaaggagctgcagttcctgctccacggttgatcagctcccaagaactagagttcttcaggcctcatattgaaataaagcgcgaccgtcagactggtgaagtttttgaagtacttgatggtttgatgttcaaagatggatttctgtataagaaggttgcacttagttctttgatttattgggggatacaaccgacagaaacagagcttttgaagttctcttctagcccaagcaatagagcttctgctgatgacttggattggctctccggcatgtatggttctaagaaaaggaaccttccagaaaaacgagatatggaatcatcatcttctaaaataagatcctccaaagcatcagaccttaaagcgtcaacttctactgaaaattatgacgagaacgatgaattcaaccttcatgatcttgtactctatgggcgaaaagattttggtgtgattgttgctgttgagaaagatggttttaggatactaaagggtggtcctgaaggatctgcggtgaaagtgagaaagcaggatattaagaaaggctgcgtagataaaatgtttacagctgttgatcatcaaaagaagacaatatccattaacgacactgttaatgttgtggaagggccatttcagggtaagcaaggggtcgttaaacacttgtacttgggaatactgttcatttataatgaaagtgaaagtgagaactgtggatttttctgtgctcaaagcgggtcatgcgaaaagatacgaaagggtctgggaagctctactactgaaagttcggactttacaactcctatgtttcctgaacctgcttatgagcaaaatgggcatcgggacactgaaaggccttacaggagcaccagagaacaacttttctctattgggcagatgctgcgcattagaaagggtcctttgaagggctacctctgtcgagtagttcggatatttcggaatgatgtgactgttaagctagattctctactgaaaattgttacagtacaagctgatcttctctcagtcccagctaacaggggggataacttgtctggtgccccagctagtaaatttggaagtcaagatacatccttctttggttcagaagcaggcaaaacttcatgggacaatgggttgccatcgtttggaagtgactcatggcaacccttttcgagttcaacactatcagttcagaatgcaggtggagaatcagaagctgatccatggtctaagaaaacttctgccaaagatgattctgatccatggggtaagaaaactgatggtgattctgatcgatggggtaagaaaactgatggtgattctgatccatggggcaaggaagcggtatctgctgctgatggtgattccaatccatggggtaaggaaacagtaccttccgctgctggtgattctgatccatggggtaagaaagtggtgtcttctgctgatggtgattctgattcatggggtaagaaagcaacatcatcagctgttgacactgaaaaggaaggttctggtggtactgcatgggacaaacaagctggagttggtggatctgatgctgctggcagctcctgggacagagcggttgtcaatgagagtgaaaagagtgacaactggggagaggcttgcagggttatggacatgggaactggagctgaagctgacactgacccttggggaagcaaggtcaaagcagtagatatggaaggaccaaataactgggaaaaggctacagtgcctccaaacaataagctggaggatgtcagtcaaggatggggccaacctaagggcaactcaactgaagaccaagcaatagacaacgtttctaaagacgtggacaacaacagggcttgtgacagttctttgcctgtcactgaagatggtacctggggcaagtcaaaagacaacagttgtggtggagcaggtggtgcgggaggttgggatgtttctgttggcaactggaataaatcatctgttgtggctgatgcacaggatgaaggttggggcaaaggaaactggtcatctgctgagtctgaagaaacaaacaatcaaagcggaaattggaacaaaactggagcttcggaccaagctggttacaacaattgggataaaccgaaatcctttggtggtaatggttggaacaagggtgatgatcagaatagcagttggaacaggcctgaaaattttggaggtggacgtggctttgggcgtggacaagggagaggtaggggtcaacaatctggatatttcaatggcagaaatgatcaaggaagctggaagaagtcatggggtagtgacaatgctgaaagaccctcttggaggtctgataatcaggtaaagacaatggttggagaaatgatgatagaagcaattctgggtttggaagggaaaataacagtggcgatggaccaaaatggggtggtggaggtaattggaacgctacaaatccaccaagtagcagtgtaggcaccaagtcatatggtcaaaatcagcctttcacttggaataattctgaggataacaaaccatctgtaggtgaacaaggtgatccttgggcaagcaaggtgtcttctactgaagatacagaacaacagaatgattcttggtcaagcaagatgatttctggtggtgctgaggataccagtggtggctgggacaccaaggtgaaagactcttcctgcaatgatgggggtgaaggactacaaaatgatccatgggcaaacaagattggttctaatgaaggtaaagaacaagaaactgatccttgggccagcaagatgtcttctactgtgtgtgctgatgacaagaaaggtagctggaacactacagcaaagggcattccatctaaggaaaaggctgatgatccatggaatagtaaggggggtaatgatgacagcaagaaaactgacacctggggtgctggctcgtcaggtggggatcaggaactttcttggagcaaacctaatttctctttgggggaccaggaatctacttggaacaacccaaggttcagtgacgatgacaatgcgaataatagaggtggatttggacgtggaaatcgaggcagagggagaggaaggaattttggggatggtggtgggtcatcatggaatggaggcaatagaaacgatgaatcaggtggcggaaggtctggagagccatggaacagaagggactttgatggtggcggaggaagaggcagaggtcgttttgggcgaggtgaccgtaaccagggcaacaacttcgggtcaggagatggtggcagctggggctctggcaggggaaatggtggccgcggtggttacaggaactggaacgataacaatgagcgatccttcggtgaaggtggtggctggtcccagtcccagtcttccgattggaatgccaacaaaggaaatggcgaaggaaatcaagctttctcgaaaagcaagcccagctgggaagcacaaaacacctctggtagagatggtcaggcaggaaagggtgatgcaaacaactcctggagtaagaacagatcatctccatctagcgcttggggcgctcccagtggaggagctggcggccgaggttcttggggaaagagcaacgaggatggctggaactcagcgggaggatcagccaaagagaagcctgcatggggtggtgggtcagaagcgtctaccaagaaagaggacaaaggtggtgaggggaacgggagccaaggaggaggtggtgtcagttcctgggataaaggggcagatgatgcatggaacggcaacacgggtagtgatattgggagtggtggatggtaagatttccgccaaaataatatgaactctgtcggtgcgtgtgtctagttcgtatccgttacttcgccatgtgtactctacactaaaaagaacatggcttgtgaccatttaaacattaccttagtggtggcagtaactagtaaaaaagataaataaa

SEQ ID NO: 76819 - DNA, 1786 bp, Zea Mays
gtcaaagatagaaaaacaaaagcaattctatactacttcaagggggcatctgcaaacctccctctgcgtcctcggaaacggaaggtggcctggccctggccgggagtggttaacctcggcgagccgctttgtcttctattccccactccatcctactccgccatggcggtgaaggggaagggtaagcaggtggccgccgaatcccctggccctggcgctggcgctggcggtgcctccgggtccggcgggaagcggcggatggcctctagtgacgcgggggcggggccctcgtcgtcatccgctgcgaagcgccgccgccgcgccggggtcctccagttcgtcgacgacgtagctggcgtcgacgacgattatgaggaggacgagctcgagtccgaggatgacaccgatgatggtttctttactggtggggaacatgcacaaaatctgagtcacaaaagaactgaaaggtcacaccctcttccatttcttgtgaaggaagaggagcttagtggcgatgaacttgaggaattcatcaagaaccgatacagtaatcgtgtgaaatacgctgctgatcggagctattctagagaagacgatgacattttctccatggattgtgcactcaaagagccgactatttggagagttaaatgcatggttgggcgtgagcgccaaatggccttctgcttcatgcaaaaatttgttgaccttcgaaaaattggtaccaaagtgccaattattacagcatttgcacttgatcacataagagggtttgtttttgttgaagcggagaaggcctgtgatgttacagaggcatgcaaagggttttgtagtgtgtacacaagcagaatcacttctgttcctgcagctgaagttcctagcttgttatccagccgtacgaaaccatttgaaatctctcgtggtacatggatccgcatgaagaatggaaactataaaggtgatctggcacaggttgttagcgtggatgatggacggaaaaaagtgatgataaaaattgtacccagagttgacctccatgctatttcaaaaaaatttggtggtgcagtttcactaaaaggagctgcagttcctgctccacggttgatcagctcccaagaactagagttcttcaggcctcatattgaaataaagcgcgaccgtcagactggtgaagtttttgaagtacttgatggtttgatgttcaaagatggatttctgtataagaaggttgcacttagttctttgatttattgggggatacaaccgacagaaacagagcttttgaagttctcttctagcccaagcaatagagcttctgctgatgacttggattggctctccggcatgtatggttctaagaaaaggaaccttccagaaaaacgagatatggaatcatcatcttctaaaataagatcctccaaagcatcagaccttaaagcgtcaacttctactgaaaattatgacgagaacgatgaattcaaccttcatgatcttgtactctatgggcgaaaagattttggtgtgattgttgctgttgagaaagatggttttaggatactaaagggtggtcctgaaggatctgcggtgaaagtgagaaagcaggatattaagaaaggctgcgtagataaaatgtttacagctgttgatcatcaaaagaagacaatatccattaacgacactgttaatgttgtggaagggccatttcagtacatgtagcatgcttttggattccagcatgtgtttttggagtattcaagaataccatattttccacttagcacacttg

SEQ ID NO: 76820 - DNA, 1299 bp, Zea Mays
gccccccgtctcaacgctactccacccccgttccctgattttgaaatgatgcccccgttccccaccgatttggaaattggtgcccccatactgccatttgcgtgcaccatatgcgctcgacataggtcgccaccatccacgggtcgccgaggcctcatttggaaatgccccccgttccccaccgatttggcagttggagatcctatgtcgtggatggcgcccccacgtcgtcaattgtgtgcaaggggtaggctgactccctgtcctgcctacgtcgtcagtgtataccttgatcgatccttgccctcccgagccatcgcaacccccgctcgtggccaccatcgtccatcacaacctccccttcccggtcgtccaacctgcaacctcgtgtgtagccgccttcgtgcgccgtgggtgtccctcctcgctcgcgaccaacccgcccccgcgacctctgcatctcgtcggcctatgcgtcctgcgtcgctcgcccactcctccgctccttgcccgccgcggacatggacgactgcttcctcgtcgcacgaccactatgccccgccgcgacctccgccctgccgccgttagagcccaaacgagcgaggcatcaccatgcacgatgtgcaagacctacccgcagtaggccaacaccgtctgcaagaacgacttcatcatcatcaagaaccgtccctgcaagcatattataacaggtcacagaacaatcagacaaggatggagattccttggaaaagatacagagcttccaagtttcaacccatgatgagggagctggactggatgttcatgttgcaagtgtactatctactacatgaacatggtatccacctacaacctgaagttgaggccaccacagtactgggtacaaactacaattcatatttggtgtccagtggggctggcgcctcattaactaaaatatcatgttgcagtatttcaaaagatcatcacataaatcatgttgaagaggatggttcgatcgttaagatcggtcatgaagagaagcttgatgagtacatgaagttctttgatggtctccctggttagacgtttaactgcaactggcaatgttttcttggggacaattggattttatttgtcgttttgctttcttatggtcgttatatggaatgttactagatagttagttcggtctgttggtgtatcctcctgaactttcctgtcattgctgttagttatggcaccaggtttgttctcaattgctatttagggaagttattgcataaagggttatttggcactaggtttgttcccaattgc

SEQ ID NO: 76821 - DNA, 1803 bp, Zea Mays
acccctttcggtgtccttgcctctctcggcctctccccactctcgcgaatctcgatcgccgtcttctccgcgtccttgcctaaaccctgcgctcaaaaccaaaacctaaactaaaacctccgcatctttttcacttcctttttccctcccttctcccgcaagccacgagctcgctgccgcgccaatcgccatgtcgcgtctcctcctccgccaccgcagcttcctcctcccaggggcgcggagcgacgccagccaccccttcacggccgcctcctcctcctcccgctcctcatacacttcccggttctcccctctcgcctaccacgcctccgccgcggccacggccgcaggcgcccaatcagagggtgcggcggccgagtccacacccgcagcgggcgaccagccctcatcgacacctccccccgcggcacgcgggcggtggggcttgctcaagttcggcgccttggcagcagtcgccggggccatcggcggcgtcggatacgtcacctacgcctattcgctgaatgaagtggaggagaagacgagagagttcaggaagaacccaaggctgctcatccctgaggatgcctccacgttcgagaagtataaagctatggtgtactcgacggctatgaaagttcctgtttcagctatagagctgtatttggatattaggagcacaattgaagaccatgtcaggggatttactgaacccacatcagacaaactgctaccagatctacttcctcaagatcagcatgtcttcaccctagttcttgatctgaatgaaactcttgtctactctgattggcagcgtgagaggggatggagaacttttaagaggccaggagttgatgcgtttctggaacatatgtcaaaattatatgaagttgttgtgtattctgatcagccacctatgtatgttgaacctgtgtttgagaggctgaactcaaggggtaccatttcacacaggctatcaagacctgcaactaagatttgtcaaagttgaacagaaaccctgctcaagtgatctatctcagcgcccatgctcttgaatcttgcctgcagcatgaaaattgtgttgaaatcaaaccttttaaacttgaagataaaaatgatacccaactgctggatctcattccatttctcgagtatgttgccatggctagaccttctgacattaggacagtgctggcatcctatcaaggtcatgatgttgctgctaagtttattgagcgttcaaaggaacaccagcggcgcgtgcaggaacagagcaaacttgggcgcttatggcgacggtgatggatcctggaaggatagtggactttctgatttgtgaatcctagacgtcatgttttcgaaagagcgcatggaacctttttattcttgtccggagtcaaattgttggctgctgttcagggatatcttagttttggcagtttaggtttgggcctttttataaaatttaggcattctagtgagaacatcggttggattggatggtcaatgctgagacttttgagaccatgtgactcaaaggttgctatgatggagctgtcaaaacgtgcttcatgcggaagactgaaaagcgattgttcatgggtcatcgtagcatcttcggtcaatattttcttggattgtttggtttcgcaactactactctcagatttatggacttgaagggcttttgtatttttgtcgacatgtaagagcgcatcacataatactggatttacctgagaattcatgtgagatacatctagtttctggcacttaaaagttcaactggtgtccgtggaaccc

SEQ ID NO: 76822 - DNA, 574 bp, Zea Mays
ggcatcattagctgctgcaataagactagcttcttctgctgatctcgttttcagtattatatctatgtatgtgccagataccgtggatgtggtaggtggcaaccgggctcagagatcatctggctgctgttaagacatgaggcatccacgaggcgtggtgatcatcatcggctatgcagtgaccaaacaatacctcaacattgctgggcctccatggttatctacgtgtccgtattccatttgttacctttccagtctcctgctatgtacccaagggcgcatttcccatgctgtcagtcaatccgtagacttcatttgtgcagttccatcagtagcgtcataccttgtgaatacagttggacaaaataagagcaagcctgaactgaagttcgtctctgtgtgggatgggggtcgccttttcctcgctttctgcttcaatgcgagttgccacacccgtgctggctagaaatgccgtcccttctggaaagcgacacccagttggcaccataaattcaatgcaagacgtcttcaaaatcagttgccataatttgaatttcaattggagcagatttgc

SEQ ID NO: 76823 - DNA, 1175 bp, Zea Mays
cacatcgcgtcgcgattcgcgagggctccccccaaccccatcaagtctggccaggtctctcccatatcgggttctcccttcctcttcctgtttccgcgcgcgagatcgccgccccgggtgggctctagatcccgatggcctcgcgccgccgcaccctgctcaaggtcatcatcctcggcgacagcggggttgggaagacgtctttgatgaaccaatatgtgaacaagaagttcagcaaccagtacaaggctacgattggggcggatttcctcaccaaggaggtgcagttcgaggacaggctcttcactctgcaagaaaggtttcagagtcttggcgttgcattctaccggggagcagattgttgtgtcctagtctatgatgttaattctatgaaatcgtttgataatcttcacaactggcgtgaagagtttctaattcaggcgagcccatcagatcctgacaatttcccttttgttctgttgggtaacaaagttgatgtagatggtgggaacagccgtgtggtgtcggagaaaaaggcaaaggcatggtgcgcctctaaagggaacatcccgtactttgagacgtctgctaaggatggaacgaacgtggaagatgccttccagtgtattgtaaagaatgctctgaagaatgaaccggaggaagaattgtatgtgccagataccgtggatgtggtaggtggcaaccgggctcagagatcatctggctgctgttaagacatgaggcatccacgaggcgtggtgatcatcatcggctatgcagtgaccaaacaatacctcaacattgctgggcctccatggttatctacgtgtccgtattccatttgttacctttccagtctcctgctatgtacccaagggcgcatttcccatgctgtcagtcaatccgtagacttcatttgtgcagttccatcagtagcgtcataccttgtgaatacagttggacaaaataagagcaagcctgaactgaagttcgtctctgtgtgggatgggggtcgccttttcctcgctttctgcttcaatgcgagttgccacacccgtgctggctagaaatgccgtcccttctggaaagcgacacccagttggcaccataaattcaatgcaagacgtcttcaaaatcagttgccataatttgaatttcaattggagcagatttgc

SEQ ID NO: 76824 - DNA, 624 bp, Zea Mays
cgcaagttgcccaaggaccaaagcagctgcccaaggagaaagtcctggcgcaccgccgcgcggcctccgtactagtgagcgtccgcgtccatggccaaaggcaggttcaagcacaagcccacgggggagcgcagcttctccagccccgaggatatcgcggctggtacttcagcaggccgtccaaagaccttcgccaagcatgatgagaaggatgtctacagtagaaggggggaaccagaagaagaatcagaagattttatgaaaccaaaacacaagggtatagaaggtctgatcgagattgagaatccaaacctggtgaaaacaaagaatgtaaaggccaaggacattgatattgggaagccaactgatatgtccaggcgtgaaagagaggatcttgacaaacagaaatctcatgagcgccatatgaagcttcaagagcaaggaaaaacagaacaggctaggaaagatttagagcgtcttactataatccgtcaacaaagggcagaagctacaaagaagcgagaggaggaaaaggctgggatgtctatattgtttgatgagcttaaccatagtactctgacagcaaaaacgatgcagaaacatgatgacccgaggcaatgctaa

SEQ ID NO: 76825 - DNA, 832 bp, Zea Mays
gcaagttgcccaaggaccaaagcagctgcccaaggagaaagtcctggcgcaccgccgcgcggcctccgtactagtgagcgtccgcgtccatggccaaaggcaggttcaagcacaagcccacgggggagcgcagcttctccagccccgaggatatcgcggctggtacttcagcaggccgtccaaagaccttcgccaagcatgatgagaaggatgtctacagtagaaggggggaaccagaagaagaatcagaagattttatgaaaccaaaacacaagggtatagaaggtctgatcgagattgagaatccaaacctggtgaaaacaaagaatgtaaaggccaaggacattgatattgggaagccaactgatatgtccaggcgtgaaagagaggatcttgacaaacagaaatctcatgagcgccatatgaagcttcaagagcaaggaaaaacagaacaggctaggaaagatttagagcgtcttactataatccgtcaacaaagggcagaagctacaaagaagcgagaggaggaaaaggctgccaaagaagagaggaaggctaataaagctctcaagtgacctgcacacgatagcgttttgggagatgtgtagctagtagtggtggtgacgactcatcgatgagcgatggcaagttggcaactgtcagctttgtgcgcggtgtagtagccggagcagtagcaactttgttgaaaaatacattcatgctgtggcgtttttcttattcaatcgtaggtccttatactgctacagtgtaaatcatcattgcaatataatcaaggtttttcttttcgtcgctgtcaaatttcttggaaaat

SEQ ID NO: 76826 - DNA, 899 bp, Zea Mays
cccaaacgcaagttgcccaaggaccaaagcagctgcccaaggagaaagtcctggcgcaccgccgcgcggcctccgtactagtgagcgtccgcgtccatggccaaaggcaggttcaagcacaagcccacgggggagcgcagcttctccagccccgaggatatcgcggctggtacttcagcaggccgtccaaagaccttcgccaagcatgatgagaaggatgtctacagtagaaggggggaaccagaagaagaatcagaagattttatgaaaccaaaacacaagggtatagaaggtctgatcgagattgagaatccaaacctggtgaaaacaaagaatgtaaaggccaaggacattgatattgggaagccaactgatatgtccaggcgtgaaagagaggatcttgacaaacagaaatctcatgagcgccatatgaagcttcaagagcaaggaaaaacagaacaggctaggaaagatttagcatatcgcagtgttacttgcaaaaatactgatgagttttaccctccttttgaaaatgtagagcgtcttactataatccgtcaacaaagggcagaagctacaaagaagcgagaggaggaaaaggctgccaaagaagagaggaaggctaataaagctctcaagtgacctgcacacgatagcgttttgggagatgtgtagctagtagtggtggtgacgactcatcgatgagcgatggcaagttggcaactgtcagctttgtgcgcggtgtagtagccggagcagtagcaactttgttgaaaaatacattcatgctgtggcgtttttcttattcaatcgtaggtccttatactgctacagtgtaaatcatcattgcaatataatcaaggtttttcttttcgtcgctgtcaaatttcttggaaaat

SEQ ID NO: 76827 - DNA, 1462 bp, Zea Mays
attgccactcccaagaacaaggataccaaaacaaaatagactaataagacaaaatagggcttgggggattggatcaccttgtataggttggtcttagtggtctgataggagatgtcacgccaggaactgcaccacgtcgaatagattttctaaaaagtgcaaaattaatagtattttgtagtgtctcaataactcgacctagattatgttgatatggttgctttgcaacaatatcaaggctggaaataagatcttgagcctggtgactgatctgagaagctcagcgtggatgagatatgataattttttataaatatatagtaataacgggtatgtagtttaatggagttatgtactactggcatactttctcccattacttgttggattttgatctttctttagggagtgtttgattgacttctacaccagttctaggaagagaaagcctgaccaagtcaacatcttcagtcgccgctagagctttagtccacgccgctctagtacctagctcgccgccatctcatgatacattacagtatgttctaggaccccaccccatgttcctcctccccatcaattgtgtaatcagggtgatctacatgtgcatgtttcattcgagttaccaaaaggttaggtattagtcttccaaaactcgtaaagtttgaattctcttgctgaatctgaagcacataaggagcaacaaaaagctaaaatgatttccctggataagcttcttagttatgtttaagaaatggaaactaaaacatatagattcatcaattatgttcccatagccacactattacatgccaaaatggaaaaatgggataaaatggaaagcaaagcacataccacttgttatatccttcagaggtgtcccctgtcagggaggtcaggaacctgaatagtggcacctgaatagtggtgaaaagtttaaggtgtcttgtgattaaaaatattgtatgattactatttgtgattattaactgacaggtcaaaattttcagcagatcagcaactcattatttagcgctgaaggtattgctaaaaatggaaaacacaagaaaacgacaatttttacccggcatgaatcacatgctagtcttaatgacaacttctagacaatatcgacaacatttacataaagaaacagataaaataatggctcaccatccccttgtagttgtgaacgcaaatgaagttaagaaagtggtacatgatctccttgtcatgtaagaggctttgatgacaggtgcccgttgaggaactgcacaccattgccaatggactttgacagagaaggggaaggaggcattggatagctcgaagtccagctcaagaacaaacgacaaccttttcatcaacttgaggaaccgtacctggtcgttcttgtttgaagatgctccacctgagtaacacaacgaaagggtaagaactgcattgtccctttatactgaat

SEQ ID NO: 76828 - DNA, 1140 bp, Zea Mays
cgagttcctgcaagagggacagtagcttcttcgatgtgttcgcaaaaattgagtttgttgaatggagtgctgttcactggtgggtcagagaaggaaggtgtatattttgacacgataaaaagagtatttcagtatgttttggacaagaatgatgcaggtgaaccatttcctttgtttgcccaatgtcttggctttgagcttgtaagcatgattgtcagcaaggacaataatatcttggaggcatttgacgcccaggatcaagcatcaactcttcagtttcccagctatgctttggagggttcagtttttcaaaggtttgacactgacctcatcaagaaagtcagcaccaactgtcttgtcatgcaaaatcacagatatggtatatcaccaaggcgatatcgagagaacgatgcactatcaagtttcttcaaaatcttgactacatcacctgatgaaaacggcaaggtctatgtctcaactgtacaagccaataattatccaatcacttgcacgcaatggcatcctgagaaagccatttttgagtggaggaaaccaatgatcccacacagcgaagatgcagtacaggttactcaacattttgccaatcattttatcagccaagcacgcaagtctccaaacaggcctcctgccgacaaagtgctggataacttaatttacaactacagtccgacatttaccgggaaaaaatcgaaatcgtttgaggaggtctacatcttctcctgagactggattgaacgcctgagtgtcttcaggaatctgtagttctgcactacattgctattgtagtgtaaccgtgcattagtattacccgtggtaccagaagttgtatttgtatagattcgttggactgcctgtattgcagtaacctttccaccgtatgggtggctctatagaatgcctataagcagcgcaataataatgataatgtaagactgaaaaaaaatacttgtatggagattttctgaatttaaaagtttctccaaatcaggtgaaggtcgaatgttcctggacctgattcatgaaatccatcgaatccaatttgtttggagtgacgtctttgctatggcgctatggcttggctcaagcatcttgcgtcgagaacgtcaccgtgttacctag

SEQ ID NO: 76829 - DNA, 1652 bp, Zea Mays
aacaaatgttgcttgcaaatgttcgtgacttcgtgtggtccctagtgagggctggagcgaaaccgcccgctgtctcgcgtccgtcagacagcacgcacagacgcaggcgggcgacgcacggcagtgttgccaatggactcgcgctgcccccatctgctactgctcctccctctcctcctcttggccgccctcctgcccccgccgtcgtcgggggtgccggaggtcatctggctgccgacgagcgggggagcggggcccttgtcctgcgcgccgccggaccccgccgtgtacgaccgccccgtcatcggcatcgtctcgcacccaggggacggtgcgggcggcaggatcagcaacaccaccgcgacctcctacatcggcgcctcctacgtcaagttcgtcgaggccgccggctcgcgcgtcatcccactcgtctacaacgagcccgaagaccgcctcctcgagaaattgagtttgttgaatggagtgctgttcactggtgggtcagagaaggaaggtgtatattttgacacgataaaaagagtatttcagtatgttttggacaagaatgatgcaggtgaaccatttcctttgtttgcccaatgtcttggctttgagcttgtaagcatgattgtcagcaaggacaataatatcttggaggcatttgacgcccaggatcaagcatcaactcttcagtttcccagctatgctttggagggttcagtttttcaaaggtttgacactgacctcatcaagaaagtcagcaccaactgtcttgtcatgcaaaatcacagatatggtatatcaccaaggcgatatcgagagaacgatgcactatcaagtttcttcaaaatcttgactacatcacctgatgaaaacggcaaggtctatgtctcaactgtacaagccaataattatccaatcacttgcacgcaatggcatcctgagaaagccatttttgagtggaggaaaccaatgatcccacacagcgaagatgcagtacagttggcagtacatcatgttggtttaagcatatgcaagaaaggaccttgctttgatgaaacttgcaagagtggtgaaagaaaaatggagttcatgtttacctagctcacccttccttgtcgtggaacagccaagcacgcaagtctccaaacaggcctcctgccgacaaagtgctggataacttaatttacaactacagtccgacatttaccgggaaaaaatcgaaatcgtttgaggaggtctacatcttctcctgagactggattgaacgcctgagtgtcttcaggaatctgtagttctgcactacattgctattgtagtgtaaccgtgcattagtattacccgtggtaccagaagttgtatttgtatagattcgttggactgcctgtattgcagtaacctttccaccgtatgggtggctctatagaatgcctataagcagcgcaataataatgataatgtaagactgaaaaaaaatacttgtatggagattttctgaatttaaaagtttctccaaatcaggtgaaggtcgaatgttcctggacctgattcatgaaatccatcgaatccaatttgtttggagtgacgtctttgctatggcgctatggcttggctcaagcatcttgcgtcgagaacgtcaccgtgttacctag

SEQ ID NO: 76830 - DNA, 2166 bp, Zea Mays
aacaaatgttgcttgcaaatgttcgtgacttcgtgtggtccctagtgagggctggagcgaaaccgcccgctgtctcgcgtccgtcagacagcacgcacagacgcaggcgggcgacgcacggcagtgttgccaatggactcgcgctgcccccatctgctactgctcctccctctcctcctcttggccgccctcctgcccccgccgtcgtcgggggtgccggaggtcatctggctgccgacgagcgggggagcggggcccttgtcctgcgcgccgccggaccccgccgtgtacgaccgccccgtcatcggcatcgtctcgcacccaggggacggtgcgggcggcaggatcagcaacaccaccgcgacctcctacatcggcgcctcctacgtcaagttcgtcgaggccgccggctcgcgcgtcatcccactcgtctacaacgagcccgaagaccgcctcctcgagaaattgagtttgttgaatggagtgctgttcactggtgggtcagagaaggaaggtgtatattttgacacgataaaaagagtatttcagtatgttttggacaagaatgatgcaggtgaaccatttcctttgtttgcccaatgtcttggctttgagcttgtaagcatgattgtcagcaaggtaatttaacttctcataagtttaccatattgccaatttaactactaaaatataaaatataatatgatagcttattgaatattctcaattgtgaactcgataaaactatacacaatggaagagtaatgcttagtttgaagttagaatatcatttgcttgcctgtggttaggtactggagtgaagtactgcagccttcctgtttgctttgccaaaagtgggcactaattgttctcttgccgttgtgctaggacaataatatcttggaggcatttgacgcccaggatcaagcatcaactcttcagtttcccagctatgctttggagggttcagtttttcaaaggtgtctgcttcatgctaagcaaatctttattttgctactgcttgatggggacattttagaatttagacaagttatcttgtagtgtgatatgaggcaagtaattgttgtagggtgatatgaggcaagcaacataggatggttccagtggaatattatctttttattctgtgttaccaaaactgaaactttagaatatatggtttaagctgacacatttatgcattcataaatgactactacggcataatattatctacaatgggtccctagaaggcaggggactacaagaccacatgcactccagcagagtgcggttaatttaaagaatgactgggaataaatttcttatgggaagatgtggtttgacactgacctcatcaagaaagtcagcaccaactgtcttgtcatgcaaaatcacagatatggtatatcaccaaggcgatatcgagagaacgatgcactatcaagtttcttcaaaatcttgactacatcacctgatgaaaacggcaaggtctatgtctcaactgtacaagccaataattatccaatcacttgcacgcaatggcatcctgagaaagccatttttgagtggaggaaaccaatgatcccacacagcgaagatgcagtacaggttactcaacattttgccaatcattttatcagccaagcacgcaagtctccaaacaggcctcctgccgacaaagtgctggataacttaatttacaactacagtccgacatttaccgggaaaaaatcgaaatcgtttgaggaggtctacatcttctcctgagactggattgaacgcctgagtgtcttcaggaatctgtagttctgcactacattgctattgtagtgtaaccgtgcattagtattacccgtggtaccagaagttgtatttgtatagattcgttggactgcctgtattgcagtaacctttccaccgtatgggtggctctatagaatgcctataagcagcgcaataataatgataatgtaagactgaaaaaaaatacttgtatggagattttctgaatttaaaagtttctccaaatcaggtgaaggtcgaatgttcctggacctgattcatgaaatccatcgaatccaatttgtttggagtgacgtctttgctatggcgctatggcttggctcaagcatcttgcgtcgagaacgtcaccgtgttacctag

SEQ ID NO: 76831 - DNA, 1992 bp, Zea Mays
atcttatttaaattaaaccgtagcatgcatagtcacgtacctagtttataatttaagtgagtaactaggatagagaacaaatgttgcttgcaaatgttcgtgacttcgtgtggtccctagtgagggctggagcgaaaccgcccgctgtctcgcgtccgtcagacagcacgcacagacgcaggcgggcgacgcacggcagtgttgccaatggactcgcgctgcccccatctgctactgctcctccctctcctcctcttggccgccctcctgcccccgccgtcgtcgggggtgccggaggtcatctggctgccgacgagcgggggagcggggcccttgtcctgcgcgccgccggaccccgccgtgtacgaccgccccgtcatcggcatcgtctcgcacccaggggacggtgcgggcggcaggatcagcaacaccaccgcgacctcctacatcggcgcctcctacgtcaagttcgtcgaggccgccggctcgcgcgtcatcccactcgtctacaacgagcccgaagaccgcctcctcgagaaattgagtttgttgaatggagtgctgttcactggtgggtcagagaaggaaggtgtatattttgacacgataaaaagagtatttcagtatgttttggacaagaatgatgcaggtgaaccatttcctttgtttgcccaatgtcttggctttgagcttgtaagcatgattgtcagcaaggacaataatatcttggaggcatttgacgcccaggatcaagcatcaactcttcagtttcccagctatgctttggagggttcagtttttcaaaggtgtctgcttcatgctaagcaaatctttattttgctactgcttgatggggacattttagaatttagacaagttatcttgtagtgtgatatgaggcaagtaattgttgtagggtgatatgaggcaagcaacataggatggttccagtggaatattatctttttattctgtgttaccaaaactgaaactttagaatatatggtttaagctgacacatttatgcattcataaatgactactacggcataatattatctacaatgggtccctagaaggcaggggactacaagaccacatgcactccagcagagtgcggttaatttaaagaatgactgggaataaatttcttatgggaagatgtggtttgacactgacctcatcaagaaagtcagcaccaactgtcttgtcatgcaaaatcacagatatggtatatcaccaaggcgatatcgagagaacgatgcactatcaagtttcttcaaaatcttgactacatcacctgatgaaaacggcaaggtctatgtctcaactgtacaagccaataattatccaatcacttgcacgcaatggcatcctgagaaagccatttttgagtggaggaaaccaatgatcccacacagcgaagatgcagtacaggttactcaacattttgccaatcattttatcagccaagcacgcaagtctccaaacaggcctcctgccgacaaagtgctggataacttaatttacaactacagtccgacatttaccgggaaaaaatcgaaatcgtttgaggaggtctacatcttctcctgagactggattgaacgcctgagtgtcttcaggaatctgtagttctgcactacattgctattgtagtgtaaccgtgcattagtattacccgtggtaccagaagttgtatttgtatagattcgttggactgcctgtattgcagtaacctttccaccgtatgggtggctctatagaatgcctataagcagcgcaataataatgataatgtaagactgaaaaaaaatacttgtatggagattttctgaatttaaaagtttctccaaatcaggtgaaggtcgaatgttcctggacctgattcatgaaatccatcgaatccaatttgtttggagtgacgtctttgctatggcgctatggcttggctcaagcatcttgcgtcgagaacgtcaccgtgttacctag

SEQ ID NO: 76832 - DNA, 1381 bp, Zea Mays
tccgtccagtctccgcttataaaaaaacgcccacccccaccccctccctctccaacaacttgggcgcgcgcgcggccgggtagcaaaagctcgcgatctgtgcgcccaccaccgggaggagcgaagatgcggatgagctgcaatggctgccgcgtcctgcgcaagggctgcggcgacgcctgcaccatccgcccctgcctgcagtggatcgaggcccccgaggcgcaggccaacgccaccgtcttcctcgcaaagttctacggccgggcgggcctgctcaacctgctcgccgccgcgcccgacgacggcgtccgccccgcggtcttccgctccctgctctacgaggcgtgcggccgcatcgtcaacccggtctacggctccgtcggcctgctctggtcgcgccagtggcacaggtgcgccgacgccgtcgaggccgtgctcaggggggaccccgtcgtgcaggtcgacgccgggtccgacgccgccgctgccccgccgctgctcgccggcgccaggccgccgccgccggccgccttcgacatccgccacgtccccagggatcccgacgccaccgccgccgacctcctccgcgccggccgcaagaggttcaagcgcgcgggttcgtcttccaacgcctccaaggcgaagcccctgcccctcgagctcgagggcaaggccggcaacaacgaacgcgcgtcgcccagccctcccccgacgcaacaacgagaggcggaggagctgcagccggtgccgatggtcgtcgagccagaacacggcgaggagtccgccggcagccacgaccaccacctgcagctgcaggggtggtcggaggaggacaccgacgtggaggcggcctcacacgtgagccaagccgaggctgagccgccagccagcagccagagccaggtgctggtagcggatcaggaggaagaggaggttgggctcgagctcacgcttgggttcgagcctgtcgtcaggcagcagccgaggtcgtcgcgctgcgacaagagcggcttgagcgcggcatcgagcctcatcggcctgcggctgcagctgccggccgcctaagcacagggaacatacttggcgacctggcatcccaagacccatcttggctaggggtgcgacctggcatcccaagacccatcttggctaggggtccgggacatgcccgagagtgttcgagccccagccgtgatgacttagggtgtgtttggtttgacttttggcctaaaagccaaaaatcaaactaaagggctggatccagaatgtagctttttctaaaagctgactttctcgcagtgtaaaactgaaagcacctctggacctgtttttagtagctttcggatgaaactgtgaaaacatatatcgaaaaactttt

SEQ ID NO: 76833 - DNA, 923 bp, Zea Mays
acatacccccctccccccgtcccccgcgtcactctctcactctcacagctcactcactctctctctcgaacgctccgcgactcctcggctcctccgctcctggcgactcaccggcgatttggaaagcgacgcctccatcctctccctcaccgcctctccgccgcctcatctggtcctctccctctccggcgcctctgctgccgtgaggggccgatctggtgctccagctttgtgcctctgtgattgtgatctggtgttctatgcctctgtgcttgtgatctgtgcttgatggccgacgacgacaccgtgcctgtgcctgcacaaactggcggtagtgaggctgcagttccttcaacggagcccatcaatatagatcctgactctactgtggaacaggctggggggacagacacacctacaagttctcgggattatcgaggagcgtcgactgacctcggagatggtcgagatgctgacctgcatcaaggactgggaggaagggaatgcaaggacccaacatactgttgagaacaaagaacttgaagactcattctctgatctatatcttgatgatgaacaagttccagttgacactccagggtcctctcaatctcaatctcagacacctactgatccacaaccacatgtccaagagtgatcttatttagctagtttgcatacttcagcttgtgcctgtaaggctgtaactaaactgtacactgtaactctgtgatatgtaagaaaactaaaagagctgtgggctgtactcttttttcctatctagggttttctcacaagggtgggtttttaactagataggtttttaatgagacagccattgcactaaacagctcagtattaggtattttagtatgtttaactgtgtgttaatttgtgaatcagtgaatggatgtgtttctgtg

SEQ ID NO: 76834 - DNA, 2149 bp, Zea Mays
ctcacaatcacagccttgcaaatgcgacgtgtttcgttattcctactgtgatttatctgtgatccctaggtttaaatggtataagtccatagatcttctgtacagcatgtgggttctcaacaagtggaaatacagctcaacgccagtgtatggcgtttacttggaagaacatgcactgagtatgcagcacaaattttcagactagactagaagagggaaatgtcgaacctgatatgctcttgcaaggaaaacaaaacgtactaaaatgcacctcattgttcacaccactacagctggttgcactaaagctgccagtggtttacatgcttttattactccagcaaaccccagcaatgttaataactaagttgctaaagcatatatgcaacctgaaacaccacagagatcatgatttggcaaagaagcacaattcagctatctgggtgacgtatgacatgacaatggtatctcaaatgctagaagttgaataagacagccttcctcaactccagtataaatagttcatgctcagactgcagcttcctcagtcccatagggaggaagttgagagttctaataagagcaacggccaataccattagcgagttatttttctgcaatatatgtcagcaaccgatcatttggttatggctcgtgtcatacaggatgtattggatccctttacaccaaccattccactaagaataacgtacaacaataggctacttctgccaagtgctgagctaaagccatccgcggttgtaagtaaaccacgagtcgatatcggtggcagtgacatgagggctttctacaccctggtactgattgacccggatgccccaagtccaagccatccatcactaagggagtacttgcactggtaaaaaaagcgcaatatgttccacttcctagatttggttctttttcgctttgccttattatgatattggtccactattgtgtaggatggtgacagatattccagaaacaactagtgtcaactttggtaagaatgcatatagttatctgtcattccattgtgtttctgctgaatatagtatctgtggagcttaggttgtagtctcttcttgcttctcagacctattggctaccattgaactgatgcagataaggatgcaattaatacatgaaatcagcaaccataggctgaatgctagaccaacttgttaggtgaatgcaatatggcagcttaccgcttacatgcatagtaatatcatgaaatccactaacttagtaccataactaaagaagcaatctggtagaactcactttcaatccagcccattactagagactggattatcgatattaaacacaaacaagtatttaacagtgtaataaactggtatacgtatgattcacagtgcccctgtttgttctttaattggttggtaaccttgaggtgtcaatttcagcagaactaaggttcatttacagttgccatactaaagttactcaagtacactttttagtttacatagttttttcatactcgattttacctgagactttgaaaccgatattggaaacaaagcagccattaattttgtcaaacaagaggagctatatttaaaggcttctctttgtctaaattgaaagaattaaaaacaataaatgacgacgcttccacatacttcagtgctccttgaactattcagtatataatgtcaggatgctctcgcaggccaagagctaatattttatgagaggccggacccaagatctggcatccacaggctggtatttgtgctgttccgtcaacttggcagggggacagtttttgcaccagaaatgcgccacaacttcaactgcagaagctttgcacggcaatatcacctcagcattgccaccgctacatatttcaactgtcaaagggaaggtggatccggcggaagaaggtttagggaagagtagaaaccataggccactgcatggtcacactatagaaatatcatcaataatgtgcactatattgaatcaatgcaccacctctatatgctgaatgttatgtatctcaaactatgattgtactgacttgaaaggttgagagcttagtctcttagcagaatatagcacaatattactagtatgttccatgattaatcagacaaagtattctccttggaga

SEQ ID NO: 76835 - DNA, 1422 bp, Zea Mays
gtcggatccttgcttcccttgcaattcagcagcgagagcaggagcatttctcccccagcgcgcaggagctccctggctgcccctcacctccagccaccaccgctccttccatggcgcgcaagccccaagctccccacgcgcgttcctttcttccaggcgcgtgagctccctccggcgtcggtcaacaggcaggattgagcaccgagctcatccatggcgcctcccatggcgcgggccctcctctggtccagtgcgcgcgaggagtcccccatggccgacctcccttcttccctctcggcctcctctgccctaggtccggcacccctccccacagcagcaaatcgccggtgccctcccgcagcagcgtgccacgaccctttctgctcgtgcgcaggattgctggcagggtcctgccatggccggacctgcctcctctagctcggcgccctccctgctaccttccagggcgcgccaaggcccctcccatgggcgccaccagcaggagctcctactcccgtggtgcctctgctctcccatctaggcaccccttcccctagcggatccatggttctaggcggatctcctcctcatccgacgctccagcctggcgtcttcccccttctctggccatttcgcacagcagcatccagcatcagcgctccccttcagccatggtcgccgagccccagcgcacccccttggccgtcggcctctgcgcctccctccactcggcacccctcgacgcagcacaccaatcagagacacgacgcccttctctacgttctgcgcccagccatggaggttgtcggtctgcagctcccctctgctcggacgccgagctccctacgccgggtcccctctccagcggcccccatcctccagcagccgccatggccgagctcagtggcgcggcgcccctgctatctcctccccaacgccgatgcctttcctgctcatcaatggagatcttgtcggcggctgactgcctcgcttcgcggtgcccctcctcaccatcgggtactcgccgagccgaccccgctagccaccctctccagctcgccattacccctgtagcagcgcgatggtttcctctgctgccagaggcctcgcccaagtccggccttggtcgctcccatcaccgaccgagctcctcttctgtagcaggccatccgccttgtctccatggtcatgtgcagcgagctctattttttttcccagtgctctcgcctgctcgacggaatgctgcagcgcgaagcggccatggatcctccctgtgtcgcgccctcggcgtgcttgacgtaatgccgcagcaagctgcagcagcgacgcccttcgctgcgacgcgctcgccaggtcggtccactcgccgtcgatctgcgcagcccctgcacgtcgtcgtcgaaacccgcggaccgagagatg

SEQ ID NO: 76836 - DNA, 944 bp, Zea Mays
aaagaatcaatctgctcccaggcagcacctctctaaacctctcgctaccttccccgtccctactggcggcagcctagggctttccctaagcttctccatcccaagatcaagatgcctccgggaaagaaggggtcacgatgcatactaaatccccagaacaaacttaatcatgagaaagtacaatttccacagtgcacgggatttcagtcatacattgcaaaatcttatgtagtgcgacaagaaaaatataaagatacccaaccaagtgcaataaatcttttcaaggagatgtattgcggcaagaagaaatgatttagtaaaattgttcagaaagctattgatgatatggaagcaatggtggcagcatcagttgaagttagacaacttgtgatgtcttctacccaagttgtttctcatgtcttgcccagctcaagtaaattccttcacaatgttggccttcagcctgcctccaagacaagctctatttcagcaaaggtgcacgagcttcaatctcaattggagaccaagagacaagaaaaagatggacttaggcaagaaatggaatccttaaaggctacatcacaagaatttatgaccactattgctaatcaaacaattgagatcgagaatttaaagaagtcgctagcagaaaataatagccttcttcgtcagatactaagcaccaatcgaggcatgtctcctccttaagattgttgctatagtcgaccatgccaatgttacatccaacaacactggactacttttttattagttgtctatttagtctgatcatattgatactatagtagctgtgtgcagcttgtggcggttgaacatgtcctacttttgcatttaagttatagaaaagttgtgtgtgttcatgttgtttgatgaaattgtatgcacggtttggattgaattcaattatatactgattttattaa

SEQ ID NO: 76837 - DNA, 785 bp, Zea Mays
cccacgcccaccaccgtctaataaaaagaatcaatctgctcccaggcagcacctctctaaacctctcgctaccttccccgtccctactggcggcagcctagggctttccctaagcttctccatcccaagatcaagatgcctccgggaaagaaggggtcacgatgcatactaaatccccaggatgatatggaagcaatggtggcagcatcagttgaagttagacaacttgtgatgtcttctacccaagttgtttctcatgtcttgcccagctcaagtaaattccttcacaatgttggccttcagcctgcctccaagacaagctctatttcagcaaaggtgcacgagcttcaatctcaattggagaccaagagacaagaaaaagatggacttaggcaagaaatggaatccttaaaggctacatcacaagaatttatgaccactattgctaatcaaacaattgagatcgagaatttaaagaagtcgctagcagaaaataatagccttcttcgtcagatactaagcaccaatcgaggcatgtctcctccttaagattgttgctatagtcgaccatgccaatgttacatccaacaacactggactacttttttattagttgtctatttagtctgatcatattgatactatagtagctgtgtgcagcttgtggcggttgaacatgtcctacttttgcatttaagttatagaaaagttgtgtgtgttcatgttgtttgatgaaattgtatgcacggtttggattgaattcaattatatactgattttattaa

SEQ ID NO: 76838 - DNA, 1669 bp, Zea Mays
gtccatttcaaaggtcaatgtattaccttgtcaggcagctttaagatttctaaaattgacaaaaatggttggaagatcaaacatcgagaaatcactttctacaagtggaacaattgcatatgagggcattgatctattgacatgtgcccatatttctatttatttgtcttcaagttctagatatctctcttattctgatttctataggcacattttgctacagatttctgttttcaaattgttcctgtgccatgttccattagcactaatattttagtttaattaaaaaggatctggcttagcatgagtgaaaagatatttaagttagttaaacataatctaactttggacccatttggttggaggtagtcacatttagtccctaaattgccaaacggtgggactaaactgttttagtctttagtccctcaagggatgactaaaagagactaaaccatataaattccacttttcccctcctttatttcagttgcactaatggcgggagaatgctaaggggtattttagtcctattatgattcatttaatgtgttttaaatagttttagtctctagaactaaacaggatagggactaaagtttagtcttttagtctcctaactaaactttagttcctagactaaaggaaccaaacgaggccttagcatgagtgaaaagacatgtgagtcatttttatgacttctacatttgcaacatgtggtatgtagcatgtctaaaatagcaatacgcaactttcatgaattatgcaatttttaagcagcatgacatgtgaggactgatttttctgttataatgcaagggggcaccatgataggtggtggcgggcgcgtgggtggacacgaaggcaactgggtttgccctgacgtcaggttcgtttccattatcgtgttcatggattttctattggactagattaaagattcgttgaatcatattattctgtactggcatgtgaattatgtcatgtagactcgactcaagtaaaactgtttcaagatgttctttgcagtgtttgggtgattgaatcattatgcttttaggcatgtggcacacatgctgttactattctagattgaccactatcattcacattcctttttttcctgcatcttttacatcatgggcttcgatgccgccgtgtatgggtggggcaggggttcgggggttttctcgacctatgtgagaaggtcttcttcttaatacaatgcccggggatgtcttaccccccacaggtcgagtttttttacatcatgtagttacacaagaacaacttgatcatgctaaagaagcaaccaaatctgcagttttgatgaacttggaatcaagggtacaatgttcttgctcctgatcaaatcctaattgtttaacatgtttccctaaagtgttctttacagtacatacttttcctcttttgtaatctatagcatttaaagataaagacaagtttaaaataggagacatgactaggtttattattattcaaacaatgttcactctccactattatgttgaattgttaaatgtatttacatgtcgttggagcgtcacaatgttcagttgtactacatatttgggtgtagctaactttcggtgttgttatgtacataatattgtgtgcctgaacttttaaattaccatttgtattttat

SEQ ID NO: 76839 - DNA, 1695 bp, Zea Mays
cgggttctttcttctgctgcttctccttccttgaggcatgcgttgtgctgtcagtattcttgcttttctagattccatttgtttcttcttccttttctcgtttgggctccggcagctgcttcacctctacaaggctacaagctctgcaacaagagcgaccacgtccgggtcaactacaggtgtgcctcaccttctccttccgccgctttgtcgttgaggccgcctacaaggcctggcatcatcgtgatggccgctcgacgctcccttgtccacgctcgcgatgtccccgacgtgatgccccctccccccgcgcgcgtacacctctggtgcgcatagcagtacgttgcctgcaatgttgtcctcgagtccgtccatgctgcatccatcagcgtctgctcctgctaggagtacattgctgggccaagatccccaagttcacctacttcatcgacccgccgtgaccttcatcaggtagctactcatcaccttgccccaccagtcgcatcgaacagggaaatcaaacggatctattccttagagttttgtttcctatgtagcgtgccatattagcatttttgtcgttgcgctcttgtttattcggatttcgtagttcgagagatgaacaatgcaatttaagcgtcatcagaaacatgttctggttccccccaatatgcaagtaatatgtacgccaggtgtgttcagattctctttgcaactaacccatcgaccgagctctttttttctacttatgttgttgaagtagtgttttcttggcagatgttcgcctttgggacattgctatgagagtcggaaggacgtggagggccgctcttagtcatcaagagggggcaccatgataggtggtggcgggcgcgtgggtggacacgaaggcaactgggtttgccctgacgtcaggttcgtttccattatcgtgttcatggattttctattggactagattaaagattcgttgaatcatattattctgtactggcatgtgaattatgtcatgtagactcgactcaagtaaaactgtttcaagatgttctttgcagtgtttgggtgattgaatcattatgcttttaggcatgtggcacacatgctgttactattctagattgaccactatcattcacattcctttttttcctgcatcttttacatcatgggcttcgatgccgccgtgtatgggtggggcaggggttcgggggttttctcgacctatgtgagaaggtcttcttcttaatacaatgcccggggatgtcttaccccccacaggtcgagtttttttacatcatgtagttacacaagaacaacttgatcatgctaaagaagcaaccaaatctgcagttttgatgaacttggaatcaagggtacaatgttcttgctcctgatcaaatcctaattgtttaacatgtttccctaaagtgttctttacagtacatacttttcctcttttgtaatctatagcatttaaagataaagacaagtttaaaataggagacatgactaggtttattattattcaaacaatgttcactctccactattatgttgaattgttaaatgtatttacatgtcgttggagcgtcacaatgttcagttgtactacatatttgggtgtagctaactttcggtgttgttatgtacataatattgtgtgcctgaacttttaaattaccatttgtattttat

SEQ ID NO: 76840 - DNA, 1415 bp, Zea Mays
ccggccccgacggtgggctcacgctcacttgcttcgccatggtcgtctgagatgagatccctagcgtagcgggttctttcttctgctgcttctccttccttgaggcatgcgttgtgctgtcagtattcttgcttttctagattccatttgtttcttcttccttttctcgtttgggctccggcagctgcttcacctctacaaggctacaagctctgcaacaagagcgaccacgtccgggtcaactacaggtgtgcctcaccttctccttccgccgctttgtcgttgaggccgcctacaaggcctggcatcatcgtgatggccgctcgacgctcccttgtccacgctcgcgatgtccccgacgtgatgccccctccccccgcgcgcgtacacctctggtgcgcatagcagtacgttgcctgcaatgttgtcctcgagtccgtccatgctgcatccatcagcgtctgctcctgctaggagtacattgctgggccaagatccccaagttcacctacttcatcgacccgccgtgaccttcatcagagtcggaaggacgtggagggccgctcttagtcatcaagaggtggtggcgggcgcgtgggtggacacgaaggcaactgggtttgccctgacgtcaggttcgtttccattatcgtgttcatggattttctattggactagattaaagattcgttgaatcatattattctgtactggcatgtgaattatgtcatgtagactcgactcaagtaaaactgtttcaagatgttctttgcagtgtttgggtgattgaatcattatgcttttaggcatgtggcacacatgctgttactattctagattgaccactatcattcacattcctttttttcctgcatcttttacatcatgggcttcgatgccgccgtgtatgggtggggcaggggttcgggggttttctcgacctatgtgagaaggtcttcttcttaatacaatgcccggggatgtcttaccccccacaggtcgagtttttttacatcatgtagttacacaagaacaacttgatcatgctaaagaagcaaccaaatctgcagttttgatgaacttggaatcaagggtacaatgttcttgctcctgatcaaatcctaattgtttaacatgtttccctaaagtgttctttacagtacatacttttcctcttttgtaatctatagcatttaaagataaagacaagtttaaaataggagacatgactaggtttattattattcaaacaatgttcactctccactattatgttgaattgttaaatgtatttacatgtcgttggagcgtcacaatgttcagttgtactacatatttgggtgtagctaactttcggtgttgttatgtacataatattgtgtgcctgaacttttaaattaccatttgtattttat

SEQ ID NO: 76841 - DNA, 929 bp, Zea Mays
catcgtcgagctactccgccgcgccgcgcaggagtacagagtcggaaggacgtggagggccgctcttagtcatcaagagggggcaccatgataggtggtggcgggcgcgtgggtggacacgaaggcaactgggtttgccctgacgtcaggttcgtttccattatcgtgttcatggattttctattggactagattaaagattcgttgaatcatattattctgtactggcatgtgaattatgtcatgtagactcgactcaagtaaaactgtttcaagatgttctttgcagtgtttgggtgattgaatcattatgcttttaggcatgtggcacacatgctgttactattctagattgaccactatcattcacattcctttttttcctgcatcttttacatcatgggcttcgatgccgccgtgtatgggtggggcaggggttcgggggttttctcgacctatgtgagaaggtcttcttcttaatacaatgcccggggatgtcttaccccccacaggtcgagtttttttacatcatgtagttacacaagaacaacttgatcatgctaaagaagcaaccaaatctgcagttttgatgaacttggaatcaagggtacaatgttcttgctcctgatcaaatcctaattgtttaacatgtttccctaaagtgttctttacagtacatacttttcctcttttgtaatctatagcatttaaagataaagacaagtttaaaataggagacatgactaggtttattattattcaaacaatgttcactctccactattatgttgaattgttaaatgtatttacatgtcgttggagcgtcacaatgttcagttgtactacatatttgggtgtagctaactttcggtgttgttatgtacataatattgtgtgcctgaacttttaaattaccatttgtattttat

SEQ ID NO: 76842 - DNA, 853 bp, Zea Mays
cccagcaggagggaaagggcgactcgccgactccgaagcccaaaccctcaacctacagcagcgcgccagcgccgctccgcccgcccatgggctcctcatcccactctctcgccgtctcacggcgcggccgcagcgcgcggcagtcccccttctttcgagacctcgccaccccgatcccgtcccatcgtggcgtgtcccgctttgcctcgggggcttccccctcctccacgccaccacccccgccgcccatcttcaccctcgatgaccgctatgcctccgcagacttctccccggaccccaccgcctccgaccttctccccgtcgcgtcgtctccctccccccgcaccgctgccagccgctcgccgccatgggacctgtcccggggcaaggtggcgctctcggcaccaggatcccccatggctggggtcgtcgagccgacccggaaagagatgctcgctttgccggcccctgcgagccctggcaccccacctcctgccgcgacagcggaggcgcagtcaccggtgtcccccgcgcaggcacctaggacggagccggtggcgaacgcaggggaggtcgaacgggaggagtgggtcactgtatttggattctctattggtgataccaaccttattcttcgggaattcgagaaatgtggagtaatattgagacatcactctggtccaagagatggaaattggatccacatattgtaccagcctattgatgcagtgcactggcagcagctggacgagagtttcgctccaagcaacccaggtggatttatggtttcctttgccttcgaagtcacttggcttgaagagcacaggcgcatctaaccagtttaggaggcttt

SEQ ID NO: 76843 - DNA, 1806 bp, Zea Mays
cccgccctctactgcaggtcagcacccagcaggagggaaagggcgactcgccgactccgaagcccaaaccctcaacctacagcagcgcgccagcgccgctccgcccgcccatgggctcctcatcccactctctcgccgtctcacggcgcggccgcagcgcgcggcagtcccccttctttcgagacctcgccaccccgatcccgtcccatcgtggcgtgtcccgctttgcctcgggggcttccccctcctccacgccaccacccccgccgcccatcttcaccctcgatgaccgctatgcctccgcagacttctccccggaccccaccgcctccgaccttctccccgtcgcgtcgtctccctccccccgcaccgctgccagccgctcgccgccatgggacctgtcccggggcaaggtggcgctctcggcaccaggatcccccatggctggggtcgtcgagccgacccggaaagagatgctcgctttgccggcccctgcgagccctggcaccccacctcctgccgcgacagcggaggcgcagtcaccggtgtcccccgcgcaggcacctaggacggagccggtggcgaacgcaggggaggtcgaacgggaggagtgggtcactgtatttggattctctattggtgataccaaccttattcttcgggaattcgagaaatgtggagtaatattgagacatcactctggtccaagagatggaaattggatccacatattgtaccaggtaattatacatttatctactgttgtgcttccgtatttctgttgtactatttactttaattttctctaactatgtttcacaaagtagtcatattagcttaggctgctctgtagctaaccagcgagattagttgccagtgaactgaaacaactacataaactcatttgggctcccccattaggttgagtaatattcttgtactgttttaatatagtgtcaatttttagttgcacagtaccgacaccaagttctatcctcatgtgtaaatgctgcagtatatggtttcattatcccttgaacatgaagcatatcggtaacttagtcctgtataggttttcagcgtaacatgatcaaggtaccatcacacacagggaacttatttttacttatgaagtctctaaattcataaaataaattcataaattggtggaatgttatgtgtctattgacgatgggtttacaaatatcctcgaaagatactggaaaataaatagaaatgtgatgtgctctctgaattcccttggcacatccaagttattatgcttatacaaatagcaactcttcagacttcttgttgtcaccaggtattcaagtagttcttttgttggcagtgtcagtttcctgtacgcatttttcagattaaaaacctgtatggtcactatcaactctacctttctaggtgtattgttcctactgttgtttatggatctcttaattctgagatgttattatctctatttatttgacaattttatcacttctgatgtttacatgcaccatagttaatgtttctacattgctatgtgatagtcttgaaactgacaactttcaccatcgtgtatgtggtcccaaagcgttcttatgatgctcgaaaggcccttcagaaaaatgttatccaactaagcagcagtctgatagttggagtaaagcctattgatgcagtgcactggcagcagctggacgagagtttcgctccaagcaacccaggtggatttatggtttcctttgccttcgaagtcacttggcttgaagagcacaggcgcatctaaccagtttaggaggcttt

SEQ ID NO: 76844 - DNA, 3583 bp, Zea Mays
gtattgagattaaatggatggaaagtgcagcaatcggggtttacttagacaatgggagcaacttggacaagctaagattgttttgacatgcaagaatcaacaggaaatgttagtccttgctctcataatatctaagtttccattgcttggtgccttgatgggcaatgtgtaaatttgcattttactttataagcacgttttccccccgtggtctattatcaggaacaggctaaaggaaactgcagaacatagaggtattcctacatttattgtagctgatgcaggccgcacacaggtgctggctggatccaaaacagttcttgcaataggaccagggaggaaagctgacatcgattcagttactgggaaactgcgtttgctgtgatcttcagctgcctctcggagatggtcaacctctgttctactgatttcttcatatggttgttttactgtcttgccaacgccaacatatctggttattaactggacattacaagattcatgatagtcactaatttgagagcccttatttcaaaatcatagtaggaaaaaatacttgattatgcaaatcagcaaatcccatcttaagcaatcagtgtatgttttgcaaccacttaagagcttgttcggttattcccaatacacatggattggatgggattggaaaaaattgagaagaagtttgacttgtttgggattcaaacccatccaatcccactcaatccacatggattgagagctaaccgaacaagccctaatgtggataattactgctaaaataggttgcgttttctctctctacagagtactgtcttcccagttgaagagccctgcgccccgtttagcatcagaaacagttgcctgtcgttgtagccgtttgaaggttaacctgatgtttattcgtgaagttgtaagttttaggtggcccatttgagatgccatggcatacaagagatttcttgttgagacaatcctcattatgccataaaaaattatatcatcccttgtgtgtcactagctctatatatcatacaaccaaaaatatcttgcgttccaactatttatagtaaatttctatatgaaaatccatgagctactataatcttattttattgaaaaccaaacattcaaaaaaaatagaatgaagctactctattctttctcacttcaatcaaacacacccttagttatctatccaagagctactataatcttattttattgaaaaccaaacattcaaaaaaaaaaaagaatgaagctactctattctttctcacttcaatcaaacacacccttagttatcttgaccaggacggactcgaccggctagccgtagcgaggcaccttacctgcaatgctaagaacatagagtccactatacagtacgaattcctatgcctctttctgccacggtaaaatagaggaatttgtcaaaataggtcgttctaaactgccgctctgcaaaatacgcccgcgctagctcagatcgtaaaaatgggtcgctcaagcgctgccactcgccaggagaggtcacgacagcttctggtgtacctggcaggtgggcccagttgctccctgcccattttgcccttacggccgttcacaacgccgtcttctccctccattaaccgaagcatatcgagctctcagtgtccgctctctgctgctctctggctctggaacgccgctctcctcgcgctctcagtgtccgccgccatcgatctgcacggcctggccggcgacggcgacgactacccccactcctcctctgcagggggtcgtgcaagccattggaatagaactgcgaagacgtctgccactcctcccctttgcaggttaccgtcctagtgaatgagcataaatgtgcttcaagcagccggattagttatgggaatgccaatcaagcatgggtagcacagaaggccttgcctttactaagaaatgagccttcacttggtgctaagactttgcaaaagaggttacaagacacatacaactgtagggtcagttatgatgtgacatggaaagaaatgcaagaagctctaaaagagatgcatggcaattaggatgatagtttcagtatgttgtacaggtggaaggaagaagttttgataaaagcccctcatagtgtggtggagatagacacccaagttgtagatgaaaatgtctacttccatagatttttctgtgcacttgagccttgtatagaagggtttcgtgctgcttgtaggccttaccttagtgtggattcaactgcactcaatggtagatggaatggtcacctagcagctgcaacagcgttagatggacacaattggatgtacccggttgcgtttgggtcatggagtctgagagcaaggataattgggtttggtttatgacacagcttcgaagggccatagggaatatggagaaactagctatttgtactgatgccggcaaaggtttgatgactgctgtggaactacttttcccacaagctgataagagagaatgtttcagacatttgatgcaaaatttcatcaaaagattccatgacaatagttacagaggaatgtatcctgctgcaagagcatatagacaagctgaatttgatagacatattgggcccattttgcattctgaccctgaagtgattacctggctaaatagagatcacaagttcaagtggatgaggagtacttttgatccagatatcaaatgcgactacatcaacaacaatttagcagagtgtttcaacaactgggtcaaagaccacaaagacctaccagtagttcaactagcagacaagattagagagcttattctggtcttatgggagaaaaggaggagaattggtggcaaactatgtggaactatcttgccagctatagtacatcaattgaatataaggtctagaggacttggtcatttaaaagttttaaatgctggaaatggtcatgctgaggtttttgataatagccccaaacaagaaagacatattgttgatctaggagcgcaagagtgctcatgtctggagtggcagcacactgggaaaccttgtgaccatgccatagttgtcatcactagttttagaagtgaaaagatcgaaaactatgttcatgatttttattcagtacaaaagtttagataagcatactgtagagtcatctatcctataagggatcgttcacagtggcctaaagttgatatggtccctgttgtaaaaggacctttagcaaaacgaggtgttggtaggcaaagaaaattacgaatgaaaggttgtctggaaggtgggagtaaacctaagacaaccaataaagaaggtgtcaggcaaatgaaaagaggccctatacgatgcaaaaaatgtggagagcttggtcatagacaaacaagttataagtgcccactaaatggtacccaaaaaaggaataggaaactatgtaagatttgaaatatgttgtgtgaactatgtgttatttgagaccatgtgaagtgtaagaccatgtgaaatatgttgtgtcaactatgcttgtaggccttatttgagaccaacaatttgttcatttgttatctgttttttgatctgctgagctgttcattt

SEQ ID NO: 76845 - DNA, 2228 bp, Zea Mays
agcaacacgttatcgacaagcacgtctccttccttccccacccactgctccacctccatcctccatggctcctccgccgcggcgaaacccgccgcaccagaaccccacccggaggaaggttttagtggtgcgtcaggacctcaagatgggggctggtaaaatagcttcccaatgtgcccatgcagcgactggcttgtacgcagaattgttgtcaagcaatcggggtttacttagacaatgggagcaacttggacaagctaagattgttttgacatgcaagaatcaacaggaaatgaacaggctaaaggaaactgcagaacatagaggtattcctacatttattgtagctgatgcaggccgcacacaggtgctggctggatccaaaacagttcttgcaataggaccagggaggaaagctgacatcgattcagttactgggaaactgcgtttgctgtgatcttcagctgcctctcggagatggttaccgtcctagtgaatgagcataaatgtgcttcaagcagccggattagttatgggaatgccaatcaagcatgggtagcacagaaggccttgcctttactaagaaatgagccttcacttggtgctaagactttgcaaaagaggttacaagacacatacaactgtagggtcagttatgatgtgacatggaaagaaatgcaagaagctctaaaagagatgcatggcaattaggatgatagtttcagtatgttgtacaggtggaaggaagaagttttgataaaagcccctcatagtgtggtggagatagacacccaagttgtagatgaaaatgtctacttccatagatttttctgtgcacttgagccttgtatagaagggtttcgtgctgcttgtaggccttaccttagtgtggattcaactgcactcaatggtagatggaatggtcacctagcagctgcaacagcgttagatggacacaattggatgtacccggttgcgtttgggtcatggagtctgagagcaaggataattgggtttggtttatgacacagcttcgaagggccatagggaatatggagaaactagctatttgtactgatgccggcaaaggtttgatgactgctgtggaactacttttcccacaagctgataagagagaatgtttcagacatttgatgcaaaatttcatcaaaagattccatgacaatagttacagaggaatgtatcctgctgcaagagcatatagacaagctgaatttgatagacatattgggcccattttgcattctgaccctgaagtgattacctggctaaatagagatcacaagttcaagtggatgaggagtacttttgatccagatatcaaatgcgactacatcaacaacaatttagcagagtgtttcaacaactgggtcaaagaccacaaagacctaccagtagttcaactagcagacaagattagagagcttattctggtcttatgggagaaaaggaggagaattggtggcaaactatgtggaactatcttgccagctatagtacatcaattgaatataaggtctagaggacttggtcatttaaaagttttaaatgctggaaatggtcatgctgaggtttttgataatagccccaaacaagaaagacatattgttgatctaggagcgcaagagtgctcatgtctggagtggcagcacactgggaaaccttgtgaccatgccatagttgtcatcactagttttagaagtgaaaagatcgaaaactatgttcatgatttttattcagtacaaaagtttagataagcatactgtagagtcatctatcctataagggatcgttcacagtggcctaaagttgatatggtccctgttgtaaaaggacctttagcaaaacgaggtgttggtaggcaaagaaaattacgaatgaaaggttgtctggaaggtgggagtaaacctaagacaaccaataaagaaggtgtcaggcaaatgaaaagaggccctatacgatgcaaaaaatgtggagagcttggtcatagacaaacaagttataagtgcccactaaatggtacccaaaaaaggaataggaaactatgtaagatttgaaatatgttgtgtgaactatgtgttatttgagaccatgtgaagtgtaagaccatgtgaaatatgttgtgtcaactatgcttgtaggccttatttgagaccaacaatttgttcatttgttatctgttttttgatctgctgagctgttcattt

SEQ ID NO: 76846 - DNA, 3649 bp, Zea Mays
agcaacacgttatcgacaagcacgtctccttccttccccacccactgctccacctccatcctccatggctcctccgccgcggcgaaacccgccgcaccagaaccccacccggaggaaggttttagtggtgcgtcaggacctcaagatgggggctggtaaaatagcttcccaatgtgcccatgcagcgactggcttgtacgcagaattgttgtcaagcaatcggggtttacttagacaatgggagcaacttggacaagctaagattgttttgacatgcaagaatcaacaggaaatgctaaaggaaactgcagaacatagaggtattcctacatttattgtagctgatgcaggccgcacacaggtgctggctggatccaaaacagttcttgcaataggaccagggaggaaagctgacatcgattcagttactgggaaactgcgtttgctgtgatcttcagctgcctctcggagatggtcaacctctgttctactgatttcttcatatggttgttttactgtcttgccaacgccaacatatctggttattaactggacattacaagattcatgatagtcactaatttgagagcccttatttcaaaatcatagtaggaaaaaatacttgattatgcaaatcagcaaatcccatcttaagcaatcagtgtatgttttgcaaccacttaagagcttgttcggttattcccaatacacatggattggatgggattggaaaaaattgagaagaagtttgacttgtttgggattcaaacccatccaatcccactcaatccacatggattgagagctaaccgaacaagccctaatgtggataattactgctaaaataggttgcgttttctctctctacagagtactgtcttcccagttgaagagccctgcgccccgtttagcatcagaaacagttgcctgtcgttgtagccgtttgaaggttaacctgatgtttattcgtgaagttgtaagttttaggtggcccatttgagatgccatggcatacaagagatttcttgttgagacaatcctcattatgccataaaaaattatatcatcccttgtgtgtcactagctctatatatcatacaaccaaaaatatcttgcgttccaactatttatagtaaatttctatatgaaaatccatgagctactataatcttattttattgaaaaccaaacattcaaaaaaaatagaatgaagctactctattctttctcacttcaatcaaacacacccttagttatctatccaagagctactataatcttattttattgaaaaccaaacattcaaaaaaaaaaaagaatgaagctactctattctttctcacttcaatcaaacacacccttagttatcttgaccaggacggactcgaccggctagccgtagcgaggcaccttacctgcaatgctaagaacatagagtccactatacagtacgaattcctatgcctctttctgccacggtaaaatagaggaatttgtcaaaataggtcgttctaaactgccgctctgcaaaatacgcccgcgctagctcagatcgtaaaaatgggtcgctcaagcgctgccactcgccaggagaggtcacgacagcttctggtgtacctggcaggtgggcccagttgctccctgcccattttgcccttacggccgttcacaacgccgtcttctccctccattaaccgaagcatatcgagctctcagtgtccgctctctgctgctctctggctctggaacgccgctctcctcgcgctctcagtgtccgccgccatcgatctgcacggcctggccggcgacggcgacgactacccccactcctcctctgcagggggtcgtgcaagccattggaatagaactgcgaagacgtctgccactcctcccctttgcaggttaccgtcctagtgaatgagcataaatgtgcttcaagcagccggattagttatgggaatgccaatcaagcatgggtagcacagaaggccttgcctttactaagaaatgagccttcacttggtgctaagactttgcaaaagaggttacaagacacatacaactgtagggtcagttatgatgtgacatggaaagaaatgcaagaagctctaaaagagatgcatggcaattaggatgatagtttcagtatgttgtacaggtggaaggaagaagttttgataaaagcccctcatagtgtggtggagatagacacccaagttgtagatgaaaatgtctacttccatagatttttctgtgcacttgagccttgtatagaagggtttcgtgctgcttgtaggccttaccttagtgtggattcaactgcactcaatggtagatggaatggtcacctagcagctgcaacagcgttagatggacacaattggatgtacccggttgcgtttgggtcatggagtctgagagcaaggataattgggtttggtttatgacacagcttcgaagggccatagggaatatggagaaactagctatttgtactgatgccggcaaaggtttgatgactgctgtggaactacttttcccacaagctgataagagagaatgtttcagacatttgatgcaaaatttcatcaaaagattccatgacaatagttacagaggaatgtatcctgctgcaagagcatatagacaagctgaatttgatagacatattgggcccattttgcattctgaccctgaagtgattacctggctaaatagagatcacaagttcaagtggatgaggagtacttttgatccagatatcaaatgcgactacatcaacaacaatttagcagagtgtttcaacaactgggtcaaagaccacaaagacctaccagtagttcaactagcagacaagattagagagcttattctggtcttatgggagaaaaggaggagaattggtggcaaactatgtggaactatcttgccagctatagtacatcaattgaatataaggtctagaggacttggtcatttaaaagttttaaatgctggaaatggtcatgctgaggtttttgataatagccccaaacaagaaagacatattgttgatctaggagcgcaagagtgctcatgtctggagtggcagcacactgggaaaccttgtgaccatgccatagttgtcatcactagttttagaagtgaaaagatcgaaaactatgttcatgatttttattcagtacaaaagtttagataagcatactgtagagtcatctatcctataagggatcgttcacagtggcctaaagttgatatggtccctgttgtaaaaggacctttagcaaaacgaggtgttggtaggcaaagaaaattacgaatgaaaggttgtctggaaggtgggagtaaacctaagacaaccaataaagaaggtgtcaggcaaatgaaaagaggccctatacgatgcaaaaaatgtggagagcttggtcatagacaaacaagttataagtgcccactaaatggtacccaaaaaaggaataggaaactatgtaagatttgaaatatgttgtgtgaactatgtgttatttgagaccatgtgaagtgtaagaccatgtgaaatatgttgtgtcaactatgcttgtaggccttatttgagaccaacaatttgttcatttgttatctgttttttgatctgctgagctgttcattt

SEQ ID NO: 76847 - DNA, 4643 bp, Zea Mays
agcaacacgttatcgacaagcacgtctccttccttccccacccactgctccacctccatcctccatggctcctccgccgcggcgaaacccgccgcaccagaaccccacccggaggaagggcgaggagccgtggctcgccgcgagcctccgcccggcgaacttcctcccgggcctcgccatcgggttcctcctaggcctcctcctcgacttgtcctcgtcgtggaggcccaagtccagccccgcgccggctccggccgccgcacccgcgcgggcctccagctccaagcgggcgtcggggacctcgtttgcctcgggcggcgaggagcttaagatggttttagtggtgcgtcaggacctcaagatgggggctggtaaaatagcttcccaatgtgcccatgcagcgactggcttgtacgcagaattgttgtcaaggtgttaatgcgcaatcggggtttacttagacaatgggagcaacttggacaagctaagattgttttgacatgcaagaatcaacaggaaatgaacaggctaaaggaaactgcagaacatagaggtattcctacatttattgtagctgatgcaggccgcacacaggtgctggctggatccaaaacagttcttgcaataggaccagggaggaaagctgacatcgattcagttactgggaaactgcgtttgctgtgatcttcagctgcctctcggagatggtcaacctctgttctactgatttcttcatatggttgttttactgtcttgccaacgccaacatatctggttattaactggacattacaagattcatgatagtcactaatttgagagcccttatttcaaaatcatagtaggaaaaaatacttgattatgcaaatcagcaaatcccatcttaagcaatcagtgtatgttttgcaaccacttaagagcttgttcggttattcccaatacacatggattggatgggattggaaaaaattgagaagaagtttgacttgtttgggattcaaacccatccaatcccactcaatccacatggattgagagctaaccgaacaagccctaatgtggataattactgctaaaataggttgcgttttctctctctacagagtactgtcttcccagttgaagagccctgcgccccgtttagcatcagaaacagttgcctgtcgttgtagccgtttgaaggttaacctgatgtttattcgtgaagttgtaagttttaggtggcccatttgagatgccatggcatacaagagatttcttgttgagacaatcctcattatgccataaaaaattatatcatcccttgtgtgtcactagctctatatatcatacaaccaaaaatatcttgcgttccaactatttatagtaaatttctatatgaaaatccatgagctactataatcttattttattgaaaaccaaacattcaaaaaaaatagaatgaagctactctattctttctcacttcaatcaaacacacccttagttatctatccaagagctactataatcttattttattgaaaaccaaacattcaaaaaaaaaaaagaatgaagctactctattctttctcacttcaatcaaacacacccttagttatcttgaccaggacggactcgaccggctagccgtagcgaggcaccttacctgcaatgctaagaacatagagtccactatacagtacgaattcctatgcctctttctgccacggtaaaatagaggaatttgtcaaaataggtcgttctaaactgccgctctgcaaaatacgcccgcgctagctcagatcgtaaaaatgggtcgctcaagcgctgccactcgccaggagaggtcacgacagcttctggtgtacctggcaggtgggcccagttgctccctgcccattttgcccttacggccgttcacaacgccgtcttctccctccattaaccgaagcatatcgagctctcagtgtccgctctctgctgctctctggctctggaacgccgctctcctcgcgctctcagtgtccgccgccatcgatctgcacggcctggccggcgacggcgacgactacccccactcctcctctgcaggtgatctccccccttccctcttcccctgttcgctgacatatccgctaccctctgtaacgtttacgtacccagttggttcatccagggggtcgtgcaagccattggaatagaactgcgaagacgtctgccactcctcccctttgcaggtaacttttgcccaccccacccctctgtcgcggcgtcgcggtgctcaatccgggcggctcccaagttctatcgccgctgcggcagcgccatatattcaaaatatgtttgaccattatgtgtaataatttgtgctaacactagatataggtggtgacaatttcgtgctcgcatcatggatggtaatgatgatggcaccatgtctattgactggaatagctttattattgagaatgctgaaaataaggataattgggagacgggtgatatgtttagaatctgtgatgaggatgagatgtatgtgttcttgggacttggagatgaggatgaggagataaatcgaacccacccggaaccaagcaactttgcatctcattttacatcggaaagtaatagttttgatccaagcgatgtagatgctgcatgccagttgatgatgaaaatccagaaatggtcaatatattgcacgatgttgaccaccctgatctgaagttgggtactctttatccatcgatgaaagagtttaggctagctgtgaggcaatatgctataaatgaggagtttgagcttggcataacaaagtcggatagaaatagatatagagtgtactgcaaagggaatgattgcacatgcccttggaaactgaatggttctacaaggccagattctagtgttatggttaccgtcctagtgaatgagcataaatgtgcttcaagcagccggattagttatgggaatgccaatcaagcatgggtagcacagaaggccttgcctttactaagaaatgagccttcacttggtgctaagactttgcaaaagaggttacaagacacatacaactgtagggtcagttatgatgtgacatggaaagaaatgcaagaagctctaaaagagatgcatggcaattaggatgatagtttcagtatgttgtacaggtggaaggaagaagttttgataaaagcccctcatagtgtggtggagatagacacccaagttgtagatgaaaatgtctacttccatagatttttctgtgcacttgagccttgtatagaagggtttcgtgctgcttgtaggccttaccttagtgtggattcaactgcactcaatggtagatggaatggtcacctagcagctgcaacagcgttagatggacacaattggatgtacccggttgcgtttgggtcatggagtctgagagcaaggataattgggtttggtttatgacacagcttcgaagggccatagggaatatggagaaactagctatttgtactgatgccggcaaaggtttgatgactgctgtggaactacttttcccacaagctgataagagagaatgtttcagacatttgatgcaaaatttcatcaaaagattccatgacaatagttacagaggaatgtatcctgctgcaagagcatatagacaagctgaatttgatagacatattgggcccattttgcattctgaccctgaagtgattacctggctaaatagagatcacaagttcaagtggatgaggagtacttttgatccagatatcaaatgcgactacatcaacaacaatttagcagagtgtttcaacaactgggtcaaagaccacaaagacctaccagtagttcaactagcagacaagattagagagcttattctggtcttatgggagaaaaggaggagaattggtggcaaactatgtggaactatcttgccagctatagtacatcaattgaatataaggtctagaggacttggtcatttaaaagttttaaatgctggaaatggtcatgctgaggtttttgataatagccccaaacaagaaagacatattgttgatctaggagcgcaagagtgctcatgtctggagtggcagcacactgggaaaccttgtgaccatgccatagttgtcatcactagttttagaagtgaaaagatcgaaaactatgttcatgatttttattcagtacaaaagtttagataagcatactgtagagtcatctatcctataagggatcgttcacagtggcctaaagttgatatggtccctgttgtaaaaggacctttagcaaaacgaggtgttggtaggcaaagaaaattacgaatgaaaggttgtctggaaggtgggagtaaacctaagacaaccaataaagaaggtgtcaggcaaatgaaaagaggccctatacgatgcaaaaaatgtggagagcttggtcatagacaaacaagttataagtgcccactaaatggtacccaaaaaaggaataggaaactatgtaagatttgaaatatgttgtgtgaactatgtgttatttgagaccatgtgaagtgtaagaccatgtgaaatatgttgtgtcaactatgcttgtaggccttatttgagaccaacaatttgttcatttgttatctgttttttgatctgctgagctgttcattt

SEQ ID NO: 76848 - DNA, 2509 bp, Zea Mays
agcaacacgttatcgacaagcacgtctccttccttccccacccactgctccacctccatcctccatggctcctccgccgcggcgaaacccgccgcaccagaaccccacccggaggaagggcgaggagccgtggctcgccgcgagcctccgcccggcgaacttcctcccgggcctcgccatcgggttcctcctaggcctcctcctcgacttgtcctcgtcgtggaggcccaagtccagccccgcgccggctccggccgccgcacccgcgcgggcctccagctccaagcgggcgtcggggacctcgtttgcctcgggcggcgaggagcttaagatggttttagtggtgcgtcaggacctcaagatgggggctggtaaaatagcttcccaatgtgcccatgcagcgactggcttgtacgcagaattgttgtcaaggtgttaatgcggtttgcactgtttcttcattagcaatcggggtttacttagacaatgggagcaacttggacaagctaagattgttttgacatgcaagaatcaacaggaaatgaacaggctaaaggaaactgcagaacatagaggtattcctacatttattgtagctgatgcaggccgcacacaggtgctggctggatccaaaacagttcttgcaataggaccagggaggaaagctgacatcgattcagttactgggaaactgcgtttgctgtgatcttcagctgcctctcggagatggtcaacctctgttctactgatttcttcatatggttaccgtcctagtgaatgagcataaatgtgcttcaagcagccggattagttatgggaatgccaatcaagcatgggtagcacagaaggccttgcctttactaagaaatgagccttcacttggtgctaagactttgcaaaagaggttacaagacacatacaactgtagggtcagttatgatgtgacatggaaagaaatgcaagaagctctaaaagagatgcatggcaattaggatgatagtttcagtatgttgtacaggtggaaggaagaagttttgataaaagcccctcatagtgtggtggagatagacacccaagttgtagatgaaaatgtctacttccatagatttttctgtgcacttgagccttgtatagaagggtttcgtgctgcttgtaggccttaccttagtgtggattcaactgcactcaatggtagatggaatggtcacctagcagctgcaacagcgttagatggacacaattggatgtacccggttgcgtttgggtcatggagtctgagagcaaggataattgggtttggtttatgacacagcttcgaagggccatagggaatatggagaaactagctatttgtactgatgccggcaaaggtttgatgactgctgtggaactacttttcccacaagctgataagagagaatgtttcagacatttgatgcaaaatttcatcaaaagattccatgacaatagttacagaggaatgtatcctgctgcaagagcatatagacaagctgaatttgatagacatattgggcccattttgcattctgaccctgaagtgattacctggctaaatagagatcacaagttcaagtggatgaggagtacttttgatccagatatcaaatgcgactacatcaacaacaatttagcagagtgtttcaacaactgggtcaaagaccacaaagacctaccagtagttcaactagcagacaagattagagagcttattctggtcttatgggagaaaaggaggagaattggtggcaaactatgtggaactatcttgccagctatagtacatcaattgaatataaggtctagaggacttggtcatttaaaagttttaaatgctggaaatggtcatgctgaggtttttgataatagccccaaacaagaaagacatattgttgatctaggagcgcaagagtgctcatgtctggagtggcagcacactgggaaaccttgtgaccatgccatagttgtcatcactagttttagaagtgaaaagatcgaaaactatgttcatgatttttattcagtacaaaagtttagataagcatactgtagagtcatctatcctataagggatcgttcacagtggcctaaagttgatatggtccctgttgtaaaaggacctttagcaaaacgaggtgttggtaggcaaagaaaattacgaatgaaaggttgtctggaaggtgggagtaaacctaagacaaccaataaagaaggtgtcaggcaaatgaaaagaggccctatacgatgcaaaaaatgtggagagcttggtcatagacaaacaagttataagtgcccactaaatggtacccaaaaaaggaataggaaactatgtaagatttgaaatatgttgtgtgaactatgtgttatttgagaccatgtgaagtgtaagaccatgtgaaatatgttgtgtcaactatgcttgtaggccttatttgagaccaacaatttgttcatttgttatctgttttttgatctgctgagctgttcattt

SEQ ID NO: 76849 - DNA, 4182 bp, Zea Mays
tcgaccttcacttgtttttttattccgaatcatattgtacttgtaccagcgacttttgtaggggaaaatgtagacatgaatggaccgtataagatgaatgtgctgttaattccggcctttatactgatgcccagcccagcccatgcggcccaagtgcacaagcagcacatcccatccattcgacgcaacagaactaacactggcagacatccggcccacgcagcaacacgttatcgacaagcacgtctccttccttccccacccactgctccacctccatcctccatggctcctccgccgcggcgaaacccgccgcaccagaaccccacccggaggaaggttttagtggtgcgtcaggacctcaagatgggggctggtaaaatagcttcccaatgtgcccatgcagcgactggcttgtacgcagaattgttgtcaaggtgttaatgcggtttgcactgtttcttcattaggtagttttagttgaaggatggctgatgtatattttctctttatagagatactgtaccctatgtaggctcaatttgcgtagatacagagatgctggtactcattgattgattttgaataaatgctgttatactaatcaaaataatatcgagtgtatttctgcatgggtactgggacctgtctttattggattgaaggctcacaaaccattttatcttgtctgagtagctgctgagttttaaccactgaagagtgcactatttgtgttgtccgtacggccttaagtccttaactatcttatcaccaatctgtggagtcctcggactcccagagctatggccttaactattccatcacccatctccagagctaaggccttaacactatcgcaccatccatatgtgatcttaaatacagtattgactccttttttttttcattatgttgtagtccttcatacaaaaaggtaacttttcaaacaactagtgagtggtggatgtagactgtattgagattaaatggatggaaagtgcaggtttcagtaatcttatttttccacccttattttttttcctgtgaagcttgtgtcaatgagctatttagctaccttgtgttatcagtagtttgtgaaaaccgaggcaccccagactcatttggcatatcttctgcagcaatcggggtttacttagacaatgggagcaacttggacaagctaagattgttttgacatgcaagaatcaacaggaaatgaacaggctaaaggaaactgcagaacatagaggtattcctacatttattgtagctgatgcaggccgcacacaggtgctggctggatccaaaacagttcttgcaataggaccagggaggaaagctgacatcgattcagttactgggaaactgcgtttgctgtgatcttcagctgcctctcggagatgagtactgtcttcccagttgaagagccctgcgccccgtttagcatcagaaacagttgcctgtcgttgtagccgtttgaaggttaacctgatgtttattcgtgaagttgtaagttttaggtggcccatttgagatgccatggcatacaagagatttcttgttgagacaatcctcattatgccataaaaaattatatcatcccttgtgtgtcactagctctatatatcatacaaccaaaaatatcttgcgttccaactatttatagtaaatttctatatgaaaatccatgagctactataatcttattttattgaaaaccaaacattcaaaaaaaatagaatgaagctactctattctttctcacttcaatcaaacacacccttagttatctatccaagagctactataatcttattttattgaaaaccaaacattcaaaaaaaaaaaagaatgaagctactctattctttctcacttcaatcaaacacacccttagttatcttgaccaggacggactcgaccggctagccgtagcgaggcaccttacctgcaatgctaagaacatagagtccactatacagtacgaattcctatgcctctttctgccacggtaaaatagaggaatttgtcaaaataggtcgttctaaactgccgctctgcaaaatacgcccgcgctagctcagatcgtaaaaatgggtcgctcaagcgctgccactcgccaggagaggtcacgacagcttctggtgtacctggcaggtgggcccagttgctccctgcccattttgcccttacggccgttcacaacgccgtcttctccctccattaaccgaagcatatcgagctctcagtgtccgctctctgctgctctctggctctggaacgccgctctcctcgcgctctcagtgtccgccgccatcgatctgcacggcctggccggcgacggcgacgactacccccactcctcctctgcagggggtcgtgcaagccattggaatagaactgcgaagacgtctgccactcctcccctttgcaggttaccgtcctagtgaatgagcataaatgtgcttcaagcagccggattagttatgggaatgccaatcaagcatgggtagcacagaaggccttgcctttactaagaaatgagccttcacttggtgctaagactttgcaaaagaggttacaagacacatacaactgtagggtcagttatgatgtgacatggaaagaaatgcaagaagctctaaaagagatgcatggcaattaggatgatagtttcagtatgttgtacaggtggaaggaagaagttttgataaaagcccctcatagtgtggtggagatagacacccaagttgtagatgaaaatgtctacttccatagatttttctgtgcacttgagccttgtatagaagggtttcgtgctgcttgtaggccttaccttagtgtggattcaactgcactcaatggtagatggaatggtcacctagcagctgcaacagcgttagatggacacaattggatgtacccggttgcgtttgggtcatggagtctgagagcaaggataattgggtttggtttatgacacagcttcgaagggccatagggaatatggagaaactagctatttgtactgatgccggcaaaggtttgatgactgctgtggaactacttttcccacaagctgataagagagaatgtttcagacatttgatgcaaaatttcatcaaaagattccatgacaatagttacagaggaatgtatcctgctgcaagagcatatagacaagctgaatttgatagacatattgggcccattttgcattctgaccctgaagtgattacctggctaaatagagatcacaagttcaagtggatgaggagtacttttgatccagatatcaaatgcgactacatcaacaacaatttagcagagtgtttcaacaactgggtcaaagaccacaaagacctaccagtagttcaactagcagacaagattagagagcttattctggtcttatgggagaaaaggaggagaattggtggcaaactatgtggaactatcttgccagctatagtacatcaattgaatataaggtctagaggacttggtcatttaaaagttttaaatgctggaaatggtcatgctgaggtttttgataatagccccaaacaagaaagacatattgttgatctaggagcgcaagagtgctcatgtctggagtggcagcacactgggaaaccttgtgaccatgccatagttgtcatcactagttttagaagtgaaaagatcgaaaactatgttcatgatttttattcagtacaaaagtttagataagcatactgtagagtcatctatcctataagggatcgttcacagtggcctaaagttgatatggtccctgttgtaaaaggacctttagcaaaacgaggtgttggtaggcaaagaaaattacgaatgaaaggttgtctggaaggtgggagtaaacctaagacaaccaataaagaaggtgtcaggcaaatgaaaagaggccctatacgatgcaaaaaatgtggagagcttggtcatagacaaacaagttataagtgcccactaaatggtacccaaaaaaggaataggaaactatgtaagatttgaaatatgttgtgtgaactatgtgttatttgagaccatgtgaagtgtaagaccatgtgaaatatgttgtgtcaactatgcttgtaggccttatttgagaccaacaatttgttcatttgttatctgttttttgatctgctgagctgttcattt

SEQ ID NO: 76850 - DNA, 2491 bp, Zea Mays
cttaagtaatcgaccttcacttgtttttttattccgaatcatattgtacttgtaccagcgacttttgtaggggaaaatgtagacatgaatggaccgtataagatgaatgtgctgttaattccggcctttatactgatgcccagcccagcccatgcggcccaagtgcacaagcagcacatcccatccattcgacgcaacagaactaacactggcagacatccggcccacgcagcaacacgttatcgacaagcacgtctccttccttccccacccactgctccacctccatcctccatggctcctccgccgcggcgaaacccgccgcaccagaaccccacccggaggaaggttttagtggtgcgtcaggacctcaagatgggggctggtaaaatagcttcccaatgtgcccatgcagcgactggcttgtacgcagaattgttgtcaaggtgttaatgcggtttgcactgtttcttcattagcaatcggggtttacttagacaatgggagcaacttggacaagctaagattgttttgacatgcaagaatcaacaggaaatgaacaggctaaaggaaactgcagaacatagaggtattcctacatttattgtagctgatgcaggccgcacacaggtgctggctggatccaaaacagttcttgcaataggaccagggaggaaagctgacatcgattcagttactgggaaactgcgtttgctgtgatcttcagctgcctctcggagatggttaccgtcctagtgaatgagcataaatgtgcttcaagcagccggattagttatgggaatgccaatcaagcatgggtagcacagaaggccttgcctttactaagaaatgagccttcacttggtgctaagactttgcaaaagaggttacaagacacatacaactgtagggtcagttatgatgtgacatggaaagaaatgcaagaagctctaaaagagatgcatggcaattaggatgatagtttcagtatgttgtacaggtggaaggaagaagttttgataaaagcccctcatagtgtggtggagatagacacccaagttgtagatgaaaatgtctacttccatagatttttctgtgcacttgagccttgtatagaagggtttcgtgctgcttgtaggccttaccttagtgtggattcaactgcactcaatggtagatggaatggtcacctagcagctgcaacagcgttagatggacacaattggatgtacccggttgcgtttgggtcatggagtctgagagcaaggataattgggtttggtttatgacacagcttcgaagggccatagggaatatggagaaactagctatttgtactgatgccggcaaaggtttgatgactgctgtggaactacttttcccacaagctgataagagagaatgtttcagacatttgatgcaaaatttcatcaaaagattccatgacaatagttacagaggaatgtatcctgctgcaagagcatatagacaagctgaatttgatagacatattgggcccattttgcattctgaccctgaagtgattacctggctaaatagagatcacaagttcaagtggatgaggagtacttttgatccagatatcaaatgcgactacatcaacaacaatttagcagagtgtttcaacaactgggtcaaagaccacaaagacctaccagtagttcaactagcagacaagattagagagcttattctggtcttatgggagaaaaggaggagaattggtggcaaactatgtggaactatcttgccagctatagtacatcaattgaatataaggtctagaggacttggtcatttaaaagttttaaatgctggaaatggtcatgctgaggtttttgataatagccccaaacaagaaagacatattgttgatctaggagcgcaagagtgctcatgtctggagtggcagcacactgggaaaccttgtgaccatgccatagttgtcatcactagttttagaagtgaaaagatcgaaaactatgttcatgatttttattcagtacaaaagtttagataagcatactgtagagtcatctatcctataagggatcgttcacagtggcctaaagttgatatggtccctgttgtaaaaggacctttagcaaaacgaggtgttggtaggcaaagaaaattacgaatgaaaggttgtctggaaggtgggagtaaacctaagacaaccaataaagaaggtgtcaggcaaatgaaaagaggccctatacgatgcaaaaaatgtggagagcttggtcatagacaaacaagttataagtgcccactaaatggtacccaaaaaaggaataggaaactatgtaagatttgaaatatgttgtgtgaactatgtgttatttgagaccatgtgaagtgtaagaccatgtgaaatatgttgtgtcaactatgcttgtaggccttatttgagaccaacaatttgttcatttgttatctgttttttgatctgctgagctgttcattt

SEQ ID NO: 76851 - DNA, 4810 bp, Zea Mays
cttaagtaatcgaccttcacttgtttttttattccgaatcatattgtacttgtaccagcgacttttgtaggggaaaatgtagacatgaatggaccgtataagatgaatgtgctgttaattccggcctttatactgatgcccagcccagcccatgcggcccaagtgcacaagcagcacatcccatccattcgacgcaacagaactaacactggcagacatccggcccacgcagcaacacgttatcgacaagcacgtctccttccttccccacccactgctccacctccatcctccatggctcctccgccgcggcgaaacccgccgcaccagaaccccacccggaggaagggcgaggagccgtggctcgccgcgagcctccgcccggcgaacttcctcccgggcctcgccatcgggttcctcctaggcctcctcctcgacttgtcctcgtcgtggaggcccaagtccagccccgcgccggctccggccgccgcacccgcgcgggcctccagctccaagcgggcgtcggggacctcgtttgcctcgggcggcgaggagcttaagatggttttagtggtgcgtcaggacctcaagatgggggctggtaaaatagcttcccaatgtgcccatgcagcgactggcttgtacgcagaattgttgtcaaggtgttaatgcggtttgcactgtttcttcattagcaatcggggtttacttagacaatgggagcaacttggacaagctaagattgttttgacatgcaagaatcaacaggaaatgaacaggctaaaggaaactgcagaacatagaggtattcctacatttattgtagctgatgcaggccgcacacaggtgctggctggatccaaaacagttcttgcaataggaccagggaggaaagctgacatcgattcagttactgggaaactgcgtttgctgtgatcttcagctgcctctcggagatggtcaacctctgttctactgatttcttcatatggttgttttactgtcttgccaacgccaacatatctggttattaactggacattacaagattcatgatagtcactaatttgagagcccttatttcaaaatcatagtaggaaaaaatacttgattatgcaaatcagcaaatcccatcttaagcaatcagtgtatgttttgcaaccacttaagagcttgttcggttattcccaatacacatggattggatgggattggaaaaaattgagaagaagtttgacttgtttgggattcaaacccatccaatcccactcaatccacatggattgagagctaaccgaacaagccctaatgtggataattactgctaaaataggttgcgttttctctctctacagagtactgtcttcccagttgaagagccctgcgccccgtttagcatcagaaacagttgcctgtcgttgtagccgtttgaaggttaacctgatgtttattcgtgaagttgtaagttttaggtggcccatttgagatgccatggcatacaagagatttcttgttgagacaatcctcattatgccataaaaaattatatcatcccttgtgtgtcactagctctatatatcatacaaccaaaaatatcttgcgttccaactatttatagtaaatttctatatgaaaatccatgagctactataatcttattttattgaaaaccaaacattcaaaaaaaatagaatgaagctactctattctttctcacttcaatcaaacacacccttagttatctatccaagagctactataatcttattttattgaaaaccaaacattcaaaaaaaaaaaagaatgaagctactctattctttctcacttcaatcaaacacacccttagttatcttgaccaggacggactcgaccggctagccgtagcgaggcaccttacctgcaatgctaagaacatagagtccactatacagtacgaattcctatgcctctttctgccacggtaaaatagaggaatttgtcaaaataggtcgttctaaactgccgctctgcaaaatacgcccgcgctagctcagatcgtaaaaatgggtcgctcaagcgctgccactcgccaggagaggtcacgacagcttctggtgtacctggcaggtgggcccagttgctccctgcccattttgcccttacggccgttcacaacgccgtcttctccctccattaaccgaagcatatcgagctctcagtgtccgctctctgctgctctctggctctggaacgccgctctcctcgcgctctcagtgtccgccgccatcgatctgcacggcctggccggcgacggcgacgactacccccactcctcctctgcagggggtcgtgcaagccattggaatagaactgcgaagacgtctgccactcctcccctttgcaggtaacttttgcccaccccacccctctgtcgcggcgtcgcggtgctcaatccgggcggctcccaagttctatcgccgctgcggcagcgccatatattcaaaatatgtttgaccattatgtgtaataatttgtgctaacactagatataggtggtgacaatttcgtgctcgcatcatggatggtaatgatgatggcaccatgtctattgactggaatagctttattattgagaatgctgaaaataaggataattgggagacgggtgatatgtttagaatctgtgatgaggatgagatgtatgtgttcttgggacttggagatgaggatgaggagataaatcgaacccacccggaaccaagcaactttgcatctcattttacatcggaaagtaatagttttgatccaagcgatgtagatgctgcatgccagttgatgatgaaaatccagaaatggtcaatatattgcacgatgttgaccaccctgatctgaagttgggtactctttatccatcgatgaaagagtttaggctagctgtgaggcaatatgctataaatgaggagtttgagcttggcataacaaagtcggatagaaatagatatagagtgtactgcaaagggaatgattgcacatgcccttggaaactgaatggttctacaaggccagattctagtgttatggttaccgtcctagtgaatgagcataaatgtgcttcaagcagccggattagttatgggaatgccaatcaagcatgggtagcacagaaggccttgcctttactaagaaatgagccttcacttggtgctaagactttgcaaaagaggttacaagacacatacaactgtagggtcagttatgatgtgacatggaaagaaatgcaagaagctctaaaagagatgcatggcaattaggatgatagtttcagtatgttgtacaggtggaaggaagaagttttgataaaagcccctcatagtgtggtggagatagacacccaagttgtagatgaaaatgtctacttccatagatttttctgtgcacttgagccttgtatagaagggtttcgtgctgcttgtaggccttaccttagtgtggattcaactgcactcaatggtagatggaatggtcacctagcagctgcaacagcgttagatggacacaattggatgtacccggttgcgtttgggtcatggagtctgagagcaaggataattgggtttggtttatgacacagcttcgaagggccatagggaatatggagaaactagctatttgtactgatgccggcaaaggtttgatgactgctgtggaactacttttcccacaagctgataagagagaatgtttcagacatttgatgcaaaatttcatcaaaagattccatgacaatagttacagaggaatgtatcctgctgcaagagcatatagacaagctgaatttgatagacatattgggcccattttgcattctgaccctgaagtgattacctggctaaatagagatcacaagttcaagtggatgaggagtacttttgatccagatatcaaatgcgactacatcaacaacaatttagcagagtgtttcaacaactgggtcaaagaccacaaagacctaccagtagttcaactagcagacaagattagagagcttattctggtcttatgggagaaaaggaggagaattggtggcaaactatgtggaactatcttgccagctatagtacatcaattgaatataaggtctagaggacttggtcatttaaaagttttaaatgctggaaatggtcatgctgaggtttttgataatagccccaaacaagaaagacatattgttgatctaggagcgcaagagtgctcatgtctggagtggcagcacactgggaaaccttgtgaccatgccatagttgtcatcactagttttagaagtgaaaagatcgaaaactatgttcatgatttttattcagtacaaaagtttagataagcatactgtagagtcatctatcctataagggatcgttcacagtggcctaaagttgatatggtccctgttgtaaaaggacctttagcaaaacgaggtgttggtaggcaaagaaaattacgaatgaaaggttgtctggaaggtgggagtaaacctaagacaaccaataaagaaggtgtcaggcaaatgaaaagaggccctatacgatgcaaaaaatgtggagagcttggtcatagacaaacaagttataagtgcccactaaatggtacccaaaaaaggaataggaaactatgtaagatttgaaatatgttgtgtgaactatgtgttatttgagaccatgtgaagtgtaagaccatgtgaaatatgttgtgtcaactatgcttgtaggccttatttgagaccaacaatttgttcatttgttatctgttttttgatctgctgagctgttcattt

SEQ ID NO: 76852 - DNA, 1172 bp, Zea Mays
agcaacacgttatcgacaagcacgtctccttccttccccacccactgctccacctccatcctccatggctcctccgccgcggcgaaacccgccgcaccagaaccccacccggaggaaggttttagtggtgcgtcaggacctcaagatgggggctggtaaaatagcttcccaatgtgcccatgcagcgactggcttgtacgcagaattgttgtcaagcaatcggggtttacttagacaatgggagcaacttggacaagctaagattgttttgacatgcaagaatcaacaggaaatgaacaggctaaaggaaactgcagaacatagaggtattcctacatttattgtagctgatgcaggccgcacacaggtgctggctggatccaaaacagttcttgcaataggaccagggaggaaagctgacatcgattcagttactgggaaactgcgtttgctgtgatcttcagctgcctctcggagatgagtactgtcttcccagttgaagagccctgcgccccgtttagcatcagaaacagttgcctgtcgttgtagccgtttgaaggttaacctgatgtttattcgtgaagttgtaagttttaggtggcccatttgagatgccatggcatacaagagatttcttgttgagacaatcctcattatgccataaaaaattatatcatcccttgtgtgtcactagctctatatatcatacaaccaaaaatatcttgcgttccaactatttatagtaaatttctatatgaaaatccatgagctactataatcttattttattgaaaaccaaacattcaaaaaaaatagaatgaagctactctattctttctcacttcaatcaaacacacccttagttatctatccaagagctactataatcttattttattgaaaaccaaacattcaaaaaaaaaaaagaatgaagctactctattctttctcacttcaatcaaacacacccttagttatcttgaccaggacggactcgaccggctagccgtagcgaggcaccttacctgcaatgctaagaacatagagtccactatacagtacgaattcctatgcctctttctgccacggtaaaatagaggaatttgtcaaaataggtcgttctaaactgccgctctgcaaaatacgcccgcgctagctcagatcgtaaaaat

SEQ ID NO: 76853 - DNA, 1421 bp, Zea Mays
agcaacacgttatcgacaagcacgtctccttccttccccacccactgctccacctccatcctccatggctcctccgccgcggcgaaacccgccgcaccagaaccccacccggaggaagggcgaggagccgtggctcgccgcgagcctccgcccggcgaacttcctcccgggcctcgccatcgggttcctcctaggcctcctcctcgacttgtcctcgtcgtggaggcccaagtccagccccgcgccggctccggccgccgcacccgcgcgggcctccagctccaagcgggcgtcggggacctcgtttgcctcgggcggcgaggagcttaagatggttttagtggtgcgtcaggacctcaagatgggggctggtaaaatagcttcccaatgtgcccatgcagcgactggcttgtacgcagaattgttgtcaaggtgttaatgcggtttgcactgtttcttcattagcaatcggggtttacttagacaatgggagcaacttggacaagctaagattgttttgacatgcaagaatcaacaggaaatgaacaggctaaaggaaactgcagaacatagaggtattcctacatttattgtagctgatgcaggccgcacacaggtgctggctggatccaaaacagttcttgcaataggaccagggaggaaagctgacatcgattcagttactgggaaactgcgtttgctgtgatcttcagctgcctctcggagatgagtactgtcttcccagttgaagagccctgcgccccgtttagcatcagaaacagttgcctgtcgttgtagccgtttgaaggttaacctgatgtttattcgtgaagttgtaagttttaggtggcccatttgagatgccatggcatacaagagatttcttgttgagacaatcctcattatgccataaaaaattatatcatcccttgtgtgtcactagctctatatatcatacaaccaaaaatatcttgcgttccaactatttatagtaaatttctatatgaaaatccatgagctactataatcttattttattgaaaaccaaacattcaaaaaaaatagaatgaagctactctattctttctcacttcaatcaaacacacccttagttatctatccaagagctactataatcttattttattgaaaaccaaacattcaaaaaaaaaaaagaatgaagctactctattctttctcacttcaatcaaacacacccttagttatcttgaccaggacggactcgaccggctagccgtagcgaggcaccttacctgcaatgctaagaacatagagtccactatacagtacgaattcctatgcctctttctgccacggtaaaatagaggaatttgtcaaaataggtcgttctaaactgccgctctgcaaaatacgcccgcgctagctcagatcgtaaaaat

SEQ ID NO: 76854 - DNA, 1507 bp, Zea Mays
agcaacacgttatcgacaagcacgtctccttccttccccacccactgctccacctccatcctccatggctcctccgccgcggcgaaacccgccgcaccagaaccccacccggaggaagatgcagcgactggcttgtacgcagaattgttgtcaagcaatcggggtttacttagacaatgggagcaacttggacaagctaagattgttttgacatgcaagaatcaacaggaaatgaacaggctaaaggaaactgcagaacatagaggtattcctacatttattgtagctgatgcaggccgcacacaggtgctggctggatccaaaacagttcttgcaataggaccagggaggaaagctgacatcgattcagttactgggaaactgcgtttgctgtgatcttcagctgcctctcggagatggtcaacctctgttctactgatttcttcatatggttgttttactgtcttgccaacgccaacatatctggttattaactggacattacaagattcatgatagtcactaatttgagagcccttatttcaaaatcatagtaggaaaaaatacttgattatgcaaatcagcaaatcccatcttaagcaatcagtgtatgttttgcaaccacttaagagcttgttcggttattcccaatacacatggattggatgggattggaaaaaattgagaagaagtttgacttgtttgggattcaaacccatccaatcccactcaatccacatggattgagagctaaccgaacaagccctaatgtggataattactgctaaaataggttgcgttttctctctctacagagtactgtcttcccagttgaagagccctgcgccccgtttagcatcagaaacagttgcctgtcgttgtagccgtttgaaggttaacctgatgtttattcgtgaagttgtaagttttaggtggcccatttgagatgccatggcatacaagagatttcttgttgagacaatcctcattatgccataaaaaattatatcatcccttgtgtgtcactagctctatatatcatacaaccaaaaatatcttgcgttccaactatttatagtaaatttctatatgaaaatccatgagctactataatcttattttattgaaaaccaaacattcaaaaaaaatagaatgaagctactctattctttctcacttcaatcaaacacacccttagttatctatccaagagctactataatcttattttattgaaaaccaaacattcaaaaaaaaaaaagaatgaagctactctattctttctcacttcaatcaaacacacccttagttatcttgaccaggacggactcgaccggctagccgtagcgaggcaccttacctgcaatgctaagaacatagagtccactatacagtacgaattcctatgcctctttctgccacggtaaaatagaggaatttgtcaaaataggtcgttctaaactgccgctctgcaaaatacgcccgcgctagctcagatcgtaaaaat

SEQ ID NO: 76855 - DNA, 1347 bp, Zea Mays
atggaccgtataagatgaatgtgctgttaattccggcctttatactgatgcccagcccagcccatgcggcccaagtgcacaagcagcacatcccatccattcgacgcaacagaactaacactggcagacatccggcccacgcagcaacacgttatcgacaagcacgtctccttccttccccacccactgctccacctccatcctccatggctcctccgccgcggcgaaacccgccgcaccagaaccccacccggaggaaggttttagtggtgcgtcaggacctcaagatgggggctggtaaaatagcttcccaatgtgcccatgcagcgactggcttgtacgcagaattgttgtcaaggtgttaatgcggtttgcactgtttcttcattagcaatcggggtttacttagacaatgggagcaacttggacaagctaagattgttttgacatgcaagaatcaacaggaaatgaacaggctaaaggaaactgcagaacatagaggtattcctacatttattgtagctgatgcaggccgcacacaggtgctggctggatccaaaacagttcttgcaataggaccagggaggaaagctgacatcgattcagttactgggaaactgcgtttgctgtgatcttcagctgcctctcggagatgagtactgtcttcccagttgaagagccctgcgccccgtttagcatcagaaacagttgcctgtcgttgtagccgtttgaaggttaacctgatgtttattcgtgaagttgtaagttttaggtggcccatttgagatgccatggcatacaagagatttcttgttgagacaatcctcattatgccataaaaaattatatcatcccttgtgtgtcactagctctatatatcatacaaccaaaaatatcttgcgttccaactatttatagtaaatttctatatgaaaatccatgagctactataatcttattttattgaaaaccaaacattcaaaaaaaatagaatgaagctactctattctttctcacttcaatcaaacacacccttagttatctatccaagagctactataatcttattttattgaaaaccaaacattcaaaaaaaaaaaagaatgaagctactctattctttctcacttcaatcaaacacacccttagttatcttgaccaggacggactcgaccggctagccgtagcgaggcaccttacctgcaatgctaagaacatagagtccactatacagtacgaattcctatgcctctttctgccacggtaaaatagaggaatttgtcaaaataggtcgttctaaactgccgctctgcaaaatacgcccgcgctagctcagatcgtaaaaat

SEQ ID NO: 76856 - DNA, 2237 bp, Zea Mays
catgaatggaccgtataagatgaatgtgctgttaattccggcctttatactgatgcccagcccagcccatgcggcccaagtgcacaagcagcacatcccatccattcgacgcaacagaactaacactggcagacatccggcccacgcagcaacacgttatcgacaagcacgtctccttccttccccacccactgctccacctccatcctccatggctcctccgccgcggcgaaacccgccgcaccagaaccccacccggaggaagggcgaggagccgtggctcgccgcgagcctccgcccggcgaacttcctcccgggcctcgccatcgggttcctcctaggcctcctcctcgacttgtcctcgtcgtggaggcccaagtccagccccgcgccggctccggccgccgcacccgcgcgggcctccagctccaagcgggcgtcggggacctcgtttgcctcgggcggcgaggagcttaagatggttttagtggtgcgtcaggacctcaagatgggggctggtaaaatagcttcccaatgtgcccatgcagcgactggcttgtacgcagaattgttgtcaaggtgttaatgcggtttgcactgtttcttcattaggtagttttagttgaaggatggctgatgtatattttctctttatagagatactgtaccctatgtaggctcaatttgcgtagatacagagatgctggtactcattgattgattttgaataaatgctgttatactaatcaaaataatatcgagtgtatttctgcatgggtactgggacctgtctttattggattgaaggctcacaaaccattttatcttgtctgagtagctgctgagttttaaccactgaagagtgcactatttgtgttgtccgtacggccttaagtccttaactatcttatcaccaatctgtggagtcctcggactcccagagctatggccttaactattccatcacccatctccagagctaaggccttaacactatcgcaccatccatatgtgatcttaaatacagtattgactccttttttttttcattatgttgtagtccttcatacaaaaaggtaacttttcaaacaactagtgagtggtggatgtagactgtattgagattaaatggatggaaagtgcaggtttcagtaatcttatttttccacccttattttttttcctgtgaagcttgtgtcaatgagctatttagctaccttgtgttatcagtagtttgtgaaaaccgaggcaccccagactcatttggcatatcttctgcagcaatcggggtttacttagacaatgggagcaacttggacaagctaagattgttttgacatgcaagaatcaacaggaaatgaacaggctaaaggaaactgcagaacatagaggtattcctacatttattgtagctgatgcaggccgcacacaggtgctggctggatccaaaacagttcttgcaataggaccagggaggaaagctgacatcgattcagttactgggaaactgcgtttgctgtgatcttcagctgcctctcggagatgagtactgtcttcccagttgaagagccctgcgccccgtttagcatcagaaacagttgcctgtcgttgtagccgtttgaaggttaacctgatgtttattcgtgaagttgtaagttttaggtggcccatttgagatgccatggcatacaagagatttcttgttgagacaatcctcattatgccataaaaaattatatcatcccttgtgtgtcactagctctatatatcatacaaccaaaaatatcttgcgttccaactatttatagtaaatttctatatgaaaatccatgagctactataatcttattttattgaaaaccaaacattcaaaaaaaatagaatgaagctactctattctttctcacttcaatcaaacacacccttagttatctatccaagagctactataatcttattttattgaaaaccaaacattcaaaaaaaaaaaagaatgaagctactctattctttctcacttcaatcaaacacacccttagttatcttgaccaggacggactcgaccggctagccgtagcgaggcaccttacctgcaatgctaagaacatagagtccactatacagtacgaattcctatgcctctttctgccacggtaaaatagaggaatttgtcaaaataggtcgttctaaactgccgctctgcaaaatacgcccgcgctagctcagatcgtaaaaat

SEQ ID NO: 76857 - DNA, 557 bp, Zea Mays
agcaacacgttatcgacaagcacgtctccttccttccccacccactgctccacctccatcctccatggctcctccgccgcggcgaaacccgccgcaccagaaccccacccggaggaagggcgaggagccgtggctcgccgcgagcctccgcccggcgaacttcctcccgggcctcgccatcgggttcctcctaggcctcctcctcgacttgtcctcgtcgtggaggcccaagtccagccccgcgccggctccggccgccgcacccgcgcgggcctccagctccaagcgggcgtcggggacctcgtttgcctcgggcggcgaggagcttaagatggatgttgagccgtgcgctgtgagacgtccagagagcagagaggaggagacagaacgagcgagaggagacagagagaacaaagcgttttgagcgtggtaagcacatgacgctgaccgaggcacggcggggccgagaacaaagaggagacagagaacgagcgactggagacagagaacgagcaacagtttagtttaggggtaaaacagtccgatcagttgatatt

SEQ ID NO: 76858 - DNA, 499 bp, Zea Mays
gaaaatgtagacatgaatggaccgtataagatgaatgtgctgttaattccggcctttatactgatgcccagcccagcccatgcggcccaagtgcacaagcagcacatcccatccattcgacgcaacagaactaacactggcagacatccggcccacgcagcaacacgttatcgacaagcacgtctccttccttccccacccactgctccacctccatcctccatggctcctccgccgcggcgaaacccgccgcaccagaaccccacccggaggaaggatgttgagccgtgcgctgtgagacgtccagagagcagagaggaggagacagaacgagcgagaggagacagagagaacaaagcgttttgagcgtggtaagcacatgacgctgaccgaggcacggcggggccgagaacaaagaggagacagagaacgagcgactggagacagagaacgagcaacagtttagtttaggggtaaaacagtccgatcagttgatatt

SEQ ID NO: 76859 - DNA, 777 bp, Zea Mays
caggcgtcgaagcacgtcgtgtcacttggagccatcgaggaagaggtactgaggtagtacgcaccgaaaatgggcccaaacgagaagggtcgatccaacagcgccggaccaacatcgaagtggctagaattggatccaatgctctggccggcctgcgacgacgaccatatccaaagttccaaaaaccccgcacgctgctacaagcacagaatgccagaccattgcgagattccgatgatcacgtgcgcctttttcaccctgctgttatcccgatgagcactagctaccacttacttttgacccgtcctaggggcatgagcatcagccacctccgccaccgcaaccgcaacctcgtgcagctgctgctaggctactgcagaaggaagggcgagctgctgatggtctactactgcatgcccaacggtagcctcgacaagcaccgcctgcacgccgaggacggcaaggcgctgctggagtgagcgcagaggtttcagatcatcaaggatgtggcctccgacctcttctacctccacatgaagtgggggcaggtggtcgtccatcaaccgatcaacgtgggcggtatggtcgcacacctaggtgactttggcctcgccaggcttttatagttggccaaatggcactaacatgacgggccgggccgggcacggcactaaaaagcacggcactggcacggcacgacacggtcctcttagtgccagtgccgggcacggcccgtacatagtgccgtgcccggcccggcccgtcatgttagtgcca

SEQ ID NO: 76860 - DNA, 806 bp, Zea Mays
cgccttgcgtgctgggcgctgccgacttgcctcggcgtcaggacatgcgtgtcctgtcctggatcgcaaaggaggtactgaggtagtacgcaccgaaaatgggcccaaacgagaagggtcgatccaacagcgccggaccaacatcgaagtggctagaattggatccaatgctctggccggcctgcgacgacgaccatatccaaagttccaaaaaccccgcacgctgctacaagcacagaatgccagaccattgcgagattccgatgatcacgtgcgcctttttcaccctgctgttatcccgatgagcactagctaccacttacttttgacccgtcctaggggcatgagcatcagccacctccgccaccgcaaccgcaacctcgtgcagctgctgctaggctactgcagaaggaagggcgagctgctgatggtctactactgcatgcccaacggtagcctcgacaagcaccgcctgcacgccgaggacggcaaggcgctgctggagtgagcgcagaggtttcagatcatcaaggatgtggcctccgacctcttctacctccacatgaagtgggggcaggtggtcgtccatcaaccgatcaacgtgggcggtatggtcgcacacctaggtgactttggcctcgccaggcttttatagttggccaaatggcactaacatgacgggccgggccgggcacggcactaaaaagcacggcactggcacggcacgacacggtcctcttagtgccagtgccgggcacggcccgtacatagtgccgtgcccggcccggcccgtcatgttagtgcca

SEQ ID NO: 76861 - DNA, 1472 bp, Zea Mays
tgagtagtagtagtatcacaggaaaatcggctccgtctctctagctgcaaatcctgtgtgcggaaaagggagaggggaagaacctcctgacgacgctcgagcaactagggccaggagattgttactctcgccaaaagtgcgtctcttccccacgggatcgaaatatcccctgttcgctttgatttgatctacagatctttgctcctagctttattcgtccgattcatcgatcggctgtcgtctctgccattggcgtgcatacgcgtacagttggggatcgagcagccagctgctggacgaggatggatcggaggatgcatgcatggatcgagcagcggggccgggtgtccaaatcgcgcgcctgtgagcggctcacgggatgcgcatcgccggcgggggcgttgtgccatgacagagctccagggcctaacctcatctcctgccgcaggacggtaagtgacttttccctgttcattcatctctttcctttctttttttcttttcttttcagaccactccatccatcgtcctccttcatctgccctactgtacgcgctgcgtgccactgcacgccgaggcgaagctttcgccgatggcgatgactggctggcctatctacgatgacaccaacacctagtagacaccaagaacaacccccggccactagtagcatataggatcgatcggagaagagactatgatgagaatcatcagatcggtgtcccaactggcatggaggtcgcatccatggatctcctgcaattaattggacgctagcgaagagcaatagggaaataaagcaggtccatgtatcggcacaaacaacatcccatcccgtccttcagaaatcacatgctggcatggcatgcagaatgagaaaaaaaaacacgtggaacatcgaacgcacgggagactagctatattgcagcagaaacgccaaccatattgcagtattgcactacacagtttcttagcatagataagactattgtcgtagaagcaactctcacattataacacttccattctctaattaaggacctgtttagaagcaagtgttattagagagtagctagctagctgcagcattgcattaggtgctagagggtggtgccagcagaacatatacgattctagggttggtctcagtctcaccaccttagtttttggtgctccattttgcacccaaacctaatcatataagtgaagcgatatgttttgtcctaataacacagattaaccgcagaaagagaaagttacgagggtgatgagatattttatttattaacacatgggattcatctgagcctagaaagtgatcgagttcacacgctggagttgtttaactcataccaacactattagttgatatgccgtatttgataatttctaaaacgtgtatacgtagctgtgctgctctaagacggctgcttttttactaaagccaaaatatcctagaaggcaaagatggg

SEQ ID NO: 76862 - DNA, 2697 bp, Zea Mays
agatcttgatgaggacaaaaggttcgtgaagttttccaattaaaacgcggatcatattcagatcttactgctgccaagatttcagagatgatgcactctaatagcttagataatgcaccgacacagtcgcttattagtgttgttaatggtattttggatgaaagcatagaaaggaaaaagggagaaataccacatcgtgtagtttacttactgcggaaagtcgttcaagagattgagcaccgtctctgtattcaagcagagcacataagaagtatggcaataaacaggcttcagatagtcaagaatgagaagtcacaaatcgaagagaaaaaagaactctgtgagaaagatgttcaacgattaatgaaagagaaagaatattccaaaagcatcataatgaacctaacaaaagatatggaagccatgaatagattgcatgagcagcaacttgagcaaattggaagaaaggcaaaggaaatggaggaacaattaaccaccagggtaaaagaagtagagtatctcttgctacaatcgaataagaaagttgaagaacttgagattgcttctaggctaaaatcacagttatgggatcagaaagagaacatttttcagagttacatggataatcaacaattagttatcaaggacataagaatattgtcacagtcatatgaaaatgatatgtatgcacttcaaatgcagtggagaaatgaaatctctaatttaggatctgggttaaaatgtttggttgatgccgctgaaaattatcataaagtcctgacagagaaccaaaagttatttaatgaagtgcaagaactaaaaggtaatataagagtatattgtcgtgttaggccatttctttccggtcaagataaaaagtccaccacaattgactacatgggggaaaatggtgagcttcttatatcaaatccatttaagcaagggaaggacggacatagaatgttcaagtttaataaagtgtttactccatttgcttcccaagctgaggttttttctgacatacaaccactgatccgatcagttctggatggattcaacgtttgtatttttgcatatggccagactggttctggcaaaacttacactatgagtgggcctaccacatcaaaacaagattggggtgtcaattatcgagctttaaatgatttgtttgatatttcactaagtaggagaaatgccttctcatatgaggtgggggtacaaatggttgagatatacaatgaacaagtccgtgatctgctatcaaatgatattgcacaaagaagacttgggatttggaacacttctcaacccaatgggcttgttgttccagatgcaagcttgcactcagttaagtcgacatctgatgtattagacttgatggagattggacaagcaaatagagcagttggttcaacagcgctaaatgaacgaagtagtcggtcacacagtattctaactgtacatgttcgagggatggatttgaagaatggatcaacctctaggggttgtttgcatcttattgatcttgctggtagtgagagggtagagaagtctgaagtaaccggcgatagattaaaagaagctcaatacattaacaaatcactctctgcgttaggtgatgttatttttgctttgtcacagaaaagtgcccatgtgccttatagaaacagcaagttaacacaagttcttcaaagttctttaggtggacaagcaaaaactctaatgtttgttcagataaatcctgatgttgagtcatattcagaaactataagtactttaaagtttgctgaaagggtgtctggagtagagttaggtgctgctagaagtaacaaggagggaaaagatataaaagagctattggaacaggttgcgtctttgaaagacacaattttgcgcaaagatatggaaatagagcagatccaggtcatcaaagacaaagtaaaatccccaaatttgttgttagatagaaatgtgcctggcttgacgaagactacagcaaaccaacctagccaactattatcaggcgaacgaatgcttaagtctagtgacagagttctatcggatcgtcagagttacggcgaggtgaatgtagatcctaaccaccatgtgatggatactgcaccagtgagcatagatgaagcaggatatgagaacaatgcatcggatgatggtttatcgggtgaaaccgagaatgataattcagctgctgagatgacagcggaacggctgcatagatttccatcaagaataagcaggttcactctcacaaagaacgggcagccatctatgtctagatcgaacccaaaggatgctaagactccaagcaatacgaaagctccatcgagccggttgacaggaggctcttcagccaggtctaaaagacggcagtagagcacgatcatgttgctcgttttgatgtgcattgtagttgaaatgtgaatttgatgggtagttgtaggaccgttttatgattgtaactttagaaaatgtcagacactgatggcagaatatttgaggcatttgtttgatcatttgcttatgccgagcaaaacagcaaacaatgctcgattgtatgtgaaacactctgacctgtgaccatttgaatgtcggtgcgcctccggaagtccggagttgtgtatataccaccaaattgccggcctaaaatttccagtttgatgcatcctggaatctcac

SEQ ID NO: 76863 - DNA, 3647 bp, Zea Mays
ggaagagcgagtcaactcatctcgaggcagttccgctgccggaagcccgcaattcaacacgcgaagctaaaaaagaaaaaaacaattcgaaacccccgacctacgcgaggacaaaacagcaaaaccaaagcgctcagccgctcgcgaggagcgaaaggcgagcgcgcagccgggcgcccgtggcggaggcgaaacccccgccgccgcatcgccctgagaccctccggttcggcccgggccgagctcgagcccgcgcaatctcgccgccggcgggcttgatctgatccaaggccaccgcgcgccggcgcgggcggcgaggaatggggagcgtggacggccgcggggtcgaggggatccacgaagctaatcggcgcgcgcagttgattggatggatgaatgccttactcccggaattcagtttgcctccggattcatcgagtgaagagctgcgagagctgctcagtgacggcgtggtcctgtgccgtcttgtgaacacactcatcccgggggttcttgagggatcctgggagggttatgcaccgtcagatcagaggttaggcaacgtgaagaaattcctctcggtggtctctgatatggggctgccaggcttcagtttgaaagatcttgatgagggattaatgtcttctgtagtggaatgtctcttggttttgaggggcagtgtggatcctagattaggtgatgatattccaccagatgttaccagaactcctttgagaaaacaatggggagttcaggaaatggacaagcctcaagttcccgctgcagcactagggaaaagatcccctgcagaggacatgagaaacggcgttgcagattccaaaacccatcagaaaacttctgtcttttctggacaaaaggttcgtgaagttttccaattaaaacgcggatcatattcagatcttactgctgccaagatttcagagatgatgcactctaatagcttagataatgcaccgacacagtcgcttattagtgttgttaatggtattttggatgaaagcatagaaaggaaaaagggagaaataccacatcgtgtagtttacttactgcggaaagtcgttcaagagattgagcaccgtctctgtattcaagcagagcacataagaagtcaaaatgttaccatcaagacaagagaacaaaagtactgttcaaaaattaaagcacttgaaatgttggtaaatggcacaaatgaagaaaaccagatggcaataaacaggcttcagatagtcaagaatgagaagtcacaaatcgaagagaaaaaagaactctgtgagaaagatgttcaacgattaatgaaagagaaagaatattccaaaagcatcataatgaacctaacaaaagatatggaagccatgaatagattgcatgagcagcaacttgagcaaattggaagaaaggcaaaggaaatggaggaacaattaaccaccagggtaaaagaagtagagtatctcttgctacaatcgaataagaaagttgaagaacttgagattgcttctaggctaaaatcacagttatgggatcagaaagagaacatttttcagagttacatggataatcaacaattagttatcaaggacataagaatattgtcacagtcatatgaaaatgatatgtatgcacttcaaatgcagtggagaaatgaaatctctaatttaggatctgggttaaaatgtttggttgatgccgctgaaaattatcataaagtcctgacagagaaccaaaagttatttaatgaagtgcaagaactaaaaggtaatataagagtatattgtcgtgttaggccatttctttccggtcaagataaaaagtccaccacaattgactacatgggggaaaatggtgagcttcttatatcaaatccatttaagcaagggaaggacggacatagaatgttcaagtttaataaagtgtttactccatttgcttcccaagctgaggttttttctgacatacaaccactgatccgatcagttctggatggattcaacgtttgtatttttgcatatggccagactggttctggcaaaacttacactatgagtgggcctaccacatcaaaacaagattggggtgtcaattatcgagctttaaatgatttgtttgatatttcactaagtaggagaaatgccttctcatatgaggtgggggtacaaatggttgagatatacaatgaacaagtccgtgatctgctatcaaatgatattgcacaaagaagacttgggatttggaacacttctcaacccaatgggcttgttgttccagatgcaagcttgcactcagttaagtcgacatctgatgtattagacttgatggagattggacaagcaaatagagcagttggttcaacagcgctaaatgaacgaagtagtcggtcacacagtattctaactgtacatgttcgagggatggatttgaagaatggatcaacctctaggggttgtttgcatcttattgatcttgctggtagtgagagggtagagaagtctgaagtaaccggcgatagattaaaagaagctcaatacattaacaaatcactctctgcgttaggtgatgttatttttgctttgtcacagaaaagtgcccatgtgccttatagaaacagcaagttaacacaagttcttcaaagttctttaggtggacaagcaaaaactctaatgtttgttcagataaatcctgatgttgagtcatattcagaaactataagtactttaaagtttgctgaaagggtgtctggagtagagttaggtgctgctagaagtaacaaggagggaaaagatataaaagagctattggaacaggttgcgtctttgaaagacacaattttgcgcaaagatatggaaatagagcagatccaggtcatcaaagacaaagtaaaatccccaaatttgttgttagatagaaatgtgcctggcttgacgaagactacagcaaaccaacctagccaactattatcaggcgaacgaatgcttaagtctagtgacagagttctatcggatcgtcagagttacggcgaggtgaatgtagatcctaaccaccatgtgatggatactgcaccagtgagcatagatgaagcaggatatgagaacaatgcatcggatgatggtttatcgggtgaaaccgagaatgataattcagctgctgagatgacagcggaacggctgcatagatttccatcaagaataagcaggttcactctcacaaagaacgggcagccatctatgtctagatcgaacccaaaggatgctaagactccaagcaatacgaaagctccatcgagccggttgacaggaggctcttcagccaggtctaaaagacggcagtagagcacgatcatgttgctcgttttgatgtgcattgtagttgaaatgtgaatttgatgggtagttgtaggaccgttttatgattgtaactttagaaaatgtcagacactgatggcagaatatttgaggcatttgtttgatcatttgcttatgccgagcaaaacagcaaacaatgctcgattgtatgtgaaacactctgacctgtgaccatttgaatgtcggtgcgcctccggaagtccggagttgtgtatataccaccaaattgccggcctaaaatttccagtttgatgcatcctggaatctcac

SEQ ID NO: 76864 - DNA, 3567 bp, Zea Mays
ggaagagcgagtcaactcatctcgaggcagttccgctgccggaagcccgcaattcaacacgcgaagctaaaaaagaaaaaaacaattcgaaacccccgacctacgcgaggacaaaacagcaaaaccaaagcgctcagccgctcgcgaggagcgaaaggcgagcgcgcagccgggcgcccgtggcggaggcgaaacccccgccgccgcatcgccctgagaccctccggttcggcccgggccgagctcgagcccgcgcaatctcgccgccggcgggcttgatctgatccaaggccaccgcgcgccggcgcgggcggcgaggaatggggagcgtggacggccgcggggtcgaggggatccacgaagctaatcggcgcgcgcagttgattggatggatgaatgccttactcccggaattcagtttgcctccggattcatcgagtgaagagctgcgagagctgctcagtgacggcgtggtcctgtgccgtcttgtgaacacactcatcccgggggttcttgagggatcctgggagggttatgcaccgtcagatcagaggttaggcaacgtgaagaaattcctctcggtggtctctgatatggggctgccaggcttcagtttgaaagatcttgatgagggattaatgtcttctgtagtggaatgtctcttggttttgaggggcagtgtggatcctagattaggtgatgatattccaccagatgttaccagaactcctttgagaaaacaatggggagttcaggaaatggacaagcctcaagttcccgctgcagcactagggaaaagatcccctgcagaggacatgagaaacggcgttgcagattccaaaacccatcagaaaacttctgtcttttctggacaaaaggttcgtgaagttttccaattaaaacgcggatcatattcagatcttactgctgccaagatttcagagatgatgcactctaatagcttagataatgcaccgacacagtcgcttattagtgttgttaatggtattttggatgaaagcatagaaaggaaaaagggagaaataccacatcgtgtagtttacttactgcggaaagtcgttcaagagattgagcaccgtctctgtattcaagcagagcacataagaagtcaaaatgttaccatcaagacaagagaacaaaagtactgttcaaaaattaaagcacttgaaatgttggtaaatggcacaaatgaagaaaaccagatggcaataaacaggcttcagatagtcaagaatgagaagtcacaaatcgaagagaaaaaagaactctgtgagaaagatgttcaacgattaatgaaagagaaagaatattccaaaagcatcataatgaacctaacaaaagatatggaagccatgaatagattgcatgagcagcaacttgagcaaattggaagaaaggcaaaggaaatggaggaacaattaaccaccagggtaaaagaagtagagtatctcttgctacaatcgaataagaaagttgaagaacttgagattgcttctaggctaaaatcacagttatgggatcagaaagagaacatttttcagagttacatggataatcaacaattagttatcaaggacataagaatattgtcacagtcatatgaaaatgatatgtatgcacttcaaatgcagtggagaaatgaaatctctaatttaggatctgggttaaaatgtttggttgatgccgctgaaaattatcataaagtcctgacagagaaccaaaagttatttaatgaagtgcaagaactaaaaggtaatataagagtatattgtcgtgttaggccatttctttccggtcaagataaaaagtccaccacaattgactacatgggggaaaatggtgagcttcttatatcaaatccatttaagcaagggaaggacggacatagaatgttcaagtttaataaagtgtttactccatttgcttcccaagctgaggttttttctgacatacaaccactgatccgatcagttctggatggattcaacgtttgtatttttgcatatggccagactggttctggcaaaacttacactatggagaaatgccttctcatatgaggtgggggtacaaatggttgagatatacaatgaacaagtccgtgatctgctatcaaatgatattgcacaaagaagacttgggatttggaacacttctcaacccaatgggcttgttgttccagatgcaagcttgcactcagttaagtcgacatctgatgtattagacttgatggagattggacaagcaaatagagcagttggttcaacagcgctaaatgaacgaagtagtcggtcacacagtattctaactgtacatgttcgagggatggatttgaagaatggatcaacctctaggggttgtttgcatcttattgatcttgctggtagtgagagggtagagaagtctgaagtaaccggcgatagattaaaagaagctcaatacattaacaaatcactctctgcgttaggtgatgttatttttgctttgtcacagaaaagtgcccatgtgccttatagaaacagcaagttaacacaagttcttcaaagttctttaggtggacaagcaaaaactctaatgtttgttcagataaatcctgatgttgagtcatattcagaaactataagtactttaaagtttgctgaaagggtgtctggagtagagttaggtgctgctagaagtaacaaggagggaaaagatataaaagagctattggaacaggttgcgtctttgaaagacacaattttgcgcaaagatatggaaatagagcagatccaggtcatcaaagacaaagtaaaatccccaaatttgttgttagatagaaatgtgcctggcttgacgaagactacagcaaaccaacctagccaactattatcaggcgaacgaatgcttaagtctagtgacagagttctatcggatcgtcagagttacggcgaggtgaatgtagatcctaaccaccatgtgatggatactgcaccagtgagcatagatgaagcaggatatgagaacaatgcatcggatgatggtttatcgggtgaaaccgagaatgataattcagctgctgagatgacagcggaacggctgcatagatttccatcaagaataagcaggttcactctcacaaagaacgggcagccatctatgtctagatcgaacccaaaggatgctaagactccaagcaatacgaaagctccatcgagccggttgacaggaggctcttcagccaggtctaaaagacggcagtagagcacgatcatgttgctcgttttgatgtgcattgtagttgaaatgtgaatttgatgggtagttgtaggaccgttttatgattgtaactttagaaaatgtcagacactgatggcagaatatttgaggcatttgtttgatcatttgcttatgccgagcaaaacagcaaacaatgctcgattgtatgtgaaacactctgacctgtgaccatttgaatgtcggtgcgcctccggaagtccggagttgtgtatataccaccaaattgccggcctaaaatttccagtttgatgcatcctggaatctcac

SEQ ID NO: 76865 - DNA, 3609 bp, Zea Mays
ggaagagcgagtcaactcatctcgaggcagttccgctgccggaagcccgcaattcaacacgcgaagctaaaaaagaaaaaaacaattcgaaacccccgacctacgcgaggacaaaacagcaaaaccaaagcgctcagccgctcgcgaggagcgaaaggcgagcgcgcagccgggcgcccgtggcggaggcgaaacccccgccgccgcatcgccctgagaccctccggttcggcccgggccgagctcgagcccgcgcaatctcgccgccggcgggcttgatctgatccaaggccaccgcgcgccggcgcgggcggcgaggaatggggagcgtggacggccgcggggtcgaggggatccacgaagctaatcggcgcgcgcagttgattggatggatgaatgccttactcccggaattcagtttgcctccggattcatcgagtgaagagctgcgagagctgctcagtgacggcgtggtcctgtgccgtcttgtgaacacactcatcccgggggttcttgagggatcctgggagggttatgcaccgtcagatcagaggttaggcaacgtgaagaaattcctctcggtggtctctgatatggggctgccaggcttcagtttgaaagatcttgatgagggattaatgtcttctgtagtggaatgtctcttggttttgaggggcagtgtggatcctagattaggtgatgatattccaccagatgttaccagaactcctttgagaaaacaatggggagttcaggaaatggacaagcctcaagttcccgctgcagcactagggaaaagatcccctgcagaggacatgagaaacggcgttgcagattccaaaacccatcagaaaacttctgtcttttctggacaaaaggttcgtgaagttttccaattaaaacgcggatcatattcagatcttactgctgccaagatttcagagatgatgcactctaatagcttagataatgcaccgacacagtcgcttattagtgttgttaatggtattttggatgaaagcatagaaaggaaaaagggagaaataccacatcgtgtagtttacttactgcggaaagtcgttcaagagattgagcaccgtctctgtattcaagcagagcacataagaagtcaaaatgttaccatcaagacaagagaacaaaagtactgttcaaaaattaaagcacttgaaatgttggtaaatggcacaaatgaagaaaaccagtttctctcttcagatggcaataaacaggcttcagatagtcaagaatgagaagtcacaaatcgaagagaaaaaagaactctgtgagaaagatgttcaacgattaatgaaagagaaagaatattccaaaagcatcataatgaacctaacaaaagatatggaagccatgaatagattgcatgagcagcaacttgagcaaattggaagaaaggcaaaggaaatggaggaacaattaaccaccagggtaaaagaagtagagtatctcttgctacaatcgaataagaaagttgaagaacttgagattgcttctaggctaaaatcacagttatgggatcagaaagagaacatttttcagagttacatggataatcaacaattagttatcaaggacataagaatattgtcacagtcatatgaaaatgatatgtatgcacttcaaatgcagtggagaaatgaaatctctaatttaggatctgggttaaaatgtttggttgatgccgctgaaaattatcataaagtcctgacagagaaccaaaagttatttaatgaagtgcaagaactaaaaggtaatataagagtatattgtcgtgttaggccatttctttccggtcaagataaaaagtccaccacaattgactacatgggggaaaatggtgagcttcttatatcaaatccatttaagcaagggaaggacggacatagaatgttcaagtttaataaagtgtttactccatttgcttcccaagctgaggttttttctgacatacaaccactgatccgatcagttctggatggattcaacgtttgtatttttgcatatggccagactggttctggcaaaacttacactatgagtgggcctaccacatcaaaacaagattggggtgtcaattatcgagctttaaatgatttgtttgatatttcactaagtaggagaaatgccttctcatatgaggtgggggtacaaatggttgagatatacaatgaacaagtccgtgatctgctatcaaatgatattgcacaaagaagacttgggatttggaacacttctcaacccaatgggcttgttgttccagatgcaagcttgcactcagttaagtcgacatctgatgtattagacttgatggagattggacaagcaaatagagcagttggttcaacagcgctaaatgaacgaagtagtcggtcacacagtattctaactgtacatgttcgagggatggatttgaagaatggatcaacctctaggggttgtttgcatcttattgatcttgctggtagtgagagggtagagaagtctgaagtaaccggcgatagattaaaagaagctcaatacattaacaaatcactctctgcgttaggtgatgttatttttgctttgtcacagaaaagtgcccatgtgccttatagaaacagcaagttaacacaagttcttcaaagttctttagcaattttggttggaaaaacagtatactgaaaaaagggcaaacttttacatgaatgctatgttagtatttatcaaggttcaactttcgaagcatggtttgcatactactcaaaggttgcgtctttgaaagacacaattttgcgcaaagatatggaaatagagcagatccaggtcatcaaagacaaagtaaaatccccaaatttgttgttagatagaaatgtgcctggcttgacgaagactacagcaaaccaacctagccaactattatcaggcgaacgaatgcttaagtctagtgacagagttctatcggatcgtcagagttacggcgaggtgaatgtagatcctaaccaccatgtgatggatactgcaccagtgagcatagatgaagcaggatatgagaacaatgcatcggatgatggtttatcgggtgaaaccgagaatgataattcagctgctgagatgacagcggaacggctgcatagatttccatcaagaataagcaggttcactctcacaaagaacgggcagccatctatgtctagatcgaacccaaaggatgctaagactccaagcaatacgaaagctccatcgagccggttgacaggaggctcttcagccaggtctaaaagacggcagtagagcacgatcatgttgctcgttttgatgtgcattgtagttgaaatgtgaatttgatgggtagttgtaggaccgttttatgattgtaactttagaaaatgtcagacactgatggcagaatatttgaggcatttgtttgatcatttgcttatgccgagcaaaacagcaaacaatgctcgattgtatgtgaaacactctgacctgtgaccatttgaatgtcggtgcgcctccggaagtccggagttgtgtatataccaccaaattgccggcctaaaatttccagtttgatgcatcctggaatctcac

SEQ ID NO: 76866 - DNA, 3817 bp, Zea Mays
ggaagagcgagtcaactcatctcgaggcagttccgctgccggaagcccgcaattcaacacgcgaagctaaaaaagaaaaaaacaattcgaaacccccgacctacgcgaggacaaaacagcaaaaccaaagcgctcagccgctcgcgaggagcgaaaggcgagcgcgcagccgggcgcccgtggcggaggcgaaacccccgccgccgcatcgccctgagaccctccggttcggcccgggccgagctcgagcccgcgcaatctcgccgccggcgggcttgatctgatccaaggccaccgcgcgccggcgcgggcggcgaggaatggggagcgtggacggccgcggggtcgaggggatccacgaagctaatcggcgcgcgcagttgattggatggatgaatgccttactcccggaattcagtttgcctccggattcatcgagtgaagagctgcgagagctgctcagtgacggcgtggtcctgtgccgtcttgtgaacacactcatcccgggggttcttgagggatcctgggagggttatgcaccgtcagatcagaggttaggcaacgtgaagaaattcctctcggtggtctctgatatggggctgccaggcttcagtttgaaagatcttgatgagggattaatgtcttctgtagtggaatgtctcttggttttgaggggcagtgtggatcctagattaggtgatgatattccaccagatgttaccagaactcctttgagaaaacaatggggagttcaggaaatggacaagcctcaagttcccgctgcagcactagggaaaagatcccctgcagaggacatgagaaacggcgttgcagattccaaaacccatcagaaaacttctgtcttttctggacaaaaggttcgtgaagttttccaattaaaacgcggatcatattcagatcttactgctgccaagatttcagagatgatgcactctaatagcttagataatgcaccgacacagtcgcttattagtgttgttaatggtattttggatgaaagcatagaaaggaaaaagggagaaataccacatcgtgtagtttacttactgcggaaagtcgttcaagagattgagcaccgtctctgtattcaagcagagcacataagaagtcaaaatgttaccatcaagacaagagaacaaaagtactgttcaaaaattaaagcacttgaaatgttggtaaatggcacaaatgaagaaaaccagatggcaataaacaggcttcagatagtcaagaatgagaagtcacaaatcgaagagaaaaaagaactctgtgagaaagatgttcaacgattaatgaaagagaaagaatattccaaaagcatcataatgaacctaacaaaagatatggaagccatgaatagattgcatgagcagcaacttgagcaaattggaagaaaggcaaaggaaatggaggaacaattaaccaccagggtaaaagaagtagagtatctcttgctacaatcgaataagaaagttgaagaacttgagattgcttctaggctaaaatcacagttatgggatcagaaagagaacatttttcagagttacatggataatcaacaattagttatcaaggacataagaatattgtcacagtcatatgaaaatgatatgtatgcacttcaaatgcagtggagaaatgaaatctctaatttaggatctgggttaaaatgtttggttgatgccgctgaaaattatcataaagtcctgacagagaaccaaaagttatttaatgaagtgcaagaactaaaaggtaatataagagtatattgtcgtgttaggccatttctttccggtcaagataaaaagtccaccacaattgactacatgggggaaaatggtgagcttcttatatcaaatccatttaagcaagggaaggacggacatagaatgttcaagtttaataaagtgtttactccatttgcttcccaagctgaggttttttctgacatacaaccactgatccgatcagttctggatggattcaacgtttgtatttttgcatatggccagactggttctggcaaaacttacactatgagtgggcctaccacatcaaaacaagattggggtgtcaattatcgagctttaaatgatttgtttgatatttcactaagtaggagaaatgccttctcatatgaggtgggggtacaaatggttgagatatacaatgaacaagtccgtgatctgctatcaaatgatattgcacaaagaagacttgggatttggaacacttctcaacccaatgggcttgttgttccagatgcaagcttgcactcagttaagtcgacatctgatgtattagacttgatggagattggacaagcaaatagagcagttggttcaacagcgctaaatgaacgaagtagtcggtcacacagtattctaactgtacatgttcgagggatggatttgaagaatggatcaacctctaggggttgtttgcatcttattgatcttgctggtagtgagagggtagagaagtctgaagtaaccggcgatagattaaaagaagctcaatacattaacaaatcactctctgcgttaggtgatgttatttttgctttgtcacagaaaagtgcccatgtgccttatagaaacagcaagttaacacaagttcttcaaagttctttaggtggacaagcaaaaactctaatgtttgttcagataaatcctgatgttgagtcatattcagaaactataagtactttaaagtttgctgaaagggtgtctggagtagagttaggtgctgctagaagtaacaaggagggaaaagatataaaagagctattggaacaggttcttgtacttcttgacttgtcactaactagagtttatttgtttccaattctgtagcaattttggttggaaaaacagtatactgaaaaaagggcaaacttttacatgaatgctatgttagtatttatcaaggttcaactttcgaagcatggtttgcatactactcaaaggttgcgtctttgaaagacacaattttgcgcaaagatatggaaatagagcagatccaggtcatcaaagacaaagtaaaatccccaaatttgttgttagatagaaatgtgcctggcttgacgaagactacagcaaaccaacctagccaactattatcaggcgaacgaatgcttaagtctagtgacagagttctatcggatcgtcagagttacggcgaggtgaatgtagatcctaaccaccatgtgatggatactgcaccagtgagcatagatgaagcaggatatgagaacaatgcatcggatgatggtttatcgggtgaaaccgagaatgataattcagctgctgagatgacagcggaacggctgcatagatttccatcaagaataagcaggttcactctcacaaagaacgggcagccatctatgtctagatcgaacccaaaggatgctaagactccaagcaatacgaaagctccatcgagccggttgacaggaggctcttcagccaggtctaaaagacggcagtagagcacgatcatgttgctcgttttgatgtgcattgtagttgaaatgtgaatttgatgggtagttgtaggaccgttttatgattgtaactttagaaaatgtcagacactgatggcagaatatttgaggcatttgtttgatcatttgcttatgccgagcaaaacagcaaacaatgctcgattgtatgtgaaacactctgacctgtgaccatttgaatgtcggtgcgcctccggaagtccggagttgtgtatataccaccaaattgccggcctaaaatttccagtttgatgcatcctggaatctcac

SEQ ID NO: 76867 - DNA, 3409 bp, Zea Mays
ggaagagcgagtcaactcatctcgaggcagttccgctgccggaagcccgcaattcaacacgcgaagctaaaaaagaaaaaaacaattcgaaacccccgacctacgcgaggacaaaacagcaaaaccaaagcgctcagccgctcgcgaggagcgaaaggcgagcgcgcagccgggcgcccgtggcggaggcgaaacccccgccgccgcatcgccctgagaccctccggttcggcccgggccgagctcgagcccgcgcaatctcgccgccggcgggcttgatctgatccaaggccaccgcgcgccggcgcgggcggcgaggaatggggagcgtggacggccgcggggtcgaggggatccacgaagctaatcggcgcgcgcagttgattggatggatgaatgccttactcccggaattcagtttgcctccggattcatcgagtgaagagctgcgagagctgctcagtgacggcgtggtcctgtgccgtcttgtgaacacactcatcccgggggttcttgagggatcctgggagggttatgcaccgtcagatcagaggttaggcaacgtgaagaaattcctctcggtggtctctgatatggggctgccaggcttcagtttgaaagatcttgatgaggacaaaaggttcgtgaagttttccaattaaaacgcggatcatattcagatcttactgctgccaagatttcagagatgatgcactctaatagcttagataatgcaccgacacagtcgcttattagtgttgttaatggtattttggatgaaagcatagaaaggaaaaagggagaaataccacatcgtgtagtttacttactgcggaaagtcgttcaagagattgagcaccgtctctgtattcaagcagagcacataagaagtcaaaatgttaccatcaagacaagagaacaaaagtactgttcaaaaattaaagcacttgaaatgttggtaaatggcacaaatgaagaaaaccagatggcaataaacaggcttcagatagtcaagaatgagaagtcacaaatcgaagagaaaaaagaactctgtgagaaagatgttcaacgattaatgaaagagaaagaatattccaaaagcatcataatgaacctaacaaaagatatggaagccatgaatagattgcatgagcagcaacttgagcaaattggaagaaaggcaaaggaaatggaggaacaattaaccaccagggtaaaagaagtagagtatctcttgctacaatcgaataagaaagttgaagaacttgagattgcttctaggctaaaatcacagttatgggatcagaaagagaacatttttcagagttacatggataatcaacaattagttatcaaggacataagaatattgtcacagtcatatgaaaatgatatgtatgcacttcaaatgcagtggagaaatgaaatctctaatttaggatctgggttaaaatgtttggttgatgccgctgaaaattatcataaagtcctgacagagaaccaaaagttatttaatgaagtgcaagaactaaaaggtaatataagagtatattgtcgtgttaggccatttctttccggtcaagataaaaagtccaccacaattgactacatgggggaaaatggtgagcttcttatatcaaatccatttaagcaagggaaggacggacatagaatgttcaagtttaataaagtgtttactccatttgcttcccaagctgaggttttttctgacatacaaccactgatccgatcagttctggatggattcaacgtttgtatttttgcatatggccagactggttctggcaaaacttacactatgagtgggcctaccacatcaaaacaagattggggtgtcaattatcgagctttaaatgatttgtttgatatttcactaagtaggagaaatgccttctcatatgaggtgggggtacaaatggttgagatatacaatgaacaagtccgtgatctgctatcaaatgatattgcacaaagaagacttgggatttggaacacttctcaacccaatgggcttgttgttccagatgcaagcttgcactcagttaagtcgacatctgatgtattagacttgatggagattggacaagcaaatagagcagttggttcaacagcgctaaatgaacgaagtagtcggtcacacagtattctaactgtacatgttcgagggatggatttgaagaatggatcaacctctaggggttgtttgcatcttattgatcttgctggtagtgagagggtagagaagtctgaagtaaccggcgatagattaaaagaagctcaatacattaacaaatcactctctgcgttaggtgatgttatttttgctttgtcacagaaaagtgcccatgtgccttatagaaacagcaagttaacacaagttcttcaaagttctttaggtggacaagcaaaaactctaatgtttgttcagataaatcctgatgttgagtcatattcagaaactataagtactttaaagtttgctgaaagggtgtctggagtagagttaggtgctgctagaagtaacaaggagggaaaagatataaaagagctattggaacaggttgcgtctttgaaagacacaattttgcgcaaagatatggaaatagagcagatccaggtcatcaaagacaaagtaaaatccccaaatttgttgttagatagaaatgtgcctggcttgacgaagactacagcaaaccaacctagccaactattatcaggcgaacgaatgcttaagtctagtgacagagttctatcggatcgtcagagttacggcgaggtgaatgtagatcctaaccaccatgtgatggatactgcaccagtgagcatagatgaagcaggatatgagaacaatgcatcggatgatggtttatcgggtgaaaccgagaatgataattcagctgctgagatgacagcggaacggctgcatagatttccatcaagaataagcaggttcactctcacaaagaacgggcagccatctatgtctagatcgaacccaaaggatgctaagactccaagcaatacgaaagctccatcgagccggttgacaggaggctcttcagccaggtctaaaagacggcagtagagcacgatcatgttgctcgttttgatgtgcattgtagttgaaatgtgaatttgatgggtagttgtaggaccgttttatgattgtaactttagaaaatgtcagacactgatggcagaatatttgaggcatttgtttgatcatttgcttatgccgagcaaaacagcaaacaatgctcgattgtatgtgaaacactctgacctgtgaccatttgaatgtcggtgcgcctccggaagtccggagttgtgtatataccaccaaattgccggcctaaaatttccagtttgatgcatcctggaatctcac

SEQ ID NO: 76868 - DNA, 3908 bp, Zea Mays
ggaagagcgagtcaactcatctcgaggcagttccgctgccggaagcccgcaattcaacacgcgaagctaaaaaagaaaaaaacaattcgaaacccccgacctacgcgaggacaaaacagcaaaaccaaagcgctcagccgctcgcgaggagcgaaaggcgagcgcgcagccgggcgcccgtggcggaggcgaaacccccgccgccgcatcgccctgagaccctccggttcggcccgggccgagctcgagcccgcgcaatctcgccgccggcgggcttgatctgatccaaggccaccgcgcgccggcgcgggcggcgaggaatggggagcgtggacggccgcggggtcgaggggatccacgaagctaatcggcgcgcgcagttgattggatggatgaatgccttactcccggaattcagtttgcctccggattcatcgagtgaagagctgcgagagctgctcagtgacggcgtggtcctgtgccgtcttgtgaacacactcatcccgggggttcttgagggatcctgggagggttatgcaccgtcagatcagaggttaggcaacgtgaagaaattcctctcggtggtctctgatatggggctgccaggcttcagtttgaaagatcttgatgagggattaatgtcttctgtagtggaatgtctcttggttttgaggggcagtgtggatcctagattaggtgatgatattccaccagatgttaccagaactcctttgagaaaacaatggggagttcaggaaatggacaagcctcaagttcccgctgcagcactagggaaaagatcccctgcagaggacatgagaaacggcgttgcagattccaaaacccatcagaaaacttctgtcttttctggacaaaaggttcgtgaagttttccaattaaaacgcggatcatattcagatcttactgctgccaagatttcagagatgatgcactctaatagcttagataatgcaccgacacagtcgcttattagtgttgttaatggtattttggatgaaagcatagaaaggaaaaagggagaaataccacatcgtgtagtttacttactgcggaaagtcgttcaagagattgagcaccgtctctgtattcaagcagagcacataagaagtgtaagataatctgcttaaaacatgaattttccttttgggcacacaaatttacaatgaatcagatacaatatactgcagcaaaatgttaccatcaagacaagagaacaaaagtactgttcaaaaattaaagcacttgaaatgttggtaaatggcacaaatgaagaaaaccagtttctctcttcagatggcaataaacaggcttcagatagtcaagaatgagaagtcacaaatcgaagagaaaaaagaactctgtgagaaagatgttcaacgattaatgaaagagaaagaatattccaaaagcatcataatgaacctaacaaaagatatggaagccatgaatagattgcatgagcagcaacttgagcaaattggaagaaaggcaaaggaaatggaggaacaattaaccaccagggtaaaagaagtagagtatctcttgctacaatcgaataagaaagttgaagaacttgagattgcttctaggctaaaatcacagttatgggatcagaaagagaacatttttcagagttacatggataatcaacaattagttatcaaggacataagaatattgtcacagtcatatgaaaatgatatgtatgcacttcaaatgcagtggagaaatgaaatctctaatttaggatctgggttaaaatgtttggttgatgccgctgaaaattatcataaagtcctgacagagaaccaaaagttatttaatgaagtgcaagaactaaaaggtaatataagagtatattgtcgtgttaggccatttctttccggtcaagataaaaagtccaccacaattgactacatgggggaaaatggtgagcttcttatatcaaatccatttaagcaagggaaggacggacatagaatgttcaagtttaataaagtgtttactccatttgcttcccaagctgaggttttttctgacatacaaccactgatccgatcagttctggatggattcaacgtttgtatttttgcatatggccagactggttctggcaaaacttacactatgagtgggcctaccacatcaaaacaagattggggtgtcaattatcgagctttaaatgatttgtttgatatttcactaagtaggagaaatgccttctcatatgaggtgggggtacaaatggttgagatatacaatgaacaagtccgtgatctgctatcaaatgatattgcacaaagaagacttgggatttggaacacttctcaacccaatgggcttgttgttccagatgcaagcttgcactcagttaagtcgacatctgatgtattagacttgatggagattggacaagcaaatagagcagttggttcaacagcgctaaatgaacgaagtagtcggtcacacagtattctaactgtacatgttcgagggatggatttgaagaatggatcaacctctaggggttgtttgcatcttattgatcttgctggtagtgagagggtagagaagtctgaagtaaccggcgatagattaaaagaagctcaatacattaacaaatcactctctgcgttaggtgatgttatttttgctttgtcacagaaaagtgcccatgtgccttatagaaacagcaagttaacacaagttcttcaaagttctttaggtggacaagcaaaaactctaatgtttgttcagataaatcctgatgttgagtcatattcagaaactataagtactttaaagtttgctgaaagggtgtctggagtagagttaggtgctgctagaagtaacaaggagggaaaagatataaaagagctattggaacaggttcttgtacttcttgacttgtcactaactagagtttatttgtttccaattctgtagcaattttggttggaaaaacagtatactgaaaaaagggcaaacttttacatgaatgctatgttagtatttatcaaggttcaactttcgaagcatggtttgcatactactcaaaggttgcgtctttgaaagacacaattttgcgcaaagatatggaaatagagcagatccaggtcatcaaagacaaagtaaaatccccaaatttgttgttagatagaaatgtgcctggcttgacgaagactacagcaaaccaacctagccaactattatcaggcgaacgaatgcttaagtctagtgacagagttctatcggatcgtcagagttacggcgaggtgaatgtagatcctaaccaccatgtgatggatactgcaccagtgagcatagatgaagcaggatatgagaacaatgcatcggatgatggtttatcgggtgaaaccgagaatgataattcagctgctgagatgacagcggaacggctgcatagatttccatcaagaataagcaggttcactctcacaaagaacgggcagccatctatgtctagatcgaacccaaaggatgctaagactccaagcaatacgaaagctccatcgagccggttgacaggaggctcttcagccaggtctaaaagacggcagtagagcacgatcatgttgctcgttttgatgtgcattgtagttgaaatgtgaatttgatgggtagttgtaggaccgttttatgattgtaactttagaaaatgtcagacactgatggcagaatatttgaggcatttgtttgatcatttgcttatgccgagcaaaacagcaaacaatgctcgattgtatgtgaaacactctgacctgtgaccatttgaatgtcggtgcgcctccggaagtccggagttgtgtatataccaccaaattgccggcctaaaatttccagtttgatgcatcctggaatctcac

SEQ ID NO: 76869 - DNA, 615 bp, Zea Mays
ctctccctcccaggctcatactctttgtatgaggtccttccagaacctgaagagggagcatggagtcctcaggcagaagctggaatcctacttccagctgctgcgacaagccggtcctgccgtgactgcaaccaggcctagaggcatgtaaggaacggctgttggcgtgcagggagcagtgcaagggacagacagcgtcatagcgatgctccactacgccattgttgaggctagctgtaacgatgggccacgaataagaagtttgcctatggcctgtgggggagttccctgcgggttttaaagtgtaacacccttcataatcgatgccttaagctggtgctgccgagtgccgactagctaggccggcatgtaagagcagcctagactgatgttgatgtggtctggcagacgtcctgtgctgtgcctgcctctgtatttcggtcaaataaataaactagatggagtttgcatgtttgcatcatgggatctctgttttttcgcactgaatttgtccattctgtcacgcagattgcgatgtcccaatgttgtgtgatgtgcatctgctcagaactatcggtaaccattccgagtttgagaccgaatcgaaactattgg

SEQ ID NO: 76870 - DNA, 978 bp, Zea Mays
acaagcaaggtgaccaaccagttgcatatgcattttgtgcctactctacctttaaggcattcatttataaatggagtattctaatttgcagcagcaggcagcgtccttgaaaaagaacctctttgatcagggatacttggatgagcaattttgtcagattgaggacttgcaggatgaagcaagccctaattttacagaagaagttgtttccctgttcttcaagaactcaaccaggctaatgacaaatattgagcaagctatggacaggaatcccagagatttctgtagatgggatgtaaacatgcagcaattaaaaggaacctgttctaggatgaagaacgagtgcacctcattcagaaatagatgtggagacgagaacgttgaaggttgtatgaggtccttccagaacctgaagagggagcatggagtcctcaggcagaagctggaatcctacttccagctgctgcgacaagccggtcctgccgtgactgcaaccaggcctagaggcatgtaaggaacggctgttggcgtgcagggagcagtgcaagggacagacagcgtcatagcgatgctccactacgccattgttgaggctagctgtaacgatgggccacgaataagaagtttgcctatggcctgtgggggagttccctgcgggttttaaagtgtaacacccttcataatcgatgccttaagctggtgctgccgagtgccgactagctaggccggcatgtaagagcagcctagactgatgttgatgtggtctggcagacgtcctgtgctgtgcctgcctctgtatttcggtcaaataaataaactagatggagtttgcatgtttgcatcatgggatctctgttttttcgcactgaatttgtccattctgtcacgcagattgcgatgtcccaatgttgtgtgatgtgcatctgctcagaactatcggtaaccattccgagtttgagaccgaatcgaaactattgg

SEQ ID NO: 76871 - DNA, 1117 bp, Zea Mays
aggctttctggttgtttcactccacatcagattctcttatcaagatgtgaagatggttgaaggtgggaaggccactcgctgtaccaatcaaggcaatcattgagtgaatctgttttagcccttctgctatgtggtccagtttcaagtgatctgagagagttatggttcctaactactgaaagcaactactgagggatacttggatgagcaattttgtcagattgaggacttgcaggatgaagcaagccctaattttacagaagaagttgtttccctgttcttcaagaactcaaccaggctaatgacaaatattgagcaagctatgtaagtgttggcaatgtcttttttctcaaatacgcacaggagagatgcgatgtcataaactagaacaacactttgttatgtttacatgtttagtgacatcaagttttgttggaaatctgacaacactgtgcagggacaggaatcccagagatttctgtagatgggatgtaaacatgcagcaattaaaaggaacctgttctagttgtatgaggtccttccagaacctgaagagggagcatggagtcctcaggcagaagctggaatcctacttccagctgctgcgacaagccggtcctgccgtgactgcaaccaggcctagaggcatgtaaggaacggctgttggcgtgcagggagcagtgcaagggacagacagcgtcatagcgatgctccactacgccattgttgaggctagctgtaacgatgggccacgaataagaagtttgcctatggcctgtgggggagttccctgcgggttttaaagtgtaacacccttcataatcgatgccttaagctggtgctgccgagtgccgactagctaggccggcatgtaagagcagcctagactgatgttgatgtggtctggcagacgtcctgtgctgtgcctgcctctgtatttcggtcaaataaataaactagatggagtttgcatgtttgcatcatgggatctctgttttttcgcactgaatttgtccattctgtcacgcagattgcgatgtcccaatgttgtgtgatgtgcatctgctcagaactatcggtaaccattccgagtttgagaccgaatcgaaactattgg

SEQ ID NO: 76872 - DNA, 1175 bp, Zea Mays
taagcatgtatcataatggttttgctgctgcttttttagaaacacagcagatggatgttacacttttcaaatctttagtgtgaatgtatgtatataactactccctccattataaacataggctttctggttgtttcactccacatcagattctcttatcaagatgtgaagatggttgaaggtgggaaggccactcgctgtaccaatcaaggcaatcattgagtgaatctgttttagcccttctgctatgtggtccagtttcaagtgatctgagagagttatggttcctaactactgaaagcaactactgagggatacttggatgagcaattttgtcagattgaggacttgcaggatgaagcaagccctaattttacagaagaagttgtttccctgttcttcaagaactcaaccaggctaatgacaaatattgagcaagctatggacaggaatcccagagatttctgtagatgggatgtaaacatgcagcaattaaaaggaacctgttctagcatcggtgcttgcaggatgaagaacgagtgcacctcattcagaaatagatgtggagacgagaacgttgaaggttgtatgaggtccttccagaacctgaagagggagcatggagtcctcaggcagaagctggaatcctacttccagctgctgcgacaagccggtcctgccgtgactgcaaccaggcctagaggcatgtaaggaacggctgttggcgtgcagggagcagtgcaagggacagacagcgtcatagcgatgctccactacgccattgttgaggctagctgtaacgatgggccacgaataagaagtttgcctatggcctgtgggggagttccctgcgggttttaaagtgtaacacccttcataatcgatgccttaagctggtgctgccgagtgccgactagctaggccggcatgtaagagcagcctagactgatgttgatgtggtctggcagacgtcctgtgctgtgcctgcctctgtatttcggtcaaataaataaactagatggagtttgcatgtttgcatcatgggatctctgttttttcgcactgaatttgtccattctgtcacgcagattgcgatgtcccaatgttgtgtgatgtgcatctgctcagaactatcggtaaccattccgagtttgagaccgaatcgaaactattgg

SEQ ID NO: 76873 - DNA, 1377 bp, Zea Mays
cgctgcggcgcagtcccatgcgcggcgtccactcgccggcggcccaacttctcaagccttcactcctacgcgcgcttcgccttcccctctcctggaagggagacggccattctcacccgtgctccggatttgtggtgacggacgtattgctcggagtttggggaccagtcaattatggaggttactggaggccccggtccaagaatcttgtgttgcctgtacagtgtagccatcgctgccgctttgcccccaaatatggatgccactggagagaatgtgctgtgtgccttcacatcaaccaaggaatcaagatatctaaagaggctttctggttgtttcactccacatcagattctcttatcaagatgtgaagatggttgaaggtgggaaggccactcgctgtaccaatcaaggcaatcattgagtgaatctgttttagcccttctgctatgtggtccagtttcaagtgatctgagagagttatggttcctaactactgaaagcaactactgagggatacttggatgagcaattttgtcagattgaggacttgcaggatgaagcaagccctaattttacagaagaagttgtttccctgttcttcaagaactcaaccaggctaatgacaaatattgagcaagctatggacaggaatcccagagatttctgtagatgggatgtaaacatgcagcaattaaaaggaacctgttctagcatcggtgcttgcaggatgaagaacgagtgcacctcattcagaaatagatgtggagacgagaacgttgaaggttgtatgaggtccttccagaacctgaagagggagcatggagtcctcaggcagaagctggaatcctacttccagctgctgcgacaagccggtcctgccgtgactgcaaccaggcctagaggcatgtaaggaacggctgttggcgtgcagggagcagtgcaagggacagacagcgtcatagcgatgctccactacgccattgttgaggctagctgtaacgatgggccacgaataagaagtttgcctatggcctgtgggggagttccctgcgggttttaaagtgtaacacccttcataatcgatgccttaagctggtgctgccgagtgccgactagctaggccggcatgtaagagcagcctagactgatgttgatgtggtctggcagacgtcctgtgctgtgcctgcctctgtatttcggtcaaataaataaactagatggagtttgcatgtttgcatcatgggatctctgttttttcgcactgaatttgtccattctgtcacgcagattgcgatgtcccaatgttgtgtgatgtgcatctgctcagaactatcggtaaccattccgagtttgagaccgaatcgaaactattgg

SEQ ID NO: 76874 - DNA, 1383 bp, Zea Mays
atccgctgcggcgcagtcccatgcgcggcgtccactcgccggcggcccaacttctcaagccttcactcctacgcgcgcttcgccttcccctctcctggaagggagacggccattctcacccgtgctccggatttgtggtgacggacgtattgctcggagtttggggaccagtcaattatggaggttactggaggccccggtccaagaatcttgtgttgcctgtacagtgtagccatcgctgccgctttgcccccaaatatggatgccactggagagaatgtgctgtgtgccttcacatcaaccaaggaatcaagatatctaaagagtaggctttctggttgtttcactccacatcagattctcttatcaagatgtgaagatggttgaaggtgggaaggccactcgctgtaccaatcaaggcaatcattgagtgaatctgttttagcccttctgctatgtggtccagtttcaagtgatctgagagagttatggttcctaactactgaaagcaactactgagggatacttggatgagcaattttgtcagattgaggacttgcaggatgaagcaagccctaattttacagaagaagttgtttccctgttcttcaagaactcaaccaggctaatgacaaatattgagcaagctatggacaggaatcccagagatttctgtagatgggatgtaaacatgcagcaattaaaaggaacctgttctagcatcggtgcttgcaggatgaagaacgagtgcacctcattcagaaatagatgtggagacgagaacgttgaaggttgtatgaggtccttccagaacctgaagagggagcatggagtcctcaggcagaagctggaatcctacttccagctgctgcgacaagccggtcctgccgtgactgcaaccaggcctagaggcatgtaaggaacggctgttggcgtgcagggagcagtgcaagggacagacagcgtcatagcgatgctccactacgccattgttgaggctagctgtaacgatgggccacgaataagaagtttgcctatggcctgtgggggagttccctgcgggttttaaagtgtaacacccttcataatcgatgccttaagctggtgctgccgagtgccgactagctaggccggcatgtaagagcagcctagactgatgttgatgtggtctggcagacgtcctgtgctgtgcctgcctctgtatttcggtcaaataaataaactagatggagtttgcatgtttgcatcatgggatctctgttttttcgcactgaatttgtccattctgtcacgcagattgcgatgtcccaatgttgtgtgatgtgcatctgctcagaactatcggtaaccattccgagtttgagaccgaatcgaaactattgg

SEQ ID NO: 76875 - DNA, 624 bp, Zea Mays
ttccctcgttatgaaccctgaccaggaattgtgcagagctcaagatccactactttcctaacagaaggaagacaacaaatctcaggtaaagaagatgcaaggtaaattcttgcaatgtcagcaatcgtgacgagaaattccagaaaaggtgttcaaagcagatgcgcgatcgagatgagccgtcagtttctcctcttacgttcttctgatgtcgcatcaaggatgaagaccaagaatggctgttagctacctaaggaggagcagaaggtagcttcgggaagaaggatacaggcagaggaagcacaacacagtgtccagtttacacctactctggtccagagatgcggacattggctcggcgcttgcgaccagcgtgcttctccacctcgcctgactgcagcttcttcagtgtatcagctgtagatggatcagtaggtagtgtagtaacaatggccaggcaggccaaggagaaacccttctgcttctctctaccgtgagactggactggaccgtcggtgacagcgctgttattctctctaccatttcagaagatctcagtgtatgatgtggagtgctggacttgaaacagaaaaggcaagtaacttaggtcctcgctcataaaac

SEQ ID NO: 76876 - DNA, 921 bp, Zea Mays
tcaagtgacgcccgtagcataggctagccaacgggtgccagcggcgtgtggcgaacttcttcgaccaatctgcccctaagtcttgcctgaccagcgtctgcttctgatgatggtgtggctacctgagcagcctgtaccaatccctccctttgtttgccccgtccaccaggacagctgaaagcttgaagtgtgtggttaagaaactcaggcaggtggataaattgttgtgaacagcctagcttagagtttaaagacagatggtaggctgttggcaggccatgcgattccctcgttatgaaccctgaccaggaattgtgcagagctcaagatccactactttcctaacagaaggaagacaacaaatctcaggtaaagaagatgcaaggtaaattcttgcaatgtcagcaatcgtgacgagaaattccagaaaaggtgttcaaagcagatgcgcgatcgagatgagccgtcagtttctcctcttacgttcttctgatgtcgcatcaaggatgaagaccaagaatggctgttagctacctaaggaggagcagaaggtagcttcgggaagaaggatacaggcagagccacacacatcaggaagcacaacacagtgtccagtttacacctactctggtccagagatgcggacattggctcggcgcttgcgaccagcgtgcttctccacctcgcctgactgcagcttcttcagtgtatcagctgtagatggatcagtaggtagtgtagtaacaatggccaggcaggccaaggagaaacccttctgcttctctctaccgtgagactggactggaccgtcggtgacagcgctgttattctctctaccatttcagaagatctcagtgtatgatgtggagtgctggacttgaaacagaaaaggcaagtaacttaggtcctcgctcataaaac

SEQ ID NO: 76877 - DNA, 486 bp, Zea Mays
  misc_feature (1)..(2): n is a, c, g, or t
nntcttgtttacactacacatgatttcctgtttgcgcgtagtcggttgggacaatgacttaattttgttggagttgctcggcagacagctaagagcaggagagcacaggaaatcgagagaagagagaagccaggagagggtcttcttacgtgggtattatttgatctttggtttggcaggccatgtattaattcgtagtgattatgttatctttcctactcgatcatttctattttcaaaatagatttgcctatttgatgaatatgaatctacttcctggaggctccatctatcatgtatttgctgcagaatataaggagttattaggcgtttggctgatgatctatctgatctgcacctatctatactaccgtgccttttctttaggcacaatggcaccttgaaagttgcatacaaaactggcagatccttctgtgctagttggatgtgcattattcttgtgttcctgatgatgtgtactccctc

SEQ ID NO: 76878 - DNA, 1005 bp, Zea Mays
attcaatcctcttttcgcaaagcgatcagctgtccaacatttattatggtccaccagccaaatgaataaacaacactttggaggacacacgtgtggacacaaggagtacaaagaaaaaaaatgaagagtatgaacttttatttagtggcccatctaaaagcccattaattcagcacaagttccactagcccagacgtttctttaacctagccttttcactgctccagcgaaggcacagccgccaccgtttcttgatctcccatcttcatcttcttcgtagcgccggcgctccatcttccgctccctcccttagtcgcgctcggcacgcgggtgacggcggcagtggcggcactcaggatcgggctctcagcgacggcatcagcgatatagggtgtgagactaccaaaactcgaaaatgaacaagggaaagatttttaagctagccaagggattcagaggaagggcgaaaaattgcataaggatagcaagagagagggtggagaaggcgctgcaatattcatatagggatcgacgcaacaagaagagagacatgcggtctctttggattgagcgcatcaatgctggtacacgcctccatggggtgaactacggcaatttcatgcatgggttaatgaaggagaacatccaactcaacaggaaggtgctctcggagctgtcaatgcacgagccatacagcttcaaggctcttgtcgatgtgtctcggaatgcatttcctggcaacaggcctgttcctgccaaggaggggctagcgagcattctgtaaacgttttcttcccaataattaaacttgatggtttacatctacatctgaaagtgacctgtctgcttgtaacgtgacgaggaggtccgaaattgtcacgggcattgcacgtgttattcctctatttttttcccacctatctaattgcatgctttgtacctcatgcttataagttttctgaagaacgtgttccattcggtcttcaaagcttttagcagaatcaa

SEQ ID NO: 76879 - DNA, 1068 bp, Zea Mays
aaaaatcaaaaatagaaaaagtctcttgcccccgcggccgtgccgagccggcatcccctcccccagcaacgatcgcgacgacccaaaccggcaagggtgaccagcggctggccgccgccgcggcagacgagtcccatgggagacaacaagtctccgctgagcctgagcccgatgggcgggcgcgaccgggaccgggagctcctcatcccggtctccggcggcggctcggcgcccggcgtcgatgacgaggacgctgacagggcctcctccgcctccgcggcgctctcctcctccggccgcgaggctttccataaggtcgtccgcagttgggcttcaaagaagttcatgactggatggtcttggcttcatcacatctgttactttcatatttttgatcggagtctttatgtcatcttgggttggggcatctgtccttagccttggcgagtggattattaagcgcatgccccttgttcgtcatatctacaatgcatcgaagcaaattagtgctgcaatatcaccagatcagaacaaacaggcattcaaggaagcggtcatcataaggcatcctcgtgttggagaatatgcgtttggtttcatcacatcagttattccggtcaagaagatctttactgtgtctatgtcccaacgaaccatctttacattggcgatatcttcatggtgaattcaaaggatgtcataaggccaaacctttccgtgcgtgaaggcatcgaaatcgttgtgtctggtggtatgtcaatgccccagattctgtcaaccctcgacccggagatgatccttggtgacagaaccggaccaagcagaagctgaagctgccacgagccctttgtgtaacttttgtagtggtttgctagtaacattttcatacaggctaccaagagtacggcgaactgaacttggagcacaagtatctctgtattaagggttgagctgtgccttttttttgttttgaaaaagctgctgtgagttatgtgttatacaatagctgttgtgagttgtgaaaggaaaaaaaatcatttggtggaacaactgtgtcttctagaaaag

SEQ ID NO: 76880 - DNA, 1112 bp, Zea Mays
aaaaatcaaaaatagaaaaagtctcttgcccccgcggccgtgccgagccggcatcccctcccccagcaacgatcgcgacgacccaaaccggcaagggtgaccagcggctggccgccgccgcggcagacgagtcccatgggagacaacaagtctccgctgagcctgagcccgatgggcgggcgcgaccgggaccgggagctcctcatcccggtctccggcggcggctcggcgcccggcgtcgatgacgaggacgctgacagggcctcctccgcctccgcggcgctctcctcctccggccgcgaggctttccataaggtcgtccgcagttgggcttcaaagaagttcatgactggatgtgtaattctcttccccatagcaataacgttctacatcacctggtggttcattcattttgttgatggattcttctctccaatatatgcacaactaggaatcaacatatttgccttggcgagtggattattaagcgcatgccccttgttcgtcatatctacaatgcatcgaagcaaattagtgctgcaatatcaccagatcagaacaaacaggcattcaaggaagcggtcatcataaggcatcctcgtgttggagaatatgcgtttggtttcatcacatcgtcagtatctctccagagttattccggtcaagaagatctttactgtgtctatgtcccaacgaaccatctttacattggcgatatcttcatggtgaattcaaaggatgtcataaggccaaacctttccgtgcgtgaaggcatcgaaatcgttgtgtctggtggtatgtcaatgccccagattctgtcaaccctcgacccggagatgatccttggtgacagaaccggaccaagcagaagctgaagctgccacgagccctttgtgtaacttttgtagtggtttgctagtaacattttcatacaggctaccaagagtacggcgaactgaacttggagcacaagtatctctgtattaagggttgagctgtgccttttttttgttttgaaaaagctgctgtgagttatgtgttatacaatagctgttgtgagttgtgaaaggaaaaaaaatcatttggtggaacaactgtgtcttctagaaaag

SEQ ID NO: 76881 - DNA, 3267 bp, Zea Mays
tgcagattctgtccacaatggcccacgagggtgccatctccaattctccattctttcttcctgtcctgtcctggtgtcctgtcctgtccacctctcctccgactccgatcctctccgccatttccctgcgcttctggaactgttgttctaaacccccaaaccctaacggcctaacctctgcgctgccggcgtcgccaccgccggagctgcggccatgaacgccttccggttcctcggggacatgacccacctcttctcggtcctcgtgctcctcctcaagatctacgccaccaagtcctgctcaggggtgtcgaggaagacgcaggagctgtacatgttggtgttcgtggcgaggtacctcgacctcttcacggactacgtctcgctctacaactcagtgatgaagatggtgttcatcaccagctcggcggcgattgtgtggtgcatgcgccgccacccgcaggtacggaggacttacgacaaggagcaggacaccttccgccacgcggtgctcgtcgccgccgcgttcctgctcgcgctgatgttccacgaccggttcaccttccgagagatatgctgggcattttcgatctatttagaggcagtggcaattctcccacagttagtgttactccagagaagcagaaatgtggataacttaactggacaatatgttttcttccttgggtatggattgtctttcttactcattgtcggcaatttgctattttttctgaacacatatgttgtgttcaaagtctgctatcaagtaaatatgaaacagtttatggcattgaactctgtccaatgttgtagtcttgaaatataccaacatttaatagtcatgcatatcctcaataaatggtactaatcagctttacgaatataagaatttcagacaattgcatatagtgaaattaatatctgattggtgctatggaaatatagtaatgtatgatcttgaaagccaaatatgcctctaacatgatacccaggaactcacacagacaagatcacacatagcacaatgcttttcggtcgctgcaatgacatagccttttctgttctctctctctctctctcatatgtgtgtgagtgtgtgactgtgtgtgtgcgcgcacgacattgtcagcatgggcgtgtggccgtccatgcgggtgggtgggtaggtgaggtacaatcatgactgtgacatcctcctaattaatgcaaaattttacccaaataaacaccctattactcctattactccatgctgaaatttagttaaagtaaatgctatgaacgtagacactagcatgcttctagacacataggattacttgcaacagatcttatgtcagtttatcttaagttgtgattgtagtcttggaatccaaaagtccaaagaaacttaacttttaatcctaggtttctggcttaatttcaggcacatatgcaactatgtttttgtttctttaccatatttggaactacacttggattgtcttttgtagtttattttcattttagtatatctttcctggatcggacaaaatagaagcataacatatcaaatctgcattatgagacaataacaaattctctagaagatcaacttctcttcacacttttcagttctctagctactttgtctctttatagtaacaccatacttattctcagggcctaccgggcattttacattctaaactggatttaccgttatttcacggagggtcatcacagcagatggatcccttggcttgctggtttggtgcaaacagctctgtatgcagatttcttttactattatttcttaagttggaagaacaacgtgaagctcgagttgcctgcttgagcatgcttcgtcgtgccagaaagtgtgcatgctacatgactcaagttttctagaaatttgtttatatgggcatggggagacttggtaatgatgtgagcagttgagttgataccatacccttaatcttgcctgcgaaaattgatatttgtgtttccatggcaaagtcgatacgattcgaaagctaacagatgctgctgcacagaagtagactagttcctttttgtacctcgatacttttgatatggaaaatcacaaacagttcagttgtttaacatgctatttcactttacgtaaacgaaaatgaactgttcttacgagttctctgtaaaacatgtctttgactatcctgatttaatatctagctttttatgtccttgtgctactctggcctagtgtcaactatccgttttttgcgcttctaacaattctgaattatacaatttttgttgttgcaacaattctgaagcatacagtttatccaacttgagaccctttcaaccaaagcgattttcgatattttaaagttttgtcacttgtttatggattctatatactctccaaagaaaacccatatcttgtaatgtacagataaagtggtcatgaaatttgttggagatgtgcttcgctaagttttataacacatgtaaaaatttgcttcattgatttcatatgaattgctagcaatcacattttcaccatctagtacattccaaaaactactgcacttatgttgacatattttctttatcaaactctcgttggcatgctgcggtaagaggtataagtacacaaacttctctttaatttctgttggagccccacgtaatgaaatgtccacatatgagaagctcttgaccaagtatcatcggtctaagtcttttcgacgtgcaagtggtgctttagttttggcttctctcaatgctctctattgtcgtcactatcaagttttcgactgaaacaacataaattttgttctctctagtacatggtggcaaacacaccacaaacacggttgatatgatctcgcaagacttacaaacttcacttggtacaactataaacttcacttggtacaactataatggcatgcacaagtaccaagggttggaggtgactatttatcacttctaatcactaggcaaaatatagagcaagcgttaataaagcgacctaactaacctaaacattttataaaggacctacgttaatcacaagtgatatttgagcatctgagtgtttaaagctataggaatgaagtctcaactatttagtaatatttgtcatctcccacacttctcaaattgtcggttgggtgataaatatacccttaaagtccaaaactagttggaagtaatacgtaattcatgtgtactcacctgacactctagtggaggcatcatataggttggtgcattgccgacctttgg

SEQ ID NO: 76882 - DNA, 1761 bp, Zea Mays
atggagggagctggaagagatgccaaccctttgggcggttaccgaattggcaaaaccctaggaatcgggtcgttcggtaaagtgaagatcgcggaacatatattgactggccataaggtggcaatcaagatcctcaatcgccgtaagatcagaagcatggaaatggaagagaaagtgaagagagaaatcaagatactgagattatttatgcatcctcatatcatacgcctttatgaggtgatagatacacctgctgatatttatgttgttatggagtatgttaaatctggagagttgtttgattacattgttgagaagggaagactacatgaagaagaagcccggcgcttttttcagcagatcatatctggtgttgaatattgccataggaacatggttgctcaccgtgatttaaagccagagaatcttcttttggattcgaaatgcaacattaagattgctgattttggcttaagtaatgttatgcgtgatggtcactttcttaagacgagttgtggtagcccgaattatgcagcacctgaggtcatatctggtaaactatatgctggtcctgaagttgatgtctggagctgcggcgttattctttatgctcttctttgtggcactcttccatttgacgatgagaatattccaaacctttttaagaaaataaagggtggaatatatacccttcctagtcatttgtcaccttcagcgagggacttgattcctagaatgctggttgttgatccgatgaaaaggattacaatacgtgaaatccgtgaacatatgtggttcaaaattcaacttccgcgctatttggctgtaccgcctccagacactgcccaacaagttaagaagctggacgaggaaacccttaatgatgttattaagatgggttttgacaagaatcagctaattgaatctctgcacaacagattgcagaatgaggcaacagttgcctattatttactcatggacaataggcttcgtacaaccagtggttatcttggatctgagtttcaagaatctatggacccatctttctctcaagtacatgctgaaacaccaacttcagcaactgaacatcggcagcatgtgtttacagaatctccggggtctggtttgaggcagcattttgcatctgaaaggaaatgggcccttggtcttcagctggacgtcagcgaactgaggcctgagaagcacggcaataataatcctgtgcgacggagcgagccgctagctggacgtcagctatggtgtcaccgcgcggaaggggggcatgcaaggggcggggttgacctcggcgtcaggttgttgctgaatgtttctgggggttcctatcattgcttcttctagactagatgagcatggacttgtggtgtggtggcatgggcatgcaacatgcatgcaggatcaggccaggctaccagggtttttttttgatctatctgcacgagctgatatattagtgtacccagtttcttcttctagattgttcaacttgtgcttaccctgccgcgtccgcgtgtctaccaacctgcgacttgtaccggtaatcgatctagaagggcggcgagtgtcatggcgtcgtatgaacccctctggggaatggttcaactcgtgacgcaaagactggctgttctcacttctcagttctcacactaaatatacacatgcatgtgatggaccgactgatgggcagtaactgtaataatctgatgtcatgggagaagctgcaaatggttactagaacgaaag

SEQ ID NO: 76883 - DNA, 2020 bp, Zea Mays
ggtacacgatggagggagctggaagagatgccaaccctttgggcggttaccgaattggcaaaaccctaggaatcgggtcgttcggtaaagtgaagatcgcggaacatatattgactggccataaggtggcaatcaagatcctcaatcgccgtaagatcagaagcatggaaatggaagagaaagtgaagagagaaatcaagatactgagattatttatgcatcctcatatcatacgcctttatgaggtgatagatacacctgctgatatttatgttgttatggagtatgttaaatctggagagttgtttgattacattgttgagaagggaagactacatgaagaagaagcccggcgcttttttcagcagatcatatctggtgttgaatattgccataggaacatggttgctcaccgtgatttaaagccagagaatcttcttttggattcgaaatgcaacattaagattgctgattttggcttaagtaatgttatgcgtgatggtcactttcttaagacgagttgtggtagcccgaattatgcagcacctgaggtcatatctggtaaactatatgctggtcctgaagttgatgtctggagctgcggcgttattctttatgctcttctttgtggcactcttccatttgacgatgagaatattccaaacctttttaagaaaataaagggtggaatatatacccttcctagtcatttgtcaccttcagcgagggacttgattcctagaatgctggttgttgatccgatgaaaaggattacaatacgtgaaatccgtgaacatatgtggttcaaaattcaacttccgcgctatttggctgtaccgcctccagacactgcccaacaagttaagaagctggacgaggaaacccttaatgatgttattaagatgggttttgacaagaatcagctaattgaatctctgcacaacagattgcagaatgaggcaacagttgcctattatttactcatggacaataggcttcgtacaaccagtggttatcttggatctgagtttcaagaatctatggacccatctttctctcaagtacatgctgaaacaccaacttcagcaactgaacatcggcagcatgtgtttacagaatctccggggtctggtttgaggcagcattttgcatctgaaaggaaatgggcccttggtcttcagctttacaaaacgagggatgagaagtaccttcttgacctgcaaagggtcagtggaccacaactcctctttctggacttgtgttccgcctttctaacgcagctgagagttctttgagcctgatgacatgattggcttcccaagcacaatccttgatgcaccccatggactttcaaattacattcgtgctgtacataatggccatatataatcctccggtagattatattttctggagcatgtggaccgtacagctggacgtcagcgaactgaggcctgagaagcacggcaataataatcctgtgcgacggagcgagccgctagctggacgtcagctatggtgtcaccgcgcggaaggggggcatgcaaggggcggggttgacctcggcgtcaggttgttgctgaatgtttctgggggttcctatcattgcttcttctagactagatgagcatggacttgtggtgtggtggcatgggcatgcaacatgcatgcaggatcaggccaggctaccagggtttttttttgatctatctgcacgagctgatatattagtgtacccagtttcttcttctagattgttcaacttgtgcttaccctgccgcgtccgcgtgtctaccaacctgcgacttgtaccggtaatcgatctagaagggcggcgagtgtcatggcgtcgtatgaacccctctggggaatggttcaactcgtgacgcaaagactggctgttctcacttctcagttctcacactaaatatacacatgcatgtgatggaccgactgatgggcagtaactgtaataatctgatgtcatgggagaagctgcaaatggttactagaacgaaag

SEQ ID NO: 76884 - DNA, 2019 bp, Zea Mays
ttttctacagcccaaggccaaccggggtacacgatggagggagctggaagagatgccaaccctttgggcggttaccgaattggcaaaaccctaggaatcgggtcgttcggtaaagtgaagatcgcggaacatatattgactggccataaggtggcaatcaagatcctcaatcgccgtaagatcagaagcatggaaatggaagagaaagtgaagagagaaatcaagatactgagattatttatgcatcctcatatcatacgcctttatgaggtgatagatacacctgctgatatttatgttgttatggagtatgttaaatctggagagttgtttgattacattgttgagaagggaagactacatgaagaagaagcccggcgcttttttcagcagatcatatctggtgttgaatattgccataggaacatggttgctcaccgtgatttaaagccagagaatcttcttttggattcgaaatgcaacattaagattgctgattttggcttaagtaatgttatgcgtgatggtcactttcttaagacgagttgtggtagcccgaattatgcagcacctgaggtcatatctggtaaactatatgctggtcctgaagttgatgtctggagctgcggcgttattctttatgctcttctttgtggcactcttccatttgacgatgagaatattccaaacctttttaagaaaataaagggtggaatatatacccttcctagtcatttgtcaccttcagcgagggacttgattcctagaatgctggttgttgatccgatgaaaaggattacaatacgtgaaatccgtgaacatatgtggttcaaaattcaacttccgcgctatttggctgtaccgcctccagacactgcccaacaagttaagaagctggacgaggaaacccttaatgatgttattaagatgggttttgacaagaatcagctaattgaatctctgcacaacagattgcagaatgaggcaacagttgcctattatttactcatggacaataggcttcgtacaaccagtggttatcttggatctgagtttcaagaatctatggacccatctttctctcaagtacatgctgaaacaccaacttcagcaactgaacatcggcagcatgtgtttacagaatctccggggtctggtttgaggcagcattttgcatctgaaaggaaatgggcccttggtcttcagtctcgagcacatccacgagaaataataagtgaagtgcttaaagcactgcaagaactgaatgtttactggaaaaagattggacactacaacatgaaatgcagatggagtcctggctgccttgagagtatgatgcataactgtgatggctttagtgcagagtctgctataattgaaactgatgatctcatagcgaaatcaacccgtatagtgaagtttgagattcagctggacgtcagcgaactgaggcctgagaagcacggcaataataatcctgtgcgacggagcgagccgctagctggacgtcagctatggtgtcaccgcgcggaaggggggcatgcaaggggcggggttgacctcggcgtcaggttgttgctgaatgtttctgggggttcctatcattgcttcttctagactagatgagcatggacttgtggtgtggtggcatgggcatgcaacatgcatgcaggatcaggccaggctaccagggtttttttttgatctatctgcacgagctgatatattagtgtacccagtttcttcttctagattgttcaacttgtgcttaccctgccgcgtccgcgtgtctaccaacctgcgacttgtaccggtaatcgatctagaagggcggcgagtgtcatggcgtcgtatgaacccctctggggaatggttcaactcgtgacgcaaagactggctgttctcacttctcagttctcacactaaatatacacatgcatgtgatggaccgactgatgggcagtaactgtaataatctgatgtcatgggagaagctgcaaatggttactagaacgaaag

SEQ ID NO: 76885 - DNA, 2271 bp, Zea Mays
gttttctacagcccaaggccaaccggggtacacgatggagggagctggaagagatgccaaccctttgggcggttaccgaattggcaaaaccctaggaatcgggtcgttcggtaaagtgaagatcgcggaacatatattgactggccataaggtggcaatcaagatcctcaatcgccgtaagatcagaagcatggaaatggaagagaaagtgaagagagaaatcaagatactgagattatttatgcatcctcatatcatacgcctttatgaggtgatagatacacctgctgatatttatgttgttatggagtatgttaaatctggagagttgtttgattacattgttgagaagggaagactacatgaagaagaagcccggcgcttttttcagcagatcatatctggtgttgaatattgccataggaacatggttgctcaccgtgatttaaagccagagaatcttcttttggattcgaaatgcaacattaagattgctgattttggcttaagtaatgttatgcgtgatggtcactttcttaagacgagttgtggtagcccgaattatgcagcacctgaggtcatatctggtaaactatatgctggtcctgaagttgatgtctggagctgcggcgttattctttatgctcttctttgtggcactcttccatttgacgatgagaatattccaaacctttttaagaaaataaagggtggaatatatacccttcctagtcatttgtcaccttcagcgagggacttgattcctagaatgctggttgttgatccgatgaaaaggattacaatacgtgaaatccgtgaacatatgtggttcaaaattcaacttccgcgctatttggctgtaccgcctccagacactgcccaacaagttaagaagctggacgaggaaacccttaatgatgttattaagatgggttttgacaagaatcagctaattgaatctctgcacaacagattgcagaatgaggcaacagttgcctattatttactcatggacaataggcttcgtacaaccagtggttatcttggatctgagtttcaagaatctatggacccatctttctctcaagtacatgctgaaacaccaacttcagcaactgaacatcggcagcatgtgtttacagaatctccggggtctggtttgaggcagcattttgcatctgaaaggaaatgggcccttggtcttcagtctcgagcacatccacgagaaataataagtgaagtgcttaaagcactgcaagaactgaatgtttactggaaaaagattggacactacaacatgaaatgcagatggagtcctggctgccttgagagtatgatgcataactgtgatggctttagtgcagagtctgctataattgaaactgatgatctcatagcgaaatcaacccgtatagtgaagtttgagattcagctttacaaaacgagggatgagaagtaccttcttgacctgcaaagggtcagtggaccacaactcctctttctggacttgtgttccgcctttctaacgcagctgagagttctttgagcctgatgacatgattggcttcccaagcacaatccttgatgcaccccatggactttcaaattacattcgtgctgtacataatggccatatataatcctccggtagattatattttctggagcatgtggaccgtacagctggacgtcagcgaactgaggcctgagaagcacggcaataataatcctgtgcgacggagcgagccgctagctggacgtcagctatggtgtcaccgcgcggaaggggggcatgcaaggggcggggttgacctcggcgtcaggttgttgctgaatgtttctgggggttcctatcattgcttcttctagactagatgagcatggacttgtggtgtggtggcatgggcatgcaacatgcatgcaggatcaggccaggctaccagggtttttttttgatctatctgcacgagctgatatattagtgtacccagtttcttcttctagattgttcaacttgtgcttaccctgccgcgtccgcgtgtctaccaacctgcgacttgtaccggtaatcgatctagaagggcggcgagtgtcatggcgtcgtatgaacccctctggggaatggttcaactcgtgacgcaaagactggctgttctcacttctcagttctcacactaaatatacacatgcatgtgatggaccgactgatgggcagtaactgtaataatctgatgtcatgggagaagctgcaaatggttactagaacgaaag

SEQ ID NO: 76886 - DNA, 1818 bp, Zea Mays
atggagggagctggaagagatgccaaccctttgggcggttaccgaattggcaaaaccctaggaatcgggtcgttcggtaaagtgaagatcgcggaacatatattgactggccataaggtggcaatcaagatcctcaatcgccgtaagatcagaagcatggaaatggaagagaaagtgaagagagaaatcaagatactgagattatttatgcatcctcatatcatacgcctttatgaggtgatagatacacctgctgatatttatgttgttatggagtatgttaaatctggagagttgtttgattacattgttgagaagggaagactacatgaagaagaagcccggcgcttttttcagcagatcatatctggtgttgaatattgccataggaacatggttgctcaccgtgatttaaagccagagaatcttcttttggattcgaaatgcaacattaagattgctgattttggcttaagtaatgttatgcgtgatggtcactttcttaagacgagttgtggtagcccgaattatgcagcacctgaggtcatatctggtaaactatatgctggtcctgaagttgatgtctggagctgcggcgttattctttatgctcttctttgtggcactcttccatttgacgatgagaatattccaaacctttttaagaaaataaagggtggaatatatacccttcctagtcatttgtcaccttcagcgagggacttgattcctagaatgctggttgttgatccgatgaaaaggattacaatacgtgaaatccgtgaacatatgtggttcaaaattcaacttccgcgctatttggctgtaccgcctccagacactgcccaacaagttaagaagctggacgaggaaacccttaatgatgttattaagatgggttttgacaagaatcagctaattgaatctctgcacaacagattgcagaatgaggcttcgtacaaccagtggttatcttggatctgagtttcaagaatctatggacccatctttctctcaagtacatgctgaaacaccaacttcagcaactgaacatcggcagcatgtgtttacagaatctccggggtctggtttgaggcagcattttgcatctgaaaggaaatgggcccttggtcttcagtctcgagcacatccacgagaaataataagtgaagtgcttaaagcactgcaagaactgaatgtttactggaaaaagattggacactacaacatgaaatgcagatggagtcctggctgccttgagagtatgatgcataactgtgatggctttagtgcagagtctgctataattgaaactgatgatctcatagcgaaatcaacccgtatagtgaagtttgagattcagctttacaaaacgagggatgagaagtaccttcttgacctgcaaagggtcagtggaccacaactcctctttctggacttgtgttccgcctttctaacgcagctgagagttctttgagcctgatgacatgattggcttcccaagcacaatccttgatgcaccccatggactttcaaattacattcgtgctgtacataatggccatatataatcctccggtagattatattttctggagcatgtggaccgtacaggtatgtcctggttgccgagatgattgtcacctaaggtcctaaacaagaggccacatgcgagccccaggccttcttcctcaattagattatgcgagttttgttcggcctttctttagtccttggacatgtttttttctttgccttgtttggttgtgtttggatcaaaggagattgagagctggtttgatgaccagggaaatggag

SEQ ID NO: 76887 - DNA, 1887 bp, Zea Mays
gttttctacagcccaaggccaaccggggtacacgatggagggagctggaagagatgccaaccctttgggcggttaccgaattggcaaaaccctaggaatcgggtcgttcggtaaagtgaagatcgcggaacatatattgactggccataaggtggcaatcaagatcctcaatcgccgtaagatcagaagcatggaaatggaagagaaagtgaagagagaaatcaagatactgagattatttatgcatcctcatatcatacgcctttatgaggtgatagatacacctgctgatatttatgttgttatggagtatgttaaatctggagagttgtttgattacattgttgagaagggaagactacatgaagaagaagcccggcgcttttttcagcagatcatatctggtgttgaatattgccataggaacatggttgctcaccgtgatttaaagccagagaatcttcttttggattcgaaatgcaacattaagattgctgattttggcttaagtaatgttatgcgtgatggtcactttcttaagacgagttgtggtagcccgaattatgcagcacctgaggtcatatctggtaaactatatgctggtcctgaagttgatgtctggagctgcggcgttattctttatgctcttctttgtggcactcttccatttgacgatgagaatattccaaacctttttaagaaaataaagggtggaatatatacccttcctagtcatttgtcaccttcagcgagggacttgattcctagaatgctggttgttgatccgatgaaaaggattacaatacgtgaaatccgtgaacatatgtggttcaaaattcaacttccgcgctatttggctgtaccgcctccagacactgcccaacaagttaagaagctggacgaggaaacccttaatgatgttattaagatgggttttgacaagaatcagctaattgaatctctgcacaacagattgcagaatgaggcaacagttgcctattatttactcatggacaataggcttcgtacaaccagtggttatcttggatctgagtttcaagaatctatggacccatctttctctcaagtacatgctgaaacaccaacttcagcaactgaacatcggcagcatgtgtttacagaatctccggggtctggtttgaggcagcattttgcatctgaaaggaaatgggcccttggtcttcagtctcgagcacatccacgagaaataataagtgaagtgcttaaagcactgcaagaactgaatgtttactggaaaaagattggacactacaacatgaaatgcagatggagtcctggctgccttgagagtatgatgcataactgtgatggctttagtgcagagtctgctataattgaaactgatgatctcatagcgaaatcaacccgtatagtgaagtttgagattcagctttacaaaacgagggatgagaagtaccttcttgacctgcaaagggtcagtggaccacaactcctctttctggacttgtgttccgcctttctaacgcagctgagagttctttgagcctgatgacatgattggcttcccaagcacaatccttgatgcaccccatggactttcaaattacattcgtgctgtacataatggccatatataatcctccggtagattatattttctggagcatgtggaccgtacaggtatgtcctggttgccgagatgattgtcacctaaggtcctaaacaagaggccacatgcgagccccaggccttcttcctcaattagattatgcgagttttgttcggcctttctttagtccttggacatgtttttttctttgccttgtttggttgtgtttggatcaaaggagattgagagctggtttgatgaccagggaaatggag

SEQ ID NO: 76888 - DNA, 791 bp, Zea Mays
ccgctgcgcacagtctgactttaagatagggaaagattagaaggaacggatcgagtaggcagcttagctgtttgcttagactttatagagacaaaacactcccactgtcccacaccctcagtccacagactcgcactgcactcgtccaatccagggaggctgggaaggatcagggatcccatccaccgttctgtcttctcaggtcgacaggaggccagaccaggtgcgcgcgtccgtgtcggcgatgagcgcgggcggggagccgggcgcggcagaacgcgatgcgctcaggggtggtggtgctgggcgccgtggccttcggctacctctccttccgcgtcggcttcaagccctacctcgaccaggctcaggaggccatcgactccgcccgcgaccccgaccctgaccccgccaccaccgccgcgagggacgcgtccgacgatcccggcgccggtcgcccagggggagacctcgggccgtccaaggacccggccgtcgtactgcgcgactgaggcccggtgcgggcgtttggttgcgccattttggcaaacaccttgtacgcgggcccttgcttcgactgttttggtagtatgggccaccctgtgtgagatcttcttccctgctgctttgaagtttgaactggtttctgtgtgatgcccacataaagcttcctgttcgatccgtcgttatgcacttcgaagaaatcgattcgagcgttggatggtccgaggaaacgacggtgctgtaacttgtagatagactctgtcacagtgtcgtaggggatgaacaat

SEQ ID NO: 76889 - DNA, 2839 bp, Zea Mays
cctcccctggataaaagcaatcctcccgcagaagcagaacgattccggaaagtgtctcgaatcttccaaattctttcccgagacctaaaattctctcgacggattcgcctgatctgacacgcgatctctcggctcgccccaatggccgacaaggagaagttggagtctgaagaggagtacgagagcgacctcgacgacgcacccctctccgcgttgcggcgccgggacgctgcgagcgatgacgaggacgaggatgaggacggagggatgcccttgaggcggaggaaggctggatccgacgcagattccgacgggcagggcgccgccgaggtgtacgacgaggatggcgcgtacgaagaaagcgaggagtacgaggaatacgagtacggggggttcaaagcagggggcggcggagtgcgcggggtggctgtcgaggcggttgccggtgcgggccatgaggaaggcgaggcgggggatggggaagctgaaaaggcgggtgaggcagcgccaggaggcgaagaggaggacaagaaggggaacgaaccctactccgttccgacgaccggcgccttctacatgcacgacgaccgcttccaggagggccgggggcgggggcgggggcgccaaaggagaatggtgaacagtagaaggttatggagtcctaaagatgagcaagcctgggttcatgacagatttgatgagatggacctgcatgattttcatggtgacaatccaaaaagaaagcagggaggtgtctttagaggacgtggtggtggacaaggtggtagaactcgtggtattagccgtggtaacttcagaggcagcagaactcgaacatactatcatgatggtagcaagaactacagctatgttccaaaggaatctcatgcataccgtgataacaccaagaatgcccatcattcttcacacattaatggaaagaatagagttccaaaaccatctcgtgaccactatgatggtgctaaaagttatgacattgtcccaaatgaatctcacatttaccatggtgatgctaagagccaaaaaaatgcaccaagagtagttcgagggagaggctccaagcgttaccaaccacgcttgaaaagcacctctgatgtatcttcagtgcaaaataccaaatctcagagtcttgaaggcacttcgtcaaatgcaaacttggtaaaagatgaagctcaaggaccaaattcacgacttgagcaagtccttcctattaagcagactgttgcatcaaacttgaattcagcttcgccaccattttatcctgcgaggtcatccagtcaagagtttgcagttggtcaaggagagaatacacaagaacttagtactaacctagtaagaggaaaggcttttgtgccatcggggcatgttgaagctgctataaatggcatgaatagacctgcactgcttccacctgcatcgtcatcaaatggtccatttcctgtagccactaatcaagtcaatagagattatggccatcctgcacatccaattgttcaacaaaacccagttcaaccccctacacgatctgcacccaggatgcctgcccagatgtttggtgcaacattcagcaatgttaaaggacaacctgatgaccaaggagaagagcgagcttcgtttctctatggtggggctcgtgttcttggggctacaagcgcaatgggaatcacacttggtgatcaaaattttcatggtaccccagcattgctgccagttatgcagtttggaggtcagcgaccagttggacgtggtgttccttcaattggtatggctctgccaggatttgtgtctcaacagcaacttggtatcaataattctgagatgacttggctaccaatattgactggtgcctctggagctctaggagcaccttatggttcaccttatatagccgtcgatggaagttattactctcgaccgcctgaacaaccatcttcatcagtttctaatagagaatctagtgcaaataatgcttcttctctgaagtcccaagaaattacagaggttgcaggcgacgcaagaactcaacaccaaaataaacctcgtcgatactcggagatgaactttggccagtgaacatagtgatgatagtaaatcagtgagggttcattggagctttggatccaagtaagacttgtgcaagagaccctggccttaccaagtgcttccagcatttcactgtctgatgtctagcactatcttgtgacccaaacgaggtttgacaggaggtgttcaaaccatcgctgtggtcatttgctgtgattattctgacgggctggtgttgttacaatcattaggtgagattttctggtactctacgtcaccacaataccagacggtcggtccgtaagtgtgaaggtcttgatggaaatcgtgaggacggaggtctcggtcgtactgcaaagctcgtgtccccgctgtacagtgtacatcacgtctctgactgtgtttgggtgtgcgctgcctctgcctacgaactcttcggtggttgtcgcatttttgaactgacaaataaaaaagaacgtgttgagcaccaaattgagaagggcggacggtccagcccggtccggacagtccgcgcctgtgggctgcacggtctgcgcaagcgcagaacagattagggttccaagttttgtgctacagttgttagctagattcgcaggattcgcttggaaattagtttgtaaatggttcagtccccctcctctataaataaagaggtatacggtcgatttgtaataatcaatcgaatcaataaaacttctatctcgcatttattttctgtgcaattaggagtggttctagtctatttctagtttag

SEQ ID NO: 76890 - DNA, 2836 bp, Zea Mays
cctcccctggataaaagcaatcctcccgcagaagcagaacgattccggaaagtgtctcgaatcttccaaattctttcccgagacctaaaattctctcgacggattcgcctgatctgacacgcgatctctcggctcgccccaatggccgacaaggagaagttggagtctgaagaggagtacgagagcgacctcgacgacgcacccctctccgcgttgcggcgccgggacgctgcgagcgatgacgaggacgaggatgaggacggagggatgcccttgaggcggaggaaggctggatccgacgcagattccgacgggcagggcgccgccgaggtgtacgacgaggatggcgcgtacgaagaaagcgaggagtacgaggaatacgagtacggggggttcaaagcagggggcggcggagtgcgcggggtggctgtcgaggcggttgccggtgcgggccatgaggaaggcgaggcgggggatggggaagctgaaaaggcgggtgaggcagcgccaggaggcgaagaggaggacaagaaggggaacgaaccctactccgttccgacgaccggcgccttctacatgcacgacgaccgcttccaggagggccgggggcgggggcgggggcgccaaagaatggtgaacagtagaaggttatggagtcctaaagatgagcaagcctgggttcatgacagatttgatgagatggacctgcatgattttcatggtgacaatccaaaaagaaagcagggaggtgtctttagaggacgtggtggtggacaaggtggtagaactcgtggtattagccgtggtaacttcagaggcagcagaactcgaacatactatcatgatggtagcaagaactacagctatgttccaaaggaatctcatgcataccgtgataacaccaagaatgcccatcattcttcacacattaatggaaagaatagagttccaaaaccatctcgtgaccactatgatggtgctaaaagttatgacattgtcccaaatgaatctcacatttaccatggtgatgctaagagccaaaaaaatgcaccaagagtagttcgagggagaggctccaagcgttaccaaccacgcttgaaaagcacctctgatgtatcttcagtgcaaaataccaaatctcagagtcttgaaggcacttcgtcaaatgcaaacttggtaaaagatgaagctcaaggaccaaattcacgacttgagcaagtccttcctattaagcagactgttgcatcaaacttgaattcagcttcgccaccattttatcctgcgaggtcatccagtcaagagtttgcagttggtcaaggagagaatacacaagaacttagtactaacctagtaagaggaaaggcttttgtgccatcggggcatgttgaagctgctataaatggcatgaatagacctgcactgcttccacctgcatcgtcatcaaatggtccatttcctgtagccactaatcaagtcaatagagattatggccatcctgcacatccaattgttcaacaaaacccagttcaaccccctacacgatctgcacccaggatgcctgcccagatgtttggtgcaacattcagcaatgttaaaggacaacctgatgaccaaggagaagagcgagcttcgtttctctatggtggggctcgtgttcttggggctacaagcgcaatgggaatcacacttggtgatcaaaattttcatggtaccccagcattgctgccagttatgcagtttggaggtcagcgaccagttggacgtggtgttccttcaattggtatggctctgccaggatttgtgtctcaacagcaacttggtatcaataattctgagatgacttggctaccaatattgactggtgcctctggagctctaggagcaccttatggttcaccttatatagccgtcgatggaagttattactctcgaccgcctgaacaaccatcttcatcagtttctaatagagaatctagtgcaaataatgcttcttctctgaagtcccaagaaattacagaggttgcaggcgacgcaagaactcaacaccaaaataaacctcgtcgatactcggagatgaactttggccagtgaacatagtgatgatagtaaatcagtgagggttcattggagctttggatccaagtaagacttgtgcaagagaccctggccttaccaagtgcttccagcatttcactgtctgatgtctagcactatcttgtgacccaaacgaggtttgacaggaggtgttcaaaccatcgctgtggtcatttgctgtgattattctgacgggctggtgttgttacaatcattaggtgagattttctggtactctacgtcaccacaataccagacggtcggtccgtaagtgtgaaggtcttgatggaaatcgtgaggacggaggtctcggtcgtactgcaaagctcgtgtccccgctgtacagtgtacatcacgtctctgactgtgtttgggtgtgcgctgcctctgcctacgaactcttcggtggttgtcgcatttttgaactgacaaataaaaaagaacgtgttgagcaccaaattgagaagggcggacggtccagcccggtccggacagtccgcgcctgtgggctgcacggtctgcgcaagcgcagaacagattagggttccaagttttgtgctacagttgttagctagattcgcaggattcgcttggaaattagtttgtaaatggttcagtccccctcctctataaataaagaggtatacggtcgatttgtaataatcaatcgaatcaataaaacttctatctcgcatttattttctgtgcaattaggagtggttctagtctatttctagtttag

SEQ ID NO: 76891 - DNA, 3313 bp, Zea Mays
cctcccctggataaaagcaatcctcccgcagaagcagaacgattccggaaagtgtctcgaatcttccaaattctttcccgagacctaaaattctctcgacggattcgcctgatctgacacgcgatctctcggctcgccccaatggccgacaaggagaagttggagtctgaagaggagtacgagagcgacctcgacgacgcacccctctccgcgttgcggcgccgggacgctgcgagcgatgacgaggacgaggatgaggacggagggatgcccttgaggcggaggaaggctggatccgacgcagattccgacgggcagggcgccgccgaggtgtacgacgaggatggcgcgtacgaagaaagcgaggagtacgaggaatacgagtacggggggttcaaagcagggggcggcggagtgcgcggggtggctgtcgaggcggttgccggtgcgggccatgaggaaggcgaggcgggggatggggaagctgaaaaggcgggtgaggcagcgccaggaggcgaagaggaggacaagaaggggaacgaaccctactccgttccgacgaccggcgccttctacatgcacgacgaccgcttccaggagggccgggggcgggggcgggggcgccaaagaatggtgaacagtagaaggttatggagtcctaaagatgagcaagcctgggttcatgacagatttgatgagatggacctgcatgattttcatggtgacaatccaaaaagaaagcagggaggtgtctttagaggacgtggtggtggacaaggtggtagaactcgtggtattagccgtggtaacttcagaggcagcagaactcgaacatactatcatgatggtagcaagaactacagctatgttccaaaggaatctcatgcataccgtgataacaccaagaatgcccatcattcttcacacattaatggaaagaatagagttccaaaaccatctcgtgaccactatgatggtgctaaaagttatgacattgtcccaaatgaatctcacatttaccatggtgatgctaagagccaaaaaaatgcaccaagagtagttcgagggagaggctccaagcgttaccaaccacgcttgaaaagcacctctgatgtatcttcagtgcaaaataccaaatctcagagtcttgaaggcacttcgtcaaatgcaaacttggtaaaagatgaagctcaaggaccaaattcacgacttgagcaagtccttcctattaagcagactgttgcatcaaacttgaattcagcttcgccaccattttatcctgcgaggtcatccagtcaagagtttgcagttggtcaaggagagaatacacaagaacttagtactaacctagtaagaggaaaggcttttgtgccatcggggcatgttgaagctgctataaatggcatgaatagacctgcactgcttccacctgcatcgtcatcaaatggtccatttcctgtagccactaatcaagtcaatagagattatggccatcctgcacatccaattgttcaacaaaacccagttcaaccccctacacgatctgcacccaggatgcctgcccagatgtttggtgcaacattcagcaatggcagtaaaatatcacctgcacaacctacatcaactattttagatgatgacgctgaaatttcttcacctagtggatcaaacaaatatgattctcggttaacagttaaaggacaacctgatgaccaaggagaagagcgagcttcgtttctctatggtggggctcgtgttcttggggctacaagcgcaatgggaatcacacttggtgatcaaaattttcatggtaccccagcattgctgccaggtttgtatcatggctcagtaaaacatgagttcaataacatgctctgtgaagcgtatcaaagaaataaactactttgaagcttaccataaactagtgaaggtaactgcacagactttccaactcaggaagctacacttttttttaaaaaaaactttacctccatattttaggtggctgttatttttttttaaaatgggttcaattccatactgtcatgttgcattcaaggttaccagtatcttggtaaatgcgcactattatttatagtgtggatgcaccattatatacacattcagttactttttatctcctcttcatacttgccttagcatgtatatgctttaaatttaatcgtcaactttttttttggtgcagttatgcagtttggaggtcagcgaccagttggacgtggtgttccttcaattggtatggctctgccaggatttgtgtctcaacagcaacttggtatcaataattctgagatgacttggctaccaatattgactggtgcctctggagctctaggagcaccttatggttcaccttatatagccgtcgatggaagttattactctcgaccgcctgaacaaccatcttcatcagtttctaatagagaatctagtgcaaataatgcttcttctctgaagtcccaagaaattacagaggttgcaggcgacgcaagaactcaacaccaaaataaacctcgtcgatactcggagatgaactttggccagtgaacatagtgatgatagtaaatcagtgagggttcattggagctttggatccaagtaagacttgtgcaagagaccctggccttaccaagtgcttccagcatttcactgtctgatgtctagcactatcttgtgacccaaacgaggtttgacaggaggtgttcaaaccatcgctgtggtcatttgctgtgattattctgacgggctggtgttgttacaatcattaggtgagattttctggtactctacgtcaccacaataccagacggtcggtccgtaagtgtgaaggtcttgatggaaatcgtgaggacggaggtctcggtcgtactgcaaagctcgtgtccccgctgtacagtgtacatcacgtctctgactgtgtttgggtgtgcgctgcctctgcctacgaactcttcggtggttgtcgcatttttgaactgacaaataaaaaagaacgtgttgagcaccaaattgagaagggcggacggtccagcccggtccggacagtccgcgcctgtgggctgcacggtctgcgcaagcgcagaacagattagggttccaagttttgtgctacagttgttagctagattcgcaggattcgcttggaaattagtttgtaaatggttcagtccccctcctctataaataaagaggtatacggtcgatttgtaataatcaatcgaatcaataaaacttctatctcgcatttattttctgtgcaattaggagtggttctagtctatttctagtttag

SEQ ID NO: 76892 - DNA, 3037 bp, Zea Mays
cctcccctggataaaagcaatcctcccgcagaagcagaacgattccggaaagtgtctcgaatcttccaaattctttcccgagacctaaaattctctcgacggattcgcctgatctgacacgcgatctctcggctcgccccaatggccgacaaggagaagttggagtctgaagaggagtacgagagcgacctcgacgacgcacccctctccgcgttgcggcgccgggacgctgcgagcgatgacgaggacgaggatgaggacggagggatgcccttgaggcggaggaaggctggatccgacgcagattccgacgggcagggcgccgccgaggtgtacgacgaggatggcgcgtacgaagaaagcgaggagtacgaggaatacgagtacggggggttcaaagcagggggcggcggagtgcgcggggtggctgtcgaggcggttgccggtgcgggccatgaggaaggcgaggcgggggatggggaagctgaaaaggcgggtgaggcagcgccaggaggcgaagaggaggacaagaaggggaacgaaccctactccgttccgacgaccggcgccttctacatgcacgacgaccgcttccaggagggccgggggcgggggcgggggcgccaaagaatggtgaacagtagaaggttatggagtcctaaagatgagcaagcctgggttcatgacagatttgatgagatggacctgcatgattttcatggtgacaatccaaaaagaaagcagggaggtgtctttagaggacgtggtggtggacaaggtggtagaactcgtggtattagccgtggtaacttcagaggcagcagaactcgaacatactatcatgatggtagcaagaactacagctatgttccaaaggaatctcatgcataccgtgataacaccaagaatgcccatcattcttcacacattaatggaaagaatagagttccaaaaccatctcgtgaccactatgatggtgctaaaagttatgacattgtcccaaatgaatctcacatttaccatggtgatgctaagagccaaaaaaatgcaccaagagtagttcgagggagaggctccaagcgttaccaaccacgcttgaaaagcacctctgatgtatcttcagtgcaaaataccaaatctcagagtcttgaaggcacttcgtcaaatgcaaacttggtaaaagatgaagctcaaggaccaaattcacgacttgagcaagtccttcctattaagcagactgttgcatcaaacttgaattcagcttcgccaccattttatcctgcgaggtcatccagtcaagagtttgcagttggtcaaggagagaatacacaagaacttagtactaacctagtaagaggaaaggcttttgtgccatcggggcatgttgaagctgctataaatggcatgaatagacctgcactgcttccacctgcatcgtcatcaaatggtccatttcctgtagccactaatcaagtcaatagagattatggccatcctgcacatccaattgttcaacaaaacccagttcaaccccctacacgatctgcacccaggatgcctgcccagatgtttggtgcaacattcagcaatggcagtaaaatatcacctgcacaacctacatcaactattttagatgatgacgctgaaatttcttcacctagtggatcaaacaaatatgattctcggttaacagttaaaggacaacctgatgaccaaggagaagagcgagcttcgtttctctatggtggggctcgtgttcttggggctacaagcgcaatgggaatcacacttggtgatcaaaattttcatggtaccccagcattgctgccaggtttgtatcatggctcagtaaaacatgagttcaataacatgctctgtgaagcgtatcaaagaaataaactactttgaagcttaccataaactagtgaagttatgcagtttggaggtcagcgaccagttggacgtggtgttccttcaattggtatggctctgccaggatttgtgtctcaacagcaacttggtatcaataattctgagatgacttggctaccaatattgactggtgcctctggagctctaggagcaccttatggttcaccttatatagccgtcgatggaagttattactctcgaccgcctgaacaaccatcttcatcagtttctaatagagaatctagtgcaaataatgcttcttctctgaagtcccaagaaattacagaggttgcaggcgacgcaagaactcaacaccaaaataaacctcgtcgatactcggagatgaactttggccagtgaacatagtgatgatagtaaatcagtgagggttcattggagctttggatccaagtaagacttgtgcaagagaccctggccttaccaagtgcttccagcatttcactgtctgatgtctagcactatcttgtgacccaaacgaggtttgacaggaggtgttcaaaccatcgctgtggtcatttgctgtgattattctgacgggctggtgttgttacaatcattaggtgagattttctggtactctacgtcaccacaataccagacggtcggtccgtaagtgtgaaggtcttgatggaaatcgtgaggacggaggtctcggtcgtactgcaaagctcgtgtccccgctgtacagtgtacatcacgtctctgactgtgtttgggtgtgcgctgcctctgcctacgaactcttcggtggttgtcgcatttttgaactgacaaataaaaaagaacgtgttgagcaccaaattgagaagggcggacggtccagcccggtccggacagtccgcgcctgtgggctgcacggtctgcgcaagcgcagaacagattagggttccaagttttgtgctacagttgttagctagattcgcaggattcgcttggaaattagtttgtaaatggttcagtccccctcctctataaataaagaggtatacggtcgatttgtaataatcaatcgaatcaataaaacttctatctcgcatttattttctgtgcaattaggagtggttctagtctatttctagtttag

SEQ ID NO: 76893 - DNA, 3040 bp, Zea Mays
cctcccctggataaaagcaatcctcccgcagaagcagaacgattccggaaagtgtctcgaatcttccaaattctttcccgagacctaaaattctctcgacggattcgcctgatctgacacgcgatctctcggctcgccccaatggccgacaaggagaagttggagtctgaagaggagtacgagagcgacctcgacgacgcacccctctccgcgttgcggcgccgggacgctgcgagcgatgacgaggacgaggatgaggacggagggatgcccttgaggcggaggaaggctggatccgacgcagattccgacgggcagggcgccgccgaggtgtacgacgaggatggcgcgtacgaagaaagcgaggagtacgaggaatacgagtacggggggttcaaagcagggggcggcggagtgcgcggggtggctgtcgaggcggttgccggtgcgggccatgaggaaggcgaggcgggggatggggaagctgaaaaggcgggtgaggcagcgccaggaggcgaagaggaggacaagaaggggaacgaaccctactccgttccgacgaccggcgccttctacatgcacgacgaccgcttccaggagggccgggggcgggggcgggggcgccaaaggagaatggtgaacagtagaaggttatggagtcctaaagatgagcaagcctgggttcatgacagatttgatgagatggacctgcatgattttcatggtgacaatccaaaaagaaagcagggaggtgtctttagaggacgtggtggtggacaaggtggtagaactcgtggtattagccgtggtaacttcagaggcagcagaactcgaacatactatcatgatggtagcaagaactacagctatgttccaaaggaatctcatgcataccgtgataacaccaagaatgcccatcattcttcacacattaatggaaagaatagagttccaaaaccatctcgtgaccactatgatggtgctaaaagttatgacattgtcccaaatgaatctcacatttaccatggtgatgctaagagccaaaaaaatgcaccaagagtagttcgagggagaggctccaagcgttaccaaccacgcttgaaaagcacctctgatgtatcttcagtgcaaaataccaaatctcagagtcttgaaggcacttcgtcaaatgcaaacttggtaaaagatgaagctcaaggaccaaattcacgacttgagcaagtccttcctattaagcagactgttgcatcaaacttgaattcagcttcgccaccattttatcctgcgaggtcatccagtcaagagtttgcagttggtcaaggagagaatacacaagaacttagtactaacctagtaagaggaaaggcttttgtgccatcggggcatgttgaagctgctataaatggcatgaatagacctgcactgcttccacctgcatcgtcatcaaatggtccatttcctgtagccactaatcaagtcaatagagattatggccatcctgcacatccaattgttcaacaaaacccagttcaaccccctacacgatctgcacccaggatgcctgcccagatgtttggtgcaacattcagcaatggcagtaaaatatcacctgcacaacctacatcaactattttagatgatgacgctgaaatttcttcacctagtggatcaaacaaatatgattctcggttaacagttaaaggacaacctgatgaccaaggagaagagcgagcttcgtttctctatggtggggctcgtgttcttggggctacaagcgcaatgggaatcacacttggtgatcaaaattttcatggtaccccagcattgctgccaggtttgtatcatggctcagtaaaacatgagttcaataacatgctctgtgaagcgtatcaaagaaataaactactttgaagcttaccataaactagtgaagttatgcagtttggaggtcagcgaccagttggacgtggtgttccttcaattggtatggctctgccaggatttgtgtctcaacagcaacttggtatcaataattctgagatgacttggctaccaatattgactggtgcctctggagctctaggagcaccttatggttcaccttatatagccgtcgatggaagttattactctcgaccgcctgaacaaccatcttcatcagtttctaatagagaatctagtgcaaataatgcttcttctctgaagtcccaagaaattacagaggttgcaggcgacgcaagaactcaacaccaaaataaacctcgtcgatactcggagatgaactttggccagtgaacatagtgatgatagtaaatcagtgagggttcattggagctttggatccaagtaagacttgtgcaagagaccctggccttaccaagtgcttccagcatttcactgtctgatgtctagcactatcttgtgacccaaacgaggtttgacaggaggtgttcaaaccatcgctgtggtcatttgctgtgattattctgacgggctggtgttgttacaatcattaggtgagattttctggtactctacgtcaccacaataccagacggtcggtccgtaagtgtgaaggtcttgatggaaatcgtgaggacggaggtctcggtcgtactgcaaagctcgtgtccccgctgtacagtgtacatcacgtctctgactgtgtttgggtgtgcgctgcctctgcctacgaactcttcggtggttgtcgcatttttgaactgacaaataaaaaagaacgtgttgagcaccaaattgagaagggcggacggtccagcccggtccggacagtccgcgcctgtgggctgcacggtctgcgcaagcgcagaacagattagggttccaagttttgtgctacagttgttagctagattcgcaggattcgcttggaaattagtttgtaaatggttcagtccccctcctctataaataaagaggtatacggtcgatttgtaataatcaatcgaatcaataaaacttctatctcgcatttattttctgtgcaattaggagtggttctagtctatttctagtttag

SEQ ID NO: 76894 - DNA, 3346 bp, Zea Mays
cctcccctggataaaagcaatcctcccgcagaagcagaacgattccggaaagtgtctcgaatcttccaaattctttcccgagacctaaaattctctcgacggattcgcctgatctgacacgcgatctctcggctcgccccaatggccgacaaggagaagttggagtctgaagaggagtacgagagcgacctcgacgacgcacccctctccgcgttgcggcgccgggacgctgcgagcgatgacgaggacgaggatgaggacggagggatgcccttgaggcggaggaaggctggatccgacgcagattccgacgggcagggcgccgccgaggtgtacgacgaggatggcgcgtacgaagaaagcgaggagtacgaggaatacgagtacggggggttcaaagcagggggcggcggagtgcgcggggtggctgtcgaggcggttgccggtgcgggccatgaggaaggcgaggcgggggatggggaagctgaaaaggcgggtgaggcagcgccaggaggcgaagaggaggacaagaaggggaacgaaccctactccgttccgacgaccggcgccttctacatgcacgacgaccgcttccaggagggccgggggcgggggcgggggcgccaaaggagaatggtgaacagtagaaggttatggagtcctaaagatgagcaagcctgggttcatgacagatttgatgagatggacctgcatgattttcatggtgacaatccaaaaagaaagcagggaggtgtctttagaggacgtggtggtggacaaggtggtagaactcgtggtattagccgtggtaacttcagaggcagcagaactcgaacatactatcatgatggtagcaagaactacagctatgttccaaaggaatctcatgcataccgtgataacaccaagaatgcccatcattcttcacacattaatggaaagaatagagttccaaaaccatctcgtgaccactatgatggtgctaaaagttatgacattgtcccaaatgaatctcacatttaccatggtgatgctaagagccaaaaaaatgcaccaagagtagttcgagggagaggctccaagcgttaccaaccacgcttgaaaagcacctctgatgtatcttcagtgcaaaataccaaatctcagagtcttgaaggcacttcgtcaaatgcaaacttggtaaaagatgaagctcaaggaccaaattcacgacttgagcaagtccttcctattaagcagactgttgcatcaaacttgaattcagcttcgccaccattttatcctgcgaggtcatccagtcaagagtttgcagttggtcaaggagagaatacacaagaacttagtactaacctagtaagaggaaaggcttttgtgccatcggggcatgttgaagctgctataaatggcatgaatagacctgcactgcttccacctgcatcgtcatcaaatggtccatttcctgtagccactaatcaagtcaatagagattatggccatcctgcacatccaattgttcaacaaaacccagttcaaccccctacacgatctgcacccaggatgcctgcccagatgtttggtgcaacattcagcaatggcagtaaaatatcacctgcacaacctacatcaactattttagatgatgacgctgaaatttcttcacctagtggatcaaacaaatatgattctcggttaacagttaaaggacaacctgatgaccaaggagaagagcgagcttcgtttctctatggtggggctcgtgttcttggggctacaagcgcaatgggaatcacacttggtgatcaaaattttcatggtaccccagcattgctgccaggtttgtatcatggctcagtaaaacatgagttcaataacatgctctgtgaagcgtatcaaagaaataaactactttgaagcttaccataaactagtgaagttatgcagtttggaggtcagcgaccagttggacgtggtgttccttcaattggtatggctctgccaggatttgtgtctcaacagcaacttggtatcaataattctgagatgacttggtaaggacttggttaaatcaggaccttttgaaagcacatttgttttgttttctataattggtgcaatgtggtattctattaagttaccattctgctgttggtatgtttatggagagtatgcattgacatcatcatcaaccatctgaagtaaaagcaatcttaataataatatgcagctgcatactacctgttcggactgagtgctgctgttgtatttaccagttgaatgtgccggtattatactcataattagcttgtacagttgtacctaagtacctaactcccttggtattctaatgacattaggctaccaatattgactggtgcctctggagctctaggagcaccttatggttcaccttatatagccgtcgatggaagttattactctcgaccgcctgaacaaccatcttcatcagtttctaatagagaatctagtgcaaataatgcttcttctctgaagtcccaagaaattacagaggttgcaggcgacgcaagaactcaacaccaaaataaacctcgtcgatactcggagatgaactttggccagtgaacatagtgatgatagtaaatcagtgagggttcattggagctttggatccaagtaagacttgtgcaagagaccctggccttaccaagtgcttccagcatttcactgtctgatgtctagcactatcttgtgacccaaacgaggtttgacaggaggtgttcaaaccatcgctgtggtcatttgctgtgattattctgacgggctggtgttgttacaatcattaggtgagattttctggtactctacgtcaccacaataccagacggtcggtccgtaagtgtgaaggtcttgatggaaatcgtgaggacggaggtctcggtcgtactgcaaagctcgtgtccccgctgtacagtgtacatcacgtctctgactgtgtttgggtgtgcgctgcctctgcctacgaactcttcggtggttgtcgcatttttgaactgacaaataaaaaagaacgtgttgagcaccaaattgagaagggcggacggtccagcccggtccggacagtccgcgcctgtgggctgcacggtctgcgcaagcgcagaacagattagggttccaagttttgtgctacagttgttagctagattcgcaggattcgcttggaaattagtttgtaaatggttcagtccccctcctctataaataaagaggtatacggtcgatttgtaataatcaatcgaatcaataaaacttctatctcgcatttattttctgtgcaattaggagtggttctagtctatttctagtttag

SEQ ID NO: 76895 - DNA, 2867 bp, Zea Mays
cctcccctggataaaagcaatcctcccgcagaagcagaacgattccggaaagtgtctcgaatcttccaaattctttcccgagacctaaaattctctcgacggattcgcctgatctgacacgcgatctctcggctcgccccaatggccgacaaggagaagttggagtctgaagaggagtacgagagcgacctcgacgacgcacccctctccgcgttgcggcgccgggacgctgcgagcgatgacgaggacgaggatgaggacggagggatgcccttgaggcggaggaaggctggatccgacgcagattccgacgggcagggcgccgccgaggtgtacgacgaggatggcgcgtacgaagaaagcgaggagtacgaggaatacgagtacggggggttcaaagcagggggcggcggagtgcgcggggtggctgtcgaggcggttgccggtgcgggccatgaggaaggcgaggcgggggatggggaagctgaaaaggcgggtgaggcagcgccaggaggcgaagaggaggacaagaaggggaacgaaccctactccgttccgacgaccggcgccttctacatgcacgacgaccgcttccaggagggccgggggcgggggcgggggcgccaaaggagaatggtgaacagtagaaggttatggagtcctaaagatgagcaagcctgggttcatgacagatttgatgagatggacctgcatgattttcatggtgacaatccaaaaagaaagcagggaggtgtctttagaggacgtggtggtggacaaggtggtagaactcgtggtattagccgtggtaacttcagaggcagcagaactcgaacatactatcatgatggtagcaagaactacagctatgttccaaaggaatctcatgcataccgtgataacaccaagaatgcccatcattcttcacacattaatggaaagaatagagttccaaaaccatctcgtgaccactatgatggtgctaaaagttatgacattgtcccaaatgaatctcacatttaccatggtgatgctaagagccaaaaaaatgcaccaagagtagttcgagggagaggctccaagcgttaccaaccacgcttgaaaagcacctctgatgtatcttcagtgcaaaataccaaatctcagagtcttgaaggcacttcgtcaaatgcaaacttggtaaaagatgaagctcaaggaccaaattcacgacttgagcaagtccttcctattaagcagactgttgcatcaaacttgaattcagcttcgccaccattttatcctgcgaggtcatccagtcaagagtttgcagttggtcaaggagagaatacacaagaacttagtactaacctagtaagaggaaaggcttttgtgccatcggggcatgttgaagctgctataaatggcatgaatagacctgcactgcttccacctgcatcgtcatcaaatggtccatttcctgtagccactaatcaagtcaatagagattatggccatcctgcacatccaattgttcaacaaaacccagttcaaccccctacacgatctgcacccaggatgcctgcccagatgtttggtgcaacattcagcaatggcagtaaaatatcacctgcacaacctacatcaactattttagatgatgacgctgaaatttcttcacctagtggatcaaacaaatatgattctcggttaacagttaaaggacaacctgatgaccaaggagaagagcgagcttcgtttctctatggtggggctcgtgttcttggggctacaagcgcaatgggaatcacacttggtgatcaaaattttcatggtaccccagcattgctgccaggtttgtatcatggctcagtaaaacatgagttcaataacatgctctgtgaagcgtatcaaagaaataaactactttgaagcttaccataaactagtgaagttatgcagtttggaggtcagcgaccagttggacgtggtgttccttcaattggtatggctctgccaggatttgtgtctcaacagcaacttggtatcaataattctgagatgacttgaggttgcaggcgacgcaagaactcaacaccaaaataaacctcgtcgatactcggagatgaactttggccagtgaacatagtgatgatagtaaatcagtgagggttcattggagctttggatccaagtaagacttgtgcaagagaccctggccttaccaagtgcttccagcatttcactgtctgatgtctagcactatcttgtgacccaaacgaggtttgacaggaggtgttcaaaccatcgctgtggtcatttgctgtgattattctgacgggctggtgttgttacaatcattaggtgagattttctggtactctacgtcaccacaataccagacggtcggtccgtaagtgtgaaggtcttgatggaaatcgtgaggacggaggtctcggtcgtactgcaaagctcgtgtccccgctgtacagtgtacatcacgtctctgactgtgtttgggtgtgcgctgcctctgcctacgaactcttcggtggttgtcgcatttttgaactgacaaataaaaaagaacgtgttgagcaccaaattgagaagggcggacggtccagcccggtccggacagtccgcgcctgtgggctgcacggtctgcgcaagcgcagaacagattagggttccaagttttgtgctacagttgttagctagattcgcaggattcgcttggaaattagtttgtaaatggttcagtccccctcctctataaataaagaggtatacggtcgatttgtaataatcaatcgaatcaataaaacttctatctcgcatttattttctgtgcaattaggagtggttctagtctatttctagtttag

SEQ ID NO: 76896 - DNA, 3367 bp, Zea Mays
gtcagaaaaaagttgaaccaaacaggcacttaaaatctcaatgcaacctctcctcccctggataaaagcaatcctcccgcagaagcagaacgattccggaaagtgtctcgaatcttccaaattctttcccgagacctaaaattctctcgacggattcgcctgatctgacacgcgatctctcggctcgccccaatggccgacaaggagaagttggagtctgaagaggagtacgagagcgacctcgacgacgcacccctctccgcgttgcggcgccgggacgctgcgagcgatgacgaggacgaggatgaggacggagggatgcccttgaggcggaggaaggctggatccgacgcagattccgacgggcagggcgccgccgaggtgtacgacgaggatggcgcgtacgaagaaagcgaggagtacgaggaatacgagtacggggggttcaaagcagggggcggcggagtgcgcggggtggctgtcgaggcggttgccggtgcgggccatgaggaaggcgaggcgggggatggggaagctgaaaaggcgggtgaggcagcgccaggaggcgaagaggaggacaagaaggggaacgaaccctactccgttccgacgaccggcgccttctacatgcacgacgaccgcttccaggagggccgggggcgggggcgggggcgccaaaggagaatggtgaacagtagaaggttatggagtcctaaagatgagcaagcctgggttcatgacagatttgatgagatggacctgcatgattttcatggtgacaatccaaaaagaaagcagggaggtgtctttagaggacgtggtggtggacaaggtggtagaactcgtggtattagccgtggtaacttcagaggcagcagaactcgaacatactatcatgatggtagcaagaactacagctatgttccaaaggaatctcatgcataccgtgataacaccaagaatgcccatcattcttcacacattaatggaaagaatagagttccaaaaccatctcgtgaccactatgatggtgctaaaagttatgacattgtcccaaatgaatctcacatttaccatggtgatgctaagagccaaaaaaatgcaccaagagtagttcgagggagaggctccaagcgttaccaaccacgcttgaaaagcacctctgatgtatcttcagtgcaaaataccaaatctcagagtcttgaaggcacttcgtcaaatgcaaacttggtaaaagatgaagctcaaggaccaaattcacgacttgagcaagtccttcctattaagcagactgttgcatcaaacttgaattcagcttcgccaccattttatcctgcgaggtcatccagtcaagagtttgcagttggtcaaggagagaatacacaagaacttagtactaacctagtaagaggaaaggcttttgtgccatcggggcatgttgaagctgctataaatggcatgaatagacctgcactgcttccacctgcatcgtcatcaaatggtccatttcctgtagccactaatcaagtcaatagagattatggccatcctgcacatccaattgttcaacaaaacccagttcaaccccctacacgatctgcacccaggatgcctgcccagatgtttggtgcaacattcagcaatggcagtaaaatatcacctgcacaacctacatcaactattttagatgatgacgctgaaatttcttcacctagtggatcaaacaaatatgattctcggttaacagttaaaggacaacctgatgaccaaggagaagagcgagcttcgtttctctatggtggggctcgtgttcttggggctacaagcgcaatgggaatcacacttggtgatcaaaattttcatggtaccccagcattgctgccaggtttgtatcatggctcagtaaaacatgagttcaataacatgctctgtgaagcgtatcaaagaaataaactactttgaagcttaccataaactagtgaaggtaactgcacagactttccaactcaggaagctacacttttttttaaaaaaaactttacctccatattttaggtggctgttatttttttttaaaatgggttcaattccatactgtcatgttgcattcaaggttaccagtatcttggtaaatgcgcactattatttatagtgtggatgcaccattatatacacattcagttactttttatctcctcttcatacttgccttagcatgtatatgctttaaatttaatcgtcaactttttttttggtgcagttatgcagtttggaggtcagcgaccagttggacgtggtgttccttcaattggtatggctctgccaggatttgtgtctcaacagcaacttggtatcaataattctgagatgacttggctaccaatattgactggtgcctctggagctctaggagcaccttatggttcaccttatatagccgtcgatggaagttattactctcgaccgcctgaacaaccatcttcatcagtttctaatagagaatctagtgcaaataatgcttcttctctgaagtcccaagaaattacagaggttgcaggcgacgcaagaactcaacaccaaaataaacctcgtcgatactcggagatgaactttggccagtgaacatagtgatgatagtaaatcagtgagggttcattggagctttggatccaagtaagacttgtgcaagagaccctggccttaccaagtgcttccagcatttcactgtctgatgtctagcactatcttgtgacccaaacgaggtttgacaggaggtgttcaaaccatcgctgtggtcatttgctgtgattattctgacgggctggtgttgttacaatcattaggtgagattttctggtactctacgtcaccacaataccagacggtcggtccgtaagtgtgaaggtcttgatggaaatcgtgaggacggaggtctcggtcgtactgcaaagctcgtgtccccgctgtacagtgtacatcacgtctctgactgtgtttgggtgtgcgctgcctctgcctacgaactcttcggtggttgtcgcatttttgaactgacaaataaaaaagaacgtgttgagcaccaaattgagaagggcggacggtccagcccggtccggacagtccgcgcctgtgggctgcacggtctgcgcaagcgcagaacagattagggttccaagttttgtgctacagttgttagctagattcgcaggattcgcttggaaattagtttgtaaatggttcagtccccctcctctataaataaagaggtatacggtcgatttgtaataatcaatcgaatcaataaaacttctatctcgcatttattttctgtgcaattaggagtggttctagtctatttctagtttag

SEQ ID NO: 76897 - DNA, 862 bp, Zea Mays
cgttgacacagtattagtaacaagaagtgaagttggaaaagaccataatcatcaattcacaattgcacgtttttttaattaaaaaaattgtaagtaacttataaccatcacagaagaagtttcaattccttgaaatcaaagcaagaagtctttcaggaacaacttgaagacagagcaagctttacgcatctgaacatttggcatatttagttcagcaacatatgaacattctgatgacaatgaagggtatacactaagctttccacatgaataaccaacaatacccttcattaggatattattaacatcttagggaagaatagaagtagaacttcagtgcgcacacaggctcagaaatttacaaatgctaactacagcacagataaacagatatcgtccccaacttcagcaaaatgacactttatgagctagtataacttagtaattcgaatggctataataaacaattcaatagcacagctccttaaattgctacatgggaacaaactcatttactccttcgaaaattggcaaattaattatattctacgaaacctccgcaggaggcccaatgttggacccaaatacctccgcacactgacatgcattcagaggggcagagggcacgcacaacacaccatgcatatcctggcatccaattcaactcacagaatactccccagcacatgtatgcatgcctagatgtcagtgagcacaaacagcacaccaagatgcagaagtcaccgcaggcgagactgggagcgaggggatcgtgtcgtaccgatcactgcggttgagccgcgcggcgtagtagaatgcgacggagacgagccacgagtcagagtgtacggcgacgagcgcg

SEQ ID NO: 76898 - DNA, 840 bp, Zea Mays
acgtaatcagtctttatagtaaataaaatatattaacatgaacatcacggattattattatcttcgcataagctgcacattccacctatagaaagattacaaaggcttcctctgcccctattccttctccggcaacatacagactaccataactctccacggcatggagaaaccacaaaaagattataaattaatgtgtgatctttccctgctaacattagcatcatcatcgttcgtcatatgtaagcttaatcgaaaaggtacagtaaacatcgcaaggcggcattgaccttgcgcaagaggaaactctgacctgcttgtccagtcttcttccatccatggccgtcctcccgggaggagggcgatgctataggcctaaatcggcctaggtctttttgaattgcagcagcttgggcacttgtactgctttatgctctccgcctttgcaggtgtgatcttcacgcacttgccatggtaccacttctcgcacacgtcgcacccgatccagaactcatcagcgctgtatattccaccacatgtcccgcacaaggtttcgctgtggttgctgtcatcttcatcgtagccctcatcaggctccctggcgttattttctaatcgtggctcgcttgtttgctggagagacagatcaagttcaacatcataacatgacaatagaagatgtggtaaaaacagcgatgggttcttgttacctttaccgacagtttatttctaccaccattgtcagtaccggatctatccctctcttttgattgcttcacaccactggagacgacttcaaaaacagttggcagatcattcatcatgccgaacaaacgcttc

SEQ ID NO: 76899 - DNA, 2115 bp, Zea Mays
accgtgagagggggagggggtatttaactgacggcgggacgaggatgcaagctctcgcggcagcagcaactgcagtggcggcgcctacccccgcgcgcctccgtctcccgctcctcttccgcgccccgcgctccggtcactgtagacccgcttcttcctccaggcttctgcggatctcgtgcagtgccaccactatgggagacgagacctcgacctccgttgctcctcaggagcaggaatccactgtgcgggctgggagtgtcaagcaacagctctccaggctggtcctttcatccctccagactacattgcccgatgtggagcaacaatgctatgggattatggtcaaaggttaaaggatctggaacaattttcaaaaaccctaattccattgggcaggccattgccaagaatctgccgtcttctgatattattgaatctgcatctgttgctggacctggttttgtgaacattaccttatcaaaccgctgggttgcacagagaatacaagatatgcttgttaacggcatcaagacttgggcaccagttctgccagtaaataggacagtggttgatttttcatcacctaatattgcaaaggaaatgcatgtgggacatttaaggtctacaattattggagatacattagcacgcatgtttgagttctcgaatgttgttgttctgcgcagaaaccatgtgggagattggggtacacagtttgggatgctaatagaatatctttttgagaaatttccaaattggcaggagataggttgccaggccattggggaccttcagattttctataaagcatccaagcataggtttgacagtgatccagactttaaagcaagggctcaacaaggagttgttcggctacagggaggggaggataaatatcgagaagcatggaaaaaaatttgtgacattagcaggagcgaatttgacttggtctacaagcgcctaaatgtggtgcttgaagaaaagggggagagtttctataatccttatattcctcaagtgctggaggaattgagtaacaaaggcttgatcaaggagagtgagggtgcccgagttatatttattcaaggtcatcaaatccctttgattgttgttaagagtgatggtggcttcaactatgcctcaacagacttaactgctctttggtatcggctcaatgttgagcaggcagagtggatcatatatgttacagatgttggtcagcagcagcactttgacatggttttcagtgctgcaaagatggccggttggctcccagatccaagtgaaaagaagtttccgaaaacaagccatgttggatttggtcttgttcttggttcagatggcaagcggttccgaacccgcagtactgaggttgttcgattggtagagctacttgatgaggctaaatctcggagcaaatcagaactactacaacggctcactgaaaatggcaaaattgttgactggacggatgaggaattagagcaaacttcagaggctgttggatatggtgctgtgaaggaaatactgctgtgtaccttcagtatgcacatgctcgtatttgttccattattcggaaaatccaacaagaacgtggaagagctgaagatgagtggagccatttctctcgaccatccggatgagcgcgtgttggggctgtatcttatccgatttgcagaggttgttgaagaggcatgcacgaatctacttccaaatgttgtgtgtgaatacttgtacaatctatctgaaatgttcacaaaattctataccaactgccaggtggttgggtcgccggaggagacgagccggttgttgctttgccaggcgactgctgttgtcatgcgacagtgcttcaacctgctcgggatcacgccagtatacaagctgtgattggctgcatgttcgattaatacattcaacatgtagaaaccccaattcatcatggttgcagttttggtcttgtaacctagttgaggcagttaacataatctactgtcctgtttgaaaacagaaggaactcaaaaggttgtatcaaaatgtgcttgcagagtttctgttactgttaggctagttttgcaactcccgatttttatttttctaagggctagttcg

SEQ ID NO: 76900 - DNA, 2119 bp, Zea Mays
accgtgagagggggagggggtatttaactgacggcgggacgaggatgcaagctctcgcggcagcagcaactgcagtggcggcgcctacccccgcgcgcctccgtctcccgctcctcttccgcgccccgcgctccgtcaggtcactgtagacccgcttcttcctccaggcttctgcggatctcgtgcagtgccaccactatgggagacgagacctcgacctccgttgctcctcaggagcaggaatccactgtgcgggctgggagtgtcaagcaacagctctccaggctggtcctttcatccctccagactacattgcccgatgtggagcaacaatgctatgggattatggtcaaaggttaaaggatctggaacaattttcaaaaaccctaattccattgggcaggccattgccaagaatctgccgtcttctgatattattgaatctgcatctgttgctggacctggttttgtgaacattaccttatcaaaccgctgggttgcacagagaatacaagatatgcttgttaacggcatcaagacttgggcaccagttctgccagtaaataggacagtggttgatttttcatcacctaatattgcaaaggaaatgcatgtgggacatttaaggtctacaattattggagatacattagcacgcatgtttgagttctcgaatgttgttgttctgcgcagaaaccatgtgggagattggggtacacagtttgggatgctaatagaatatctttttgagaaatttccaaattggcaggagataggttgccaggccattggggaccttcagattttctataaagcatccaagcataggtttgacagtgatccagactttaaagcaagggctcaacaaggagttgttcggctacagggaggggaggataaatatcgagaagcatggaaaaaaatttgtgacattagcaggagcgaatttgacttggtctacaagcgcctaaatgtggtgcttgaagaaaagggggagagtttctataatccttatattcctcaagtgctggaggaattgagtaacaaaggcttgatcaaggagagtgagggtgcccgagttatatttattcaaggtcatcaaatccctttgattgttgttaagagtgatggtggcttcaactatgcctcaacagacttaactgctctttggtatcggctcaatgttgagcaggcagagtggatcatatatgttacagatgttggtcagcagcagcactttgacatggttttcagtgctgcaaagatggccggttggctcccagatccaagtgaaaagaagtttccgaaaacaagccatgttggatttggtcttgttcttggttcagatggcaagcggttccgaacccgcagtactgaggttgttcgattggtagagctacttgatgaggctaaatctcggagcaaatcagaactactacaacggctcactgaaaatggcaaaattgttgactggacggatgaggaattagagcaaacttcagaggctgttggatatggtgctgtgaaggaaatactgctgtgtaccttcagtatgcacatgctcgtatttgttccattattcggaaaatccaacaagaacgtggaagagctgaagatgagtggagccatttctctcgaccatccggatgagcgcgtgttggggctgtatcttatccgatttgcagaggttgttgaagaggcatgcacgaatctacttccaaatgttgtgtgtgaatacttgtacaatctatctgaaatgttcacaaaattctataccaactgccaggtggttgggtcgccggaggagacgagccggttgttgctttgccaggcgactgctgttgtcatgcgacagtgcttcaacctgctcgggatcacgccagtatacaagctgtgattggctgcatgttcgattaatacattcaacatgtagaaaccccaattcatcatggttgcagttttggtcttgtaacctagttgaggcagttaacataatctactgtcctgtttgaaaacagaaggaactcaaaaggttgtatcaaaatgtgcttgcagagtttctgttactgttaggctagttttgcaactcccgatttttatttttctaagggctagttcg

SEQ ID NO: 76901 - DNA, 2162 bp, Zea Mays
accgtgagagggggagggggtatttaactgacggcgggacgaggatgcaagctctcgcggcagcagcaactgcagtggcggcgcctacccccgcgcgcctccgtctcccgctcctcttccgcgccccgcgctccggtcactgtagacccgcttcttcctccaggcttctgcggatctcgtgcagtgccaccactatgggagacgagacctcgacctccgttgctcctcaggagcaggaatccactgtgcgggctgggagtgtcaagcaacagctctccaggctggtcctttcatccctccagactacattgcccgatgtggaggtagaaccgatggttgaagtttcagcaaagtttgctgactaccagtgcaacaatgctatgggattatggtcaaaggttaaaggatctggaacaattttcaaaaaccctaattccattgggcaggccattgccaagaatctgccgtcttctgatattattgaatctgcatctgttgctggacctggttttgtgaacattaccttatcaaaccgctgggttgcacagagaatacaagatatgcttgttaacggcatcaagacttgggcaccagttctgccagtaaataggacagtggttgatttttcatcacctaatattgcaaaggaaatgcatgtgggacatttaaggtctacaattattggagatacattagcacgcatgtttgagttctcgaatgttgttgttctgcgcagaaaccatgtgggagattggggtacacagtttgggatgctaatagaatatctttttgagaaatttccaaattggcaggagataggttgccaggccattggggaccttcagattttctataaagcatccaagcataggtttgacagtgatccagactttaaagcaagggctcaacaaggagttgttcggctacagggaggggaggataaatatcgagaagcatggaaaaaaatttgtgacattagcaggagcgaatttgacttggtctacaagcgcctaaatgtggtgcttgaagaaaagggggagagtttctataatccttatattcctcaagtgctggaggaattgagtaacaaaggcttgatcaaggagagtgagggtgcccgagttatatttattcaaggtcatcaaatccctttgattgttgttaagagtgatggtggcttcaactatgcctcaacagacttaactgctctttggtatcggctcaatgttgagcaggcagagtggatcatatatgttacagatgttggtcagcagcagcactttgacatggttttcagtgctgcaaagatggccggttggctcccagatccaagtgaaaagaagtttccgaaaacaagccatgttggatttggtcttgttcttggttcagatggcaagcggttccgaacccgcagtactgaggttgttcgattggtagagctacttgatgaggctaaatctcggagcaaatcagaactactacaacggctcactgaaaatggcaaaattgttgactggacggatgaggaattagagcaaacttcagaggctgttggatatggtgctgtgaaggaaatactgctgtgtaccttcagtatgcacatgctcgtatttgttccattattcggaaaatccaacaagaacgtggaagagctgaagatgagtggagccatttctctcgaccatccggatgagcgcgtgttggggctgtatcttatccgatttgcagaggttgttgaagaggcatgcacgaatctacttccaaatgttgtgtgtgaatacttgtacaatctatctgaaatgttcacaaaattctataccaactgccaggtggttgggtcgccggaggagacgagccggttgttgctttgccaggcgactgctgttgtcatgcgacagtgcttcaacctgctcgggatcacgccagtatacaagctgtgattggctgcatgttcgattaatacattcaacatgtagaaaccccaattcatcatggttgcagttttggtcttgtaacctagttgaggcagttaacataatctactgtcctgtttgaaaacagaaggaactcaaaaggttgtatcaaaatgtgcttgcagagtttctgttactgttaggctagttttgcaactcccgatttttatttttctaagggctagttcg

SEQ ID NO: 76902 - DNA, 2236 bp, Zea Mays
accgtgagagggggagggggtatttaactgacggcgggacgaggatgcaagctctcgcggcagcagcaactgcagtggcggcgcctacccccgcgcgcctccgtctcccgctcctcttccgcgccccgcgctccgtcaggtcactgtagacccgcttcttcctccaggcttctgcggatctcgtgcagtgccaccactatgggagacgagacctcgacctccgttgctcctcaggagcaggaatccactgtgcgggctgggagtgtcaagcaacagctctccaggctggtcctttcatccctccagactacattgcccgatgtggaggtagaaccgatggttgaagtttcagcaaagtttgctgactaccagtgcaacaatgctatgggattatggtcaaaggttaaaggatctggaacaattttcaaaaaccctaattccattgggcaggccattgccaagaatctgccgtcttctgatattattgaatctgcatctgttgctggacctggttttgtgaacattaccttatcaaaccgctgggttgcacagagaatacaagatatgcttgttaacggcatcaagacttgggcaccagttctgccagtaaataggacagtggttgatttttcatcacctaatattgcaaaggaaatgcatgtgggacatttaaggtctacaattattggagatacattagcacgcatgtttgagttctcgaatgttgttgttctgcgcagaaaccatgtgggagattggggtacacagtttgggatgctaatagaatatctttttgagaaatttccaaattggcaggagataggttgccaggccattggggaccttcagattttctataaagcatccaagcataggtttgacagtgatccagactttaaagcaagggctcaacaaggagttgttcggctacagggaggggaggataaatatcgagaagcatggaaaaaaatttgtgacattagcaggagcgaatttgacttggtctacaagcgcctaaatgtggtgcttgaagaaaagggggagagtttctataatccttatattcctcaagtgctggaggaattgagtaacaaaggcttgatcaaggagagtgagggtgcccgagttatatttattcaaggtcatcaaatccctttgattgttgttaagagtgatggtggcttcaactatgcctcaacagacttaactgctctttggtatcggctcaatgttgagcaggcagagtggatcatatatgttacagatgttggtcagcagcagcactttgacatggttttcagtgctgcaaagatggccggttggctcccagatccaagtgaaaagaagtttccgaaaacaagccatgttggatttggtcttgttcttggttcagatggcaagcggttccgaacccgcagtactgaggttgttcgattggtagagctacttgatgaggctaaatctcggagcaaatcagaactactacaacggctcactgaaaatggcaaaattgttgactggacggatgaggaattagagcaaacttcagaggctgttggatatggtgctgtgaagtacgctgattctaaaaataaccgggctcactaattacccatttagttttaacaaatgctgagcgataagggaaatactgctgtgtaccttcagtatgcacatgctcgtatttgttccattattcggaaaatccaacaagaacgtggaagagctgaagatgagtggagccatttctctcgaccatccggatgagcgcgtgttggggctgtatcttatccgatttgcagaggttgttgaagaggcatgcacgaatctacttccaaatgttgtgtgtgaatacttgtacaatctatctgaaatgttcacaaaattctataccaactgccaggtggttgggtcgccggaggagacgagccggttgttgctttgccaggcgactgctgttgtcatgcgacagtgcttcaacctgctcgggatcacgccagtatacaagctgtgattggctgcatgttcgattaatacattcaacatgtagaaaccccaattcatcatggttgcagttttggtcttgtaacctagttgaggcagttaacataatctactgtcctgtttgaaaacagaaggaactcaaaaggttgtatcaaaatgtgcttgcagagtttctgttactgttaggctagttttgcaactcccgatttttatttttctaagggctagttcg

SEQ ID NO: 76903 - DNA, 2232 bp, Zea Mays
accgtgagagggggagggggtatttaactgacggcgggacgaggatgcaagctctcgcggcagcagcaactgcagtggcggcgcctacccccgcgcgcctccgtctcccgctcctcttccgcgccccgcgctccggtcactgtagacccgcttcttcctccaggcttctgcggatctcgtgcagtgccaccactatgggagacgagacctcgacctccgttgctcctcaggagcaggaatccactgtgcgggctgggagtgtcaagcaacagctctccaggctggtcctttcatccctccagactacattgcccgatgtggaggtagaaccgatggttgaagtttcagcaaagtttgctgactaccagtgcaacaatgctatgggattatggtcaaaggttaaaggatctggaacaattttcaaaaaccctaattccattgggcaggccattgccaagaatctgccgtcttctgatattattgaatctgcatctgttgctggacctggttttgtgaacattaccttatcaaaccgctgggttgcacagagaatacaagatatgcttgttaacggcatcaagacttgggcaccagttctgccagtaaataggacagtggttgatttttcatcacctaatattgcaaaggaaatgcatgtgggacatttaaggtctacaattattggagatacattagcacgcatgtttgagttctcgaatgttgttgttctgcgcagaaaccatgtgggagattggggtacacagtttgggatgctaatagaatatctttttgagaaatttccaaattggcaggagataggttgccaggccattggggaccttcagattttctataaagcatccaagcataggtttgacagtgatccagactttaaagcaagggctcaacaaggagttgttcggctacagggaggggaggataaatatcgagaagcatggaaaaaaatttgtgacattagcaggagcgaatttgacttggtctacaagcgcctaaatgtggtgcttgaagaaaagggggagagtttctataatccttatattcctcaagtgctggaggaattgagtaacaaaggcttgatcaaggagagtgagggtgcccgagttatatttattcaaggtcatcaaatccctttgattgttgttaagagtgatggtggcttcaactatgcctcaacagacttaactgctctttggtatcggctcaatgttgagcaggcagagtggatcatatatgttacagatgttggtcagcagcagcactttgacatggttttcagtgctgcaaagatggccggttggctcccagatccaagtgaaaagaagtttccgaaaacaagccatgttggatttggtcttgttcttggttcagatggcaagcggttccgaacccgcagtactgaggttgttcgattggtagagctacttgatgaggctaaatctcggagcaaatcagaactactacaacggctcactgaaaatggcaaaattgttgactggacggatgaggaattagagcaaacttcagaggctgttggatatggtgctgtgaagtacgctgattctaaaaataaccgggctcactaattacccatttagttttaacaaatgctgagcgataagggaaatactgctgtgtaccttcagtatgcacatgctcgtatttgttccattattcggaaaatccaacaagaacgtggaagagctgaagatgagtggagccatttctctcgaccatccggatgagcgcgtgttggggctgtatcttatccgatttgcagaggttgttgaagaggcatgcacgaatctacttccaaatgttgtgtgtgaatacttgtacaatctatctgaaatgttcacaaaattctataccaactgccaggtggttgggtcgccggaggagacgagccggttgttgctttgccaggcgactgctgttgtcatgcgacagtgcttcaacctgctcgggatcacgccagtatacaagctgtgattggctgcatgttcgattaatacattcaacatgtagaaaccccaattcatcatggttgcagttttggtcttgtaacctagttgaggcagttaacataatctactgtcctgtttgaaaacagaaggaactcaaaaggttgtatcaaaatgtgcttgcagagtttctgttactgttaggctagttttgcaactcccgatttttatttttctaagggctagttcg

SEQ ID NO: 76904 - DNA, 2166 bp, Zea Mays
accgtgagagggggagggggtatttaactgacggcgggacgaggatgcaagctctcgcggcagcagcaactgcagtggcggcgcctacccccgcgcgcctccgtctcccgctcctcttccgcgccccgcgctccgtcaggtcactgtagacccgcttcttcctccaggcttctgcggatctcgtgcagtgccaccactatgggagacgagacctcgacctccgttgctcctcaggagcaggaatccactgtgcgggctgggagtgtcaagcaacagctctccaggctggtcctttcatccctccagactacattgcccgatgtggaggtagaaccgatggttgaagtttcagcaaagtttgctgactaccagtgcaacaatgctatgggattatggtcaaaggttaaaggatctggaacaattttcaaaaaccctaattccattgggcaggccattgccaagaatctgccgtcttctgatattattgaatctgcatctgttgctggacctggttttgtgaacattaccttatcaaaccgctgggttgcacagagaatacaagatatgcttgttaacggcatcaagacttgggcaccagttctgccagtaaataggacagtggttgatttttcatcacctaatattgcaaaggaaatgcatgtgggacatttaaggtctacaattattggagatacattagcacgcatgtttgagttctcgaatgttgttgttctgcgcagaaaccatgtgggagattggggtacacagtttgggatgctaatagaatatctttttgagaaatttccaaattggcaggagataggttgccaggccattggggaccttcagattttctataaagcatccaagcataggtttgacagtgatccagactttaaagcaagggctcaacaaggagttgttcggctacagggaggggaggataaatatcgagaagcatggaaaaaaatttgtgacattagcaggagcgaatttgacttggtctacaagcgcctaaatgtggtgcttgaagaaaagggggagagtttctataatccttatattcctcaagtgctggaggaattgagtaacaaaggcttgatcaaggagagtgagggtgcccgagttatatttattcaaggtcatcaaatccctttgattgttgttaagagtgatggtggcttcaactatgcctcaacagacttaactgctctttggtatcggctcaatgttgagcaggcagagtggatcatatatgttacagatgttggtcagcagcagcactttgacatggttttcagtgctgcaaagatggccggttggctcccagatccaagtgaaaagaagtttccgaaaacaagccatgttggatttggtcttgttcttggttcagatggcaagcggttccgaacccgcagtactgaggttgttcgattggtagagctacttgatgaggctaaatctcggagcaaatcagaactactacaacggctcactgaaaatggcaaaattgttgactggacggatgaggaattagagcaaacttcagaggctgttggatatggtgctgtgaaggaaatactgctgtgtaccttcagtatgcacatgctcgtatttgttccattattcggaaaatccaacaagaacgtggaagagctgaagatgagtggagccatttctctcgaccatccggatgagcgcgtgttggggctgtatcttatccgatttgcagaggttgttgaagaggcatgcacgaatctacttccaaatgttgtgtgtgaatacttgtacaatctatctgaaatgttcacaaaattctataccaactgccaggtggttgggtcgccggaggagacgagccggttgttgctttgccaggcgactgctgttgtcatgcgacagtgcttcaacctgctcgggatcacgccagtatacaagctgtgattggctgcatgttcgattaatacattcaacatgtagaaaccccaattcatcatggttgcagttttggtcttgtaacctagttgaggcagttaacataatctactgtcctgtttgaaaacagaaggaactcaaaaggttgtatcaaaatgtgcttgcagagtttctgttactgttaggctagttttgcaactcccgatttttatttttctaagggctagttcg

SEQ ID NO: 76905 - DNA, 1517 bp, Zea Mays
accgtgagagggggagggggtatttaactgacggcgggacgaggatgcaagctctcgcggcagcagcaactgcagtggcggcgcctacccccgcgcgcctccgtctcccgctcctcttccgcgccccgcgctccgtcaggtcactgtagacccgcttcttcctccaggcttctgcggatctcgtgcagtgccaccactatgggagacgagacctcgacctccgttgctcctcaggagcaggaatccactgtgcgggctgggagtgtcaagcaacagctctccaggctggtcctttcatccctccagactacattgcccgatgtggagcaacaatgctatgggattatggtcaaaggttaaaggatctggaacaattttcaaaaaccctaattccattgggcaggccattgccaagaatctgccgtcttctgatattattgaatctgcatctgttgctggacctggttttgtgaacattaccttatcaaaccgctgggttgcacagagaatacaagatatgcttgttaacggcatcaagacttgggcaccagttctgccagtaaataggacagtggttgatttttcatcacctaatattgcaaaggaaatgcatgtgggacatttaaggtctacaattattggagatacattagcacgcatgtttgagttctcgaatgttgttgttctgcgcagaaaccatgtgggagattggggtacacagtttgggatgctaatagaatatctttttgagaaatttccaaattggcaggagataggttgccaggccattggggaccttcagattttctataaagcatccaagcataggtttgacagtgatccagactttaaagcaagggctcaacaaggagttgttcggctacagggaggggaggataaatatcgagaagcatggaaaaaaatttgtgacattagcaggagcgaatttgacttggtctacaagcgcctaaatgtggtgcttgaagaaaagggggagagtttctataatccttatattcctcaagtgctggaggaattgagtaacaaaggcttgatcaaggagagtgagggtgcccgagttatatttattcaaggtcatcaaatccctttgattgttgttaagagtgatggtggcttcaactatgcctcaacagacttaactgctctttggcagagtggatcatatatgttacagatgttggtcagcagcagcactttgacatggttttcagtgctgcaaagatggccggttggctcccagatccaagtgaaaagaagtttccgaaaacaagccatgttggatttggtcttgttcttggttcagatggcaagcggttccgaacccgcagtactgaggttgttcgattggtagagctacttgatgaggctaaatctcggagcaaatcagaactactacaacggctcactgaaaatggcaaaattgttgactggacggatgaggaattagagcaaacttcagaggctgttggatatggtgctgtgaagtatgttctgga

SEQ ID NO: 76906 - DNA, 2277 bp, Zea Mays
tcgtttcctcctcccagtccaagtctccagctacgagcctacgactgccaggtctccgcttgtcgccgtcacgcgcgcgcaggggcagggcgcaccatccccgcgccgccatgtccggcaccgggtgcctccccaccgacggcccggccctatcccgggtctgccgggacggcgcggccgccgcacggctcaagacggggtcgctgctggccattctcgtcgccagcgccgtcggcatctgcctccccgtcgcgctcacgcgggccttccgcggcagcccaaactacgcgcggggcctgctcctcgtcaagtgctacgcggctggggtcatcctctccacctcgctcgtccacgtgctccccgacgcgcacgccgccctcgccgactgcgccgtcgcctcgcgcaggccctggagggacttccccttcgcgggccttttcaccctcgtcggcgcgctgctcgcgctcctcgtcgacctctccgcctcctcccacctcgaggcccacgcccacgtcggcgcccaccacgaaactccctacgccccgatcccgaagaaggtacccgtgttcgagctcgccggcgaaatgagccccaagaagcgcgctttcttgggcgacgaccgagaagaggaccccgcgccgcacgccgccaccaacggcgcagacccggaccgcgacgacgtggcgctcttcggacccaagaagggcgcccgcagcgacgaggtcccggccatcactgccgggtgccatgccgtcgcccatgaagtggtggaggtaggggaggggcccggtgaggacgaggaggaggccaggaggaagcagaagatggtgtccaaagtgctggagattgggatagtcttccactccgtcatcatcggagttacgatggggatgtcccaggatgtctgtgcaatccggccacttgtggttgcgctctccttccatcaggtgttcgaggggatgggcctgggcggatgcatcgcacagcccccttgtgtcccctgatccctccgtctatggagtttaaaatgattcctggaccctggtcgaaggttccccgtggtccacaacaattaacctgagtgagcttttttgtactgctcattgcatttattttagcaataaaaagctgaatgctgaactttttgcaccatgaaaagccatgtggccaatccgtcctctttttgccaccaacttctgttggtttatgactcatcaaatgtttggacaatgtttaccttttgtcctccttcccccatagaaggcaatgaagctgatgtgttatgcacatataggaggagcgacaaagcatatggcattataaggcttaaaagtcctttttggtttggtggtatcttgtttgagagcaattccacgaagaatgaaagtgaaagagtaaagtaaagagattgcagggctggttttgggatggcaacagttggctacatgtgcataatgttctcagtgacgacgccattgggaattcttcttggaatgctagtgttccacatgactggctacgacgatagcaatccaaatgccttaataatggaagggatccttggttcactttcggctggaattctcatctatatggcgctagtcgacctagtttctcttgattttttccacaacaagatgatgtcagcgtctttgaagctgaagaaggcgtgttacattgccttggtgcttggatctgcttctatgtcggtattagctctctgggcataggcattttgaagaaaagccttatttacgatcttcagaggtattgctccttgatgtaaaggaatggataatttgggggccaacagtacactagtccctcatgtaaatttgaacacaaaggaaactgaaaattcacgaccacagtttgtgagctagctgtgtatactaagggctagtttgggagcctcaaacccggagggaattagaggggctaaaatcccttccttattcaattttgaataagaaggggattttagcccctccaatcccctccgggttttggtcttccaaactagccctaaggatgtatatggttatggaaaagtagctgcaagatgtgggatgtagaaaagctgatgtgaggtatgatctatgaaaaagttagccatttggttgagcatcctgcatcaacatacatctacatttctatccacccaactttctcctttcactgatgagcggatcctgcttgtcagactatcttcagcagattactatcctactttctatctcattctctatttgttattctgtaaatagtgtaatccac

SEQ ID NO: 76907 - DNA, 1944 bp, Zea Mays
ctcgtttcctcctcccagtccaagtctccagctacgagcctacgactgccaggtctccgcttgtcgccgtcacgcgcgcgcaggggcagggcgcaccatccccgcgccgccatgtccggcaccgggtgcctccccaccgacggcccggccctatcccgggtctgccgggacggcgcggccgccgcacggctcaagacggggtcgctgctggccattctcgtcgccagcgccgtcggcatctgcctccccgtcgcgctcacgcgggccttccgcggcagcccaaactacgcgcggggcctgctcctcgtcaagtgctacgcggctggggtcatcctctccacctcgctcgtccacgtgctccccgacgcgcacgccgccctcgccgactgcgccgtcgcctcgcgcaggccctggagggacttccccttcgcgggccttttcaccctcgtcggcgcgctgctcgcgctcctcgtcgacctctccgcctcctcccacctcgaggcccacgcccacgtcggcgcccaccacgaaactccctacgccccgatcccgaagaaggtacccgtgttcgagctcgccggcgaaatgagccccaagaagcgcgctttcttgggcgacgaccgagaagaggaccccgcgccgcacgccgccaccaacggcgcagacccggaccgcgacgacgtggcgctcttcggacccaagaagggcgcccgcagcgacgaggtcccggccatcactgccgggtgccatgccgtcgcccatgaagtggtggaggtaggggaggggcccggtgaggacgaggaggaggccaggaggaagcagaagatggtgtccaaagtgctggagattgggatagtcttccactccgtcatcatcggagttacgatggggatgtcccaggatgtctgtgcaatccggccacttgtggttgcgctctccttccatcaggtgttcgaggggatgggcctgggcggatgcatcgcacagcccccttgtgtcccctgatccctccgtctatggagtttaaaatgattcctggaccctggtcgaaggttccccgtggtccacaacaattaacctgagctggttttgggatggcaacagttggctacatgtgcataatgttctcagtgacgacgccattgggaattcttcttggaatgctagtgttccacatgactggctacgacgatagcaatccaaatgccttaataatggaagggatccttggttcactttcggctggaattctcatctatatggcgctagtcgacctagtttctcttgattttttccacaacaagatgatgtcagcgtctttgaagctgaagaaggcgtgttacattgccttggtgcttggatctgcttctatgtcggtattagctctctgggcataggcattttgaagaaaagccttatttacgatcttcagaggtattgctccttgatgtaaaggaatggataatttgggggccaacagtacactagtccctcatgtaaatttgaacacaaaggaaactgaaaattcacgaccacagtttgtgagctagctgtgtatactaagggctagtttgggagcctcaaacccggagggaattagaggggctaaaatcccttccttattcaattttgaataagaaggggattttagcccctccaatcccctccgggttttggtcttccaaactagccctaaggatgtatatggttatggaaaagtagctgcaagatgtgggatgtagaaaagctgatgtgaggtatgatctatgaaaaagttagccatttggttgagcatcctgcatcaacatacatctacatttctatccacccaactttctcctttcactgatgagcggatcctgcttgtcagactatcttcagcagattactatcctactttctatctcattctctatttgttattctgtaaatagtgtaatccac

SEQ ID NO: 76908 - DNA, 3937 bp, Zea Mays
atgcatggtggaaccctagagcttcacccctttttagcaccagcattccgccgcacgacctcactcaccacaggtgcggcggcgcacactgctgcacactgcactccctccgtcccgcgtccccgttcggcgctctcggcacgaccgccggtagcccgggacgcacgtcgcacggccccatccctcctagcggccggtgacggcaccggcggccctttgctcggctgtgcccaagctgcgagggcgagatctacccccgcgtccgtgcatcttcgtcaggcccttctccggacgagcactcacagggtgtcaacattcaaggtatcaaggaacgcaaacctccagattttgttacctcaaggagaagatacatgaatagaagcatttgccaccacctccttgcccactgcaaaaagctaagagagctccagagaatccacgctctggctgttacccatggtctccaccccaaccatcagtctgtttcctgcaaaatcttccgctgctacgctgattttggccatgtagctgatgctcgcaagctgttcgatgagatcccacaccctgaccttatcttctttactagcctcatgtccctccatctcaagttagatcaccaacgcgaagctatatccttgtttgctcgtgttgttgccgctggccaccaccttgatggctttgcggttgttggtgccctgtctgcctctagtggtgctggtgatctagtggttggtagggcagtccatggccttatttttcggcttggattggatcacgaggtcgtcgttggcaatgcattaatagatatgtatagccagtgtggggagtttgagtctgcggtaaaggtgtttgataggatgtttctgaaagatgaggtcacatggggtagcatgctgcatggtcatatcaaatgtgctggtctggattctgcactgtcgttctttgatctggttcctgtgaggagtgcagttgcttggacaacactgataactggtcatgtgcaaggcaggcagcctgtacgggctctagagctttttggtaggatggtactggagggccatcgccctacccatgttacaatcgtaggtgtactctcagcttgtgctgacattggtgctctggatctagggagtgtcattcatgggtatggaagcaaatgcaatgccagctcgaatataattgttagcaatgctctgatggatatgtatgcaaagagtgggcgcattgagatgtcattttctgtgttccaagaaatccagtcaaaggatttttttacatggacgactatgatctcatgctgtacagtccagggagatgggaggaaagctcttgagctctttcaggacatgcttagagctggaatagttccaaacagtgtaacctttgtttctgttttgtcagcatgcagccatgctggcttgatagaagaaggtagagaattgttcaacagaatgcgtcaagtatacaaaattgatccccgacttgagcactatggttgcatgattgatctgttaggacggggaggattactagaggaagcagaagatctaatagctgatatgaatctggtgcctgatattgttatatggaggtcacttcttagtgcatgtctggttcatggcaataataggctggctgagattgctggaaaggaaattataaagatagagcctggagatgatggagtttatgtgctactttggaacatgtatgcatcatcaaataaatggagagaagctcaagagttgaggcagcaaatgttgactcttgaaatcttcaaaaaaccagggtgtagttggatagaacttgatggtgttgtccatgaattcttggtagaggacaagacacatgatgatcgaagggaaatttatgaaaccttggaatacatgacaaggcagctcaagacacatatcagattatcctcatgggagcaacatggttcatccatttctgttgatgaagaaatcatagaatcatatactgctcatttgttgcatgattgattcacatgagtcttcccattaaatagccttttttgtgccgaaatcaaattcgatgatctcattgtaatttatttattattagtcttatcttgcagcgtctctagatcaagattatagtgtagaaatccactgctgtaagttggtggcaagaaattattagatatatgttgaggttggttttacttttaccagtcacttaataaaggttttagttgcaatgctggactacagagaagtttcttctaaatggcaagattattttatcatacattatctattttattgcattgtattctactttctaaatctggaagttcttattatgtgcgttactttttttaactgtgattcactcattgtcagatgtgttctgaagttcatgttgagggagatgcaagtgtcggacagaagggttgcaaggatataaggcgttacaaatgtgaattttgcacagttgtcaggtcaaagaaatgcctaattcaagctcacatggttgcacatcataaggatgaacttgataaatcagaaatatacaactcagatggggaaaagattgttcatgagcaggaacataggtgccaagagtgtggccgttgtttccagaaaccagctcatctgaagcagcacatgcaaagtcactcacatgagggcatagatagttaacagcgtgaagcattggatcccatttaaagaactccaaaatgcgacgagagactctttatttgcccactggaagactgccccttcagctataaaagaaaagatcacttgaaccgacacatgcttaagcatgagggcaaattgtttagttgcaccctggatggttgtgatatgaggttcagtatgaaggcagatatgcaacggcatgttaaggaaatccatgatagtaagaacccccatcaatttgtttgtaaggaggacggctgtaacaaggttttcaggtattcatcaaagctgaagaaacatgaggaatctcatgttaaattggactatgtggaggtagtgtgctgtgagccaggttgcatgaagatgttcagaaatgttgaatatctgagggctcataaccaatcttgccatcagtatgttcagtgtgagatatgtggagaaaagcacctgaagaagaacatcaagcggcatctgcaatcacatgacaaggtgccctctgatggaaggatgaaatgcacttttgatggttgtgaacacttcttttccaacaaatcaaatctgaccaagcatgtcaaggcatgccatgaccagctgaaacctttcaagtgcggaatcgttgggtgtggcaaggcgttcacctacaagcatgtcagggataaccatgagacatctggtgctcatgtatacatggaaggagactttgaagagttggatgagcagttgcgtgcccggccaagaggtggtcggaagaggaaagcattgacggtggaaacactgacacgcaagagggtgaccatctccggcgaggcttcatccttggatgatggagtggagtatcttcgctggttgctatctggtggggatgattcaattgattgtcagtagccggcgtctttttgctatcaccgctgctttgtacatgggttagattatgtaatgtaagttgtttggtagactacgatggtgttcatgacgcgtttgatatattgtcagcagtatggtagtgcagggctctcatagtaaagcttgccatttttgttgtatctttaacccacgtgggtccagatgatgtgtttattcctatgtatttacttatctacatgtatccacatgtgcgactttggcgtttgtttgagattataatctgttaaaatatgttggattatataatttgggcagattataattccaaacaaacactgactaatgctctatttgtttaccctctagtttatataatctagcttaaataagttaaaagaaacaaa

SEQ ID NO: 76909 - DNA, 4015 bp, Zea Mays
ccatgcatggtggaaccctagagcttcacccctttttagcaccagcattccgccgcacgacctcactcaccacaggtgcggcggcgcacactgctgcacactgcactccctccgtcccgcgtccccgttcggcgctctcggcacgaccgccggtagcccgggacgcacgtcgcacggccccatccctcctagcggccggtgacggcaccggcggccctttgctcggctgtgcccaagctgcgagggcgagatctacccccgcgtccgtgcatcttcgtcaggcccttctccggacgagcactcacagggtatcaaggaacgcaaacctccagattttgttacctcaaggagaagatacatgaatagaagcatttgccaccacctccttgcccactgcaaaaagctaagagagctccagagaatccacgctctggctgttacccatggtctccaccccaaccatcagtctgtttcctgcaaaatcttccgctgctacgctgattttggccatgtagctgatgctcgcaagctgttcgatgagatcccacaccctgaccttatcttctttactagcctcatgtccctccatctcaagttagatcaccaacgcgaagctatatccttgtttgctcgtgttgttgccgctggccaccaccttgatggctttgcggttgttggtgccctgtctgcctctagtggtgctggtgatctagtggttggtagggcagtccatggccttatttttcggcttggattggatcacgaggtcgtcgttggcaatgcattaatagatatgtatagccagtgtggggagtttgagtctgcggtaaaggtgtttgataggatgtttctgaaagatgaggtcacatggggtagcatgctgcatggtcatatcaaatgtgctggtctggattctgcactgtcgttctttgatctggttcctgtgaggagtgcagttgcttggacaacactgataactggtcatgtgcaaggcaggcagcctgtacgggctctagagctttttggtaggatggtactggagggccatcgccctacccatgttacaatcgtaggtgtactctcagcttgtgctgacattggtgctctggatctagggagtgtcattcatgggtatggaagcaaatgcaatgccagctcgaatataattgttagcaatgctctgatggatatgtatgcaaagagtgggcgcattgagatgtcattttctgtgttccaagaaatccagtcaaaggatttttttacatggacgactatgatctcatgctgtacagtccagggagatgggaggaaagctcttgagctctttcaggacatgcttagagctggaatagttccaaacagtgtaacctttgtttctgttttgtcagcatgcagccatgctggcttgatagaagaaggtagagaattgttcaacagaatgcgtcaagtatacaaaattgatccccgacttgagcactatggttgcatgattgatctgttaggacggggaggattactagaggaagcagaagatctaatagctgatatgaatctggtgcctgatattgttatatggaggtcacttcttagtgcatgtctggttcatggcaataataggctggctgagattgctggaaaggaaattataaagatagagcctggagatgatggagtttatgtgctactttggaacatgtatgcatcatcaaataaatggagagaagctcaagagttgaggcagcaaatgttgactcttgaaatcttcaaaaaaccagggtgtagttggatagaacttgatggtgttgtccatgaattcttggtagaggacaagacacatgatgatcgaagggaaatttatgaaaccttggaatacatgacaaggcagctcaagacacatatcagattatcctcatgggagcaacatggttcatccatttctgttgatgaagaaatcatagaatcatatactgctcatttgttgcatgattgattcacatgagtcttcccattaaatagccttttttgtgccgaaatcaaattcgatgatctcattgtaatttatttattattagtcttatcttgcagcgtctctagatcaagattatagtgtagaaatccactgctgtaagttggtggcaagaaattattagatatatgttgaggttggttttacttttaccagtcacttaataaaggttttagttgcaatgctggactacagagaagtttcttctaaatggcaagattattttatcatacattatctattttattgcattgtattctactttctaaatctggaagttcttattatgtgcgttactttttttaactgtgattcactcattgtcagatgtgttctgaagttcatgttgagggagatgcaagtgtcggacagaagggttgcaaggatataaggcgttacaaatgtgaattttgcacagttgtcaggtcaaagaaatgcctaattcaagctcacatggttgcacatcataaggatgaacttgataaatcagaaatatacaactcagatggggaaaagattgttcatgagcaggaacataggtgccaagagtgtggccgttgtttccagaaaccagctcatctgaagcagcacatgcaaagtcactcacatgagggcatagatagttaacagcgtgaagcattggatcccatttaaagaactccaaaatgcgacgaggtattttttattcttgcctgaactagtaacaggttgggatgacctcctgtgaagcttcaacaagattgcctcagtcacgctcactgagtagagactctttatttgcccactggaagactgccccttcagctataaaagaaaagatcacttgaaccgacacatgcttaagcatgagggcaaattgtttagttgcaccctggatggttgtgatatgaggttcagtatgaaggcagatatgcaacggcatgttaaggaaatccatgatagtaagaacccccatcaatttgtttgtaaggaggacggctgtaacaaggttttcaggtattcatcaaagctgaagaaacatgaggaatctcatgttaaattggactatgtggaggtagtgtgctgtgagccaggttgcatgaagatgttcagaaatgttgaatatctgagggctcataaccaatcttgccatcagtatgttcagtgtgagatatgtggagaaaagcacctgaagaagaacatcaagcggcatctgcaatcacatgacaaggtgccctctgatggaaggatgaaatgcacttttgatggttgtgaacacttcttttccaacaaatcaaatctgaccaagcatgtcaaggcatgccatgaccagctgaaacctttcaagtgcggaatcgttgggtgtggcaaggcgttcacctacaagcatgtcagggataaccatgagacatctggtgctcatgtatacatggaaggagactttgaagagttggatgagcagttgcgtgcccggccaagaggtggtcggaagaggaaagcattgacggtggaaacactgacacgcaagagggtgaccatctccggcgaggcttcatccttggatgatggagtggagtatcttcgctggttgctatctggtggggatgattcaattgattgtcagtagccggcgtctttttgctatcaccgctgctttgtacatgggttagattatgtaatgtaagttgtttggtagactacgatggtgttcatgacgcgtttgatatattgtcagcagtatggtagtgcagggctctcatagtaaagcttgccatttttgttgtatctttaacccacgtgggtccagatgatgtgtttattcctatgtatttacttatctacatgtatccacatgtgcgactttggcgtttgtttgagattataatctgttaaaatatgttggattatataatttgggcagattataattccaaacaaacactgactaatgctctatttgtttaccctctagtttatataatctagcttaaataagttaaaagaaacaaa

SEQ ID NO: 76910 - DNA, 2000 bp, Zea Mays
ttacttgtacagcccaacagcccaatgcccccatgcatggtggaaccctagagcttcacccctttttagcaccagcattccgccgcacgacctcactcaccacaggtgcggcggcgcacactgctgcacactgcactccctccgtcccgcgtccccgttcggcgctctcggcacgaccgccggtagcccgggacgcacgtcgcacggccccatccctcctagcggccggtgacggcaccggcggccctttgctcggctgtgcccaagctgcgagggcgagatctacccccgcgtccgtgcatcttcgtcaggcccttctccggacgagcactcacaggatgtgttctgaagttcatgttgagggagatgcaagtgtcggacagaagggttgcaaggatataaggcgttacaaatgtgaattttgcacagttgtcaggtcaaagaaatgcctaattcaagctcacatggttgcacatcataaggatgaacttgataaatcagaaatatacaactcagatggggaaaagattgttcatgagcaggaacataggtgccaagagtgtggccgttgtttccagaaaccagctcatctgaagcagcacatgcaaagtcactcacatgagggcatagatagttaacagcgtgaagcattggatcccatttaaagaactccaaaatgcgacgaggtattttttattcttgcctgaactagtaacaggttgggatgacctcctgtgaagcttcaacaagattgcctcagtcacgctcactgagtagagactctttatttgcccactggaagactgccccttcagctataaaagaaaagatcacttgaaccgacacatgcttaagcatgagggcaaattgtttagttgcaccctggatggttgtgatatgaggttcagtatgaaggcagatatgcaacggcatgttaaggaaatccatgatagtaagaacccccatcaatttgtttgtaaggaggacggctgtaacaaggttttcaggtattcatcaaagctgaagaaacatgaggaatctcatgttaaattggactatgtggaggtagtgtgctgtgagccaggttgcatgaagatgttcagaaatgttgaatatctgagggctcataaccaatcttgccatcagtatgttcagtgtgagatatgtggagaaaagcacctgaagaagaacatcaagcggcatctgcaatcacatgacaaggtgccctctgatggaaggatgaaatgcacttttgatggttgtgaacacttcttttccaacaaatcaaatctgaccaagcatgtcaaggcatgccatgaccagctgaaacctttcaagtgcggaatcgttgggtgtggcaaggcgttcacctacaagcatgtcagggataaccatgagacatctggtgctcatgtatacatggaaggagactttgaagagttggatgagcagttgcgtgcccggccaagaggtggtcggaagaggaaagcattgacggtggaaacactgacacgcaagagggtgaccatctccggcgaggcttcatccttggatgatggagtggagtatcttcgctggttgctatctggtggggatgattcaattgattgtcagtagccggcgtctttttgctatcaccgctgctttgtacatgggttagattatgtaatgtaagttgtttggtagactacgatggtgttcatgacgcgtttgatatattgtcagcagtatggtagtgcagggctctcatagtaaagcttgccatttttgttgtatctttaacccacgtgggtccagatgatgtgtttattcctatgtatttacttatctacatgtatccacatgtgcgactttggcgtttgtttgagattataatctgttaaaatatgttggattatataatttgggcagattataattccaaacaaacactgactaatgctctatttgtttaccctctagtttatataatctagcttaaataagttaaaagaaacaaa
